United States Patent Application Publication US 2008/0039413 A1 - sequence listing, part 5

SEQ ID NO: 593 - DNA, 26468 bp, Mus musculus
  misc_feature (1)...(26468): n = A, C, G or T/U
ggctagtatccagcttttgttcatatggaaaagagggagtgagactggaggattaggataaagtctgtagacaaggtgtgtgtgtgtgtgtgtgtgtgtatgagtgtgttgcatgaatatttgagtatgtgctcgtgagtatgtgcgtgagtgtgtgagaaagtgtgtgtgtgtgtgtgtctgtctgtctgtgtggcgtgttgccctaagcctgagccttgtgtcgtggacacagagcttgtgatctcattctggcagagaggctcagggcagagaatcatggaacattccaccgctctgactctgacttcccaccggctccaagcagaatctgccttttagacttgggtggttgcccgtgcccttctagctctctctctctccccctccaacaggtactgcagaggctcatcaaatcccgagggaagtctcaatccaaacacctcaatgtccaaatagcagcctcggagaagctggcacagtgtccccccgtgagtgctcagacccaggggagggaagggaaggtgtctttttgggttctcctgtttccttcaagcctgcatggaagacagcacttgggccaggtccttgggtaaagagggatgcctgattggccaaatggctcaaatactccctactgcgtgcccagccatggcctgatttccctatccctagaatgagagggagttgggctgagttcggtcttttgtaggtctgaagtgtcctttccttgggccacatccagaggccttttaaccttgtccttcaacccccttgactccacccactgcacccaggccacaccttcaacccttggtcacgcccccgctcatcccagccccgcccctaaccccacctccacaggaaatgttcgacataatcctggacgagaaccaattggaagatgcctgcgagcacctggctgagtacttggaagcctactggaaggccacacatccgcctagcagcacgccacccaatccgctgctgaaccgcaccatggctaccgcagctctggctgccagccctgcccccgtctccaacctccaggtacaggtgctcacctcgctcaggagaaatctcagcttctggggcgggctggaggcctcaccgcggggaggcgacgcggtggcccagcctcaggagcacgccatgtagccgatgtccctctggtctttcctcccaccctggagtgcagggaacatgaggaaggaagggaagagctttattttgtaaaaaacgtggtgagcggcagcgtctggtgtctgtggtttttggtgggactggggactggctggtgctgcctccctgggactggtcccttaggactgcatctcctgtctgttggacttgaggcctgatggggaccccatataagtccgagcactaggaagaaaatctcaggaagaagaataggctgttcattggactctacacacttttctttttgttgttgttgttgttgttgttggtttttggaaacacagtttcattctggcagtagctggcctggaatttccagtgttccagactggcctcaaactggaggcaatcctcctgcttcagcctcctggatgctggaattacaagctagcactacagcagtcagctccatgtacccacgttagatctaacagagtgggggccatcgaatccagagaacttgcctttccccggcatccctcaatctttgagggacccaagctggatctatgagctaagctgtaccttccaccgtctcccagggaaacagagtccaggaaaggctctcctcccacggagccacagcccatctctgagcccacaccgctaagtgtatggtctggcttagagccagaacaccatgaagtcattctagactgctgcatctcaagtgggttttcagcaacagagctcacttattcagtgaagctgagccgtcctggatctactcatggggagctgggggcctagcctccccttcccagcctcagggaccgcagccttctttgcccccaccccactctgccagaaaacagctccaggaagcagtttggaaactggtgctgttttgcaattcccatcccgctttaaccaggaattggtactacagagaggatagctccatcacacaccatgagatggccggagctgtcagccactggtgatgagggcattgggccacctgtggtactccggctgtgggcatggagctagggtagagacgtggagtcatgcgccctcttcaaactggctgctttgagtgctttatgggggtggcggggcggggggggggggggaggaatcctttcaaccttggaggctcagggttagcctaaggaagaagtgtgggtttctggaagactatggctgaggtctaagtgtgggcagaggaaactggggggtggggaggtcaagggagttcaagctgaaatctcagtatattgggaaaattggagcaattgactaacccaagcaacgactaatgagcggcagtactaatgagctgttaacgatgattaacccaggaaagcattaataacatgcactgaggaagcggtgactaattattcagggctccttaccatggttactaggagagttcacgctcagatgaagttgggtgccttcaggctgctagagggaggagcaaatggcctatggcatgccctcaggctcagctctagagccacgccctgctcctgggtgcccctcctctagagccagcgccctccaggagccaggctggtgtcttggcactatcactaacctgccttgctttgtgtttttctcacccctgcctgatctgcatggtgcgtgccgtctgtctgctaaccagggaccctaccttgcttccggggaccagccgctggaccgggccactggggaacatgccagtgtgcacgagtaccccggggaactgggccagcccccaggcctttaccccagcaaccacccacctggccgggcaggcaccctgcgggcgctatcccgccaagacacctttgatgctgacacccccggcagccgaaattctgcctacacggagccgggagactcgtgtgtggacatggagacagacccctcagagggcccagggcctggagaccctgcagggggaggcacaccaccagcccggcagggctcctgggaagacgaggaagactatgaggaggagatgaccgacaacaggaaccggggccggaataaggcccgctactgtgcggagggtggtgggccggttctggggcgcaataagaatgagctggagggctggggacaaggcgtctacatccgctgagaggcaagggcagttctgggagaggaaaggctctgagctcggggaggggaagggagggcagaggggcacaccacccaagatgtgtcttgcctccagggggcgctgtgtccctcgttttcagatgcctttgcttaaagcttggggtttctttggtggtaattatcccagctcttgggaggtccttaatccccagctgtaggtttttccctaaactgctgtaggtggatgggggaatgcctactttctgaagtgccccctttccccatctttgggggctctctccctcccagagaaaaggtgcacttcctcaactctttctactcggggctgtaagcgaaggtcttaatcggggtgggggtgggggcttcttctaccaacacaggggtacttgggaaaggttgggtgcttttcctgaagagagcccgctgaatcttccccaatcccccagacccgggatcccccaccatgtccatcccataacataacagtttcctagcagcattctctggtgggtgaaaggcacggcttggaaacccttggggagcagagctgggtgcaggctgctgggcatcagtgcgcgctctctgccctccatggtcatagcaagaaagcaggtcctagaaccttgaggagtgagcaactcaagatgctgcccccctccctccaccccttgcctcccccaggaatgagctttgtctacagcataccctgcctgctgccatcaggagagaggggccctctgcatctgagccccacatctccgtgccacctgggtgtggagaccatgaatactttgtggtccacctcattctaaaccaaaaaaactgctccttcaccgtcaccctgaggccccaggggacaggctctatgtgttggtacccgtgaggtgaccaccatccaggggcttcctaaggaccttgggtctcccctaggggtcttggttgctgctgcttctctgtatttgcctcttgtgaccctgtccttccccagtgtccactttccccaagagaggccatggtagcccctctcccctggggttcccttagcctcagcatccctaagagtccagcagccctgccccctccccagcatcacagctggtccagagagagccgattgtgccaacgaggactgggccctgcccagctgcccacctcagggatgggcacctcacgcctgtctcgccacctcctgtgccaatgttgccccaccctcctggggggtggggtgcagcttccactaacaggttagaagatagcactgcccaacctttcgctccctgccccggtctactgtcctgtgcccatctgtctgtctgtctgtctgtactcctctaggagagatattttgccacatataaaaccgcagttctgtcctttgcggccacctcctgagcctgttttctttgttgtcaccacactttgtcagccctgcagtctcactctctctccgtggtgagggtggggacctgttggggatcaagggggagtgcaagcaaatgctccgcctgcgcctttgaggccaaggagagatggtactttattttgctgcttcgggattgtctgcaggtgttcctcattcagccacaggctcacaccagccatacctcctgtttcttccctgcaaagggggcggggtggggtggggtgggtgctgctaattgagccggtgggctcaagcctcactagttcacatcttaaagacacatactttgtttttatttatttattgcccctttctactctgacctccctgtgccctagcagctcctcactagggaagggtgaacttcggctcctctgtatctcagaggtttgcctggatctgcctcttgactgctgggattaaagacaccacacacttagcacccagcttggtgtgtgtgtgtgtggtggtggtggggggggttatttgttcacctcctcccgagacagggtgtcactcagtacactcagtagacaagggtaaccatgtatctccagctacactgggatttattcagcatccccagatgctgggatcacagcagtgggtgaaccagcatgccaggaagttttattttgggacaggtttacaatgtaactcttgactgacctgggactcatgcagctgaggtgggactcaaactcatagcaactctcctgcctcaccctcctgagtgtgattgcaaaagttacagatgtgctatcacacgggtcctgagagctttggagccggggaggttttccgctggtgtgaagaggttggagagaccaggccccctgagacatgtgagaacaaaataagcaggtggcaggcccctcctcgtcaccagctgccaggatgtgggctctcatagctgttgtcctgcctcacacagcacctgcaaagcttccttgccttcctaggtcttgtttttgaggtgacagctctagaagacttgaacatctgggtcccctgcctgagtgcttctgttcatagtttgtgtttaagggtcagtctgacatcggacccctgatggcctccagataagccagcagatcacagacagggatctgggcagcccaggggcagagtcccttggggaactgatagtagagttgttgagagccctgctctgcctcccatcctccccactacctttgcatggtaatcgatcattcacgtctatgtttaggtgtggagccagcatttattaaagatctcctctgtggtaggcacaagtcaaactggaaaccacagatagcgctccaagtttcttgctgtgggggagcagtcagtaccgggaacaccagttccttaaccagagaggtcagagaaggctttgagagggaggtgaagctcccttgaaacctgggaacatggttaagttaacccgaggcagagaagagggaggaagttcctagtgcagaggagagaggggacatgcatgacatgctagtggctcctgactaacacaacatggtgacagctggtggccagagcagcttggcaggagcaggtcacagcaggccttctaagttttgttctgaaggactgtaaatggtcatggctagacacggtcttccctgcagatagatgatgccgctgatatccacctgggaggaaacctcagttcaggccatagaggaaggcagccactgacccctagaggagtccagcggggtgtgtgtgtgtgtgggggggcaactttaccagcctccacaaatatcattatgtgctgcctgtgatccccaagttcataattcttctgctccaggaaaccctgattttggaaagagtaggggttagggggttgagatggaggaagcaggtgtccaaatacgtctcttcctgcaccagctgcctacaactgcatttgctcagaacttaggtaggtatttctagccggcacagatagtagagatggggaggaagtcttgtttttaggtaaccacgccctctacccacttagactgccggatcagcaagctcgtgggtgtggacacgtgaggactttaacagccatgacatcagccagcttggtgctgccaccacttctgggactcagaagctgaggcagggggattccctcctaactgatttcctttccctcactgcttctctgactagcttcttccaactctggtggatactgcctctgtgacagaaggggggcaggccacagatcccaggtcagcccaaaggttcactgtccccccccttttttttaattgatatgaatacagtgtcactgtcttcagacatgcaccaggagagagcatcagatcccattacagatggttgtgagccaccatgtggttgctaggatttttttttttttcaagacagggtttctctgtgtagttctggaactcactctgtagactggcctcaaccccaagtgctggaattaaaggcgtgtgccaccactccccagcaaggatcactatcctgaaataggctgggttaaactgaggccactttggcccaggatgggcttgtggtttcagtccaatatcctaaatcttgttttagcttccatagtggctgtctaggcttccttctaaatcaaatcttctcagagaagtgtgtgtgtgtgtgcacgtgtgtgtgtgtgtgtgtgtgtgtgtgtgtgtgtgtgtgcactcgcgcatgtgcgtgtgtgcatgcgcttgcacaaacagcatggaggccagaagagaatgctggatcccctgacctccatggacgccaggaaccaaactctattcccctggaagagcagaaagccactctcaacccttcctaactgagccctctccagccaccaccgcagttctgttctgttcactcagtgtgcccccagcttgccgaatgtcactttcaattctgcaactgggtgacaaagcaggacgcctttcttcccctaggaaccagatggcagccatgcctcaaacactgggtgatttctccaaataccttctgtgcccctgtcaagcctcccagccccaaccccagctcccttcctggggctgacatggaatcagccctgatggactgtgtggatcatgtcttcaattctgtgttgttctagctctgtccaccaagaggaatgggatgaaggtgtgtgtcatatgtgcctgggtgggtctgtggaggccagaggtgagcttccaagggttggttctgtttgtctttgcttaccacaagcatcccagttaaaggctgccaggtgtttccctttcaaagcagaggagacattgaagcacgggcactggtgagagatctggctaagaccggggcctgagtgaggaccagtggatgtaaatactgctgaagtaggcacgcaggggctgtttatggaggctctcaaaggccacataaggaagttgctttgaactcagtgggcaacagagagccagccaaagctgatggagtggggagtcatggaccctgaactgtctttaagaaaggttgggccagccgtggtggtgcactctgagttcgaggccagcctggtctacaaagtgagttccaggacagccaggactacacagagaaaccctgtctcgaaaaacaaaaacaaacaaacaacaacaacaacaacaaaaaagaaaggttggtaagacatgaggaggagggagggcccgagcgcagtagaggtagaggtgaatcccccccgctgggggtgctgccttagcagagggcagacagccataggggccctaggaggatgctccagtgtgatgtgatgactacagcctctttcttggagtctgccttgaattgtagtgctggagaaatatatcaaagatttccaattttctcaggaccaaagagaaaatacggagtctgggactccagccaaaggtcaacgtgccttttttcacttctctttagatttttttctgggtttctcccaggttgtgaaattcacaaacaacacattggttttttttctccctcttcctgctggggctgctactttcctcgtgacccacaaacccactgttgggtctacctgctgctggagcctgtgaggccagaaggccactcagaagtttgaggcaggaggattgctggagttcaggagtttaaagccagccagggtgacagattatatatttaggtcctctgaaaataacaaacaaatcaacaaataaaaagacttttccctctgctgagagagactggctggtttagattgtaaaagacaatctcactatgtagcccaggctcggtatttattgtttcatttcctttggaatggggaaggggcatggaactcactctgtagaccaggctggcctcaaactcagagatccacctgcttctgtctcccaaatgctgggattaaaggtgtgtgccaccatgcccagcaatcatggtgatttaaattttttatttttattacttttaattatatattggtgtgtgcatttgcatgtgggtattgcacagagtgcagaagccagaagcaacaagttccctggacccagagttaatagagagtccttatctgtctatggtggctgctgggaacagaacttggtcctctggaagagcaacacgtgctcttaactgctgaaccatctcctcagactgtggcctgcaggttgcatgcaattgcatgtagctaaggatagctgtgaatgccatctaacacaaaatgggaaaaattacaatactatgtaattaggggctagagagagggctcaacagttaaaagcacttgctgctctttaagaggacctgagttgggtttccagtatccaagctaggatctgagtacctcgtctggcttccaaaggtatacatgtatttaaacatatggcatgtggttcagcgtgcgtgcacgtgaaaacacacacacacacacacacacacacacaaaatcttaaaatgctgggcttggtggcacacacctttaatcccagcactcaggaggcagaggcaggtggatctctgatgttggagtccagtctggtctacagagagttctaggactgtcagggctacacagagaaaccctgtctcaaaaaacaaaaacaaacaagcaaacaacaaaagttttaaaaaattactagattggattagcaaaacattttgagattctttgttgtttgttttgtaactgagttgcagggttcttcagtctgaactttgtagatgaggatgctgtgtctcaatgtgagaaagctggaccgcccttggagggtttccccccagcggtggcttttggagaggaagagcagacattttgcacattgctcactctactcgcaacactaaagcagatagttccaacttcagttttctcagggtaaagaggactctgggattttccttgcactttcctgtccctagacaaatacctagtcttcgtggtgacgccactcagaccctcagcaccgagaaagagccagcgtccggtgggattcccaggtctcgagggtgacgcttggggttccgcacatttgataggagcagcgggtctggccctcccctaggcagggctttgaagatttggggccagactctggtcctggaggctgctgagccccgcccgcccccagctccgggagtgccatgggacagctgatagccaagctgatgcgaatctttgggagtcagggtaagcggcgcaccgggcagcccagtgacctctttgattccgctgtcttctggggctcttgggattttggagtcgtccgtgaagactgactgggaaccttgcgctgctagagttggatttgtgcactcccatactctccatggcctcctgcctgctctcctcccacaagccccccgccccccaccttgaccccgcgcttcagtgtgcccagtgcacaggggtgggagagccttctgcctctgaccccaccacccagctgagctgtgtgcgaccctgagggcccccaaagtcaatttcctgagattgtgatttagagcccagtgtgcttcggaccctttagacgatcgctgtctagaaatgtagacggaggtggggtagggggtcaggaggggtgcaggggtccggtccgatggcaagtgaaacggtacagtcttcgacagaggtcccccggaccgcgtttctctgagcatcctaggaaattgggggggggggcgcacacagaaagctgagataccgagctttagctcggagattgccaagggatgtgtggagccgggagagaaggcatccattcatccagacaagagcagagggtgaggaagaggccaggacgagaagcctactagggacacccacgcccgcagtcgtccgggttggctctgaccttgcccttcccctggatgcctccagagcacaaagtcattatcgtgggactggacaatgcagggaagaccaccattctctaccagttgtaagtaactactgggtggatagagtgggctgggcctcacactagactgatagtcatttgcaccaatcaccagagcccttccctgggttagtgggtagttgtagacaagaagtgatgggaagacgctggtatgaccttcctgatttagtggctgctggcctggatttggatcccgccagcaatgggtgacttcaggtcccacggcctcccgcgatctaccctgccaaacacatttcagtcctggcaggtgtggaatgccaggcggtttctcgcctcgctgctcttggctccccctggcggcaggacccttatcttctcacccttgccccttacacttggttaacttcggtctcctacttcaaaccccagccagggcggaccggagctctgccagaccaggccacactcagacaaactcagacctttctctccccatatcaaccacaggacgtgggccttgcccagtgcttggtcacccagagctgagttgttctgggttggactcagctgctttgggagtagagggtctgagctgagagtgaactgggcaacgaccttaggcccttctcttgcctccccagcctgaccaatgaggttgttcacacctgctccaccattgggagcaacgtggaagaaattgttcttcggaagactcacttcctcatgtgggacctagggggccaggaggcgctgcgctccacctgggacacttactactctaatgctgaggtaaggagggagccaggtcggggaggtcaaagaggtggctgagcgttagcctgttagtcacctgacatattctctgagccttctggcacctgggacatgactgaatggaggtcacttccgctgagaggcaattataataaaggctgtgtcaaataacacggcatctggtaagacatttttaaaaaaatatttatttatttaatgtattagagtacactgtagctgtcttcagacacaccagaagagggcatcacaacccattatagatggttgtgagccatcacgtggttgctgggaattgaactcaggacctctggaagannnnnnnnnnnnnnnnnnnnagccatctctccagccctcttttgtttttaggatttaaaagtcttgggttggctcacaaccatctgtaatgggatctgatgccctcttctggtgtgtctgaagagaacaatggtgtattaatattcataaaaataaataaataaatctttaaaaaaaacaaaagataaaagaagaactaaatatataaatatgataaagatttgtgcctataaccccaacactcagggaactgagacaggagactcataagctccaggctagcctggtttatatactaggggttttgtctccaaagaataaaatataaggtgattaaaaatgggtgagactggcagcctggtgagactggcagaatgggacccacaggtcctttccagtggagctggcacgcaagcagggcagaggccagtgatcagaactgttggtaggaagcatgttcaccaaaaagaaagtttgcagctcatatctcaatcctgctggacagtttgtcatccttgtgatagatagcacagaccggaatcggctgctcaccacccgggaggagctgtataagatgctggcccatgaggtaagcctccccctgtgcccccccccccaactcgggaagccatccagtgagattagccgtgtactctcagactggtcacacaccctctctgaagttcatttcttttctttcttttgtttttgttttcttcaagacagggtttctctgtgtagctctggctgtcctggaactcactctgtagaccaggctggccttgaactcagaaatccgcctgcctctgcctcccaagtgctgggattaaggttcatttctgagatgctaatttgaaagccctatccttgtaacatggggagagctagtttactacagataaagggttctgtcagtgcccccagaaccactgcgcacaatttctggttcaagggctaatctcacctctcacccattgtgagaccccgagaaagttgtttcatttctaataagttgctccacttctaataaatcagaccattagatcccatctcacaatgggagtggtggcttttgcctacattctgggcaactgaagcagattgtcatgaggttgaagcctgcctgggctccatattgagttccaggccagcctgggttacagaataagattttgttttgaaaaaacaaaatggacagtggtggcacatgcctttaatctcagcacttgggaggcagaggcaggcggatttctgagtttgaggccagcctggtctagagagtgagttccaggacagccagggctacacagagaaactctgcttcaatggggaaaaaaaaaatcctaaaaaacaaaattaccaatgtctgaggtttttgcaagcatcctgtgagtgtttggaatatgttctgagagctgtggcttcattagatgggctgctgatgtcagggtgggcctccacctctgtcccccctggcatgggcctttctctaggacagtgggacagggatcctagaggactgtgggagggatgctgcgctggctggctggctgacatgggtgggtcttctgcctacaggcacttcaaaatgcttcagtactgatctttgccaacaagcaggatgtgaaagactccatgaccacagcagagatctcccaatttctcacactcagtgccatcaaagaccacccgtggcatatccagggctgctgtgctctcacaggagaagggtcagtcccccacccccacctgccctggcccatccaatgggcagaaggttacaggaaccttgtaaccacttgtttctttccagtcagaatctggcccacatttggctccaggcccacagctaaggtgctgtgaacttgcagaatgcctatgctccaagggcttgctctaataatggtaaaggctaagaacccccagaaaaaacagtgattttagggactgagaaaccctttggagaaggtgaaatggataaagtggagagagtcaagggttagtctggttttgactcaagggcaggggatagctaggacccaagaagaagaagagaaggaagaagaagaagaagaagaagaagaagaagaagaagaagaagaagaagaagaagaagaagaagaagaagaagaagaagaagaagaaaaagaaaaagaaaaagaagaagaggaggaggaggaggaggaggaggaggaggcggcggcggcttggtggtgttcacatttaatcccagcacttgggaagcagaggcaggcagatttctgagttcgaggccagcctggtctatagagtgagttccaggacagccagggctacacagagaaaccctgtctcaaaaaaacaaaaaaacaaaacaaaacaaaagagagagagagagaagaagaagaagaagaagaagaagaagaagaagaagaagaagaagaagctgctgcagaaagatctcacagggacaggccatacctacttggtgccaggtaccattctgtgcattgggaaaatggtggctagaaaactaggcagaaaatgcctgccttggagctggaggtgtggccccacatgaagccctgagctactgcaattactcttgtaatcccggcacttgggattacaagaggattattagttcaaggttatcctccagtgtatggtgagaggctagcctgggctacatatcaaggccctgccacaagaactaaaaccaaaacaaagaaacaaagtgataagcaggaagatggagaaaggagatgattagaaatagatgagggaagctcacaactttgtgtgcgtgtgcgtgtgcgtgtgtgtgtgtgtgtgcacaagtnnnnnnnnnnnnnnnnnnnnnnnnnnnnnnnnattcctttcatctctcctgtctggagtacttttttgatgaaaaggaaactttaaataagtaaatccaagcaaaccacggaatttccggccatacgcttgtcacctgaacccactagggactctcatgttccaatctgcagtctagtttacagtactccctcacacacacacacacacacacacacacacacacacacacacacacaccgtgccataccctgggccaggcaaggctgggtgatgacagacaaggccatgtttccatctttgttccggaggtgtgtttctcacttccggggagcctcttcccacgcctttgaggtcaccctgccactgcccctagtgacaaagcaggacaacaaaaaggcttgtccagagacactgctcagtggcccaggaaggagattctccacagtgccttcccagaggagcctccgtgcctcacaggggcctctctgactcccttctgctactctgtgagcctggtcagatgactgcttctctccaggagcctcagcctccaagcacagtgggtgcccgatgtgttctggaactcagctctattcccttctaccattaagtgattgaatataaccttggctcccctctcagtctgtctcaggcagacacttggcggtttccagccatcatcttatgggaaatgctgacagtccttccttccattcctccctccctgcaggctgccagctgggctccagtggatgcaagctcaggccaccgccaactgatgtcctagcccgaggccaaccagaaaccaaatgactagcaccagtgagaaacaccagtcatttgttggtggaaagagggtggctatggacaaaaagattactacagtcctctcagctgtcactgagagctggatcaaagacttcaagttggtgcagacaggactacagatgaagctgtccacccactccatcactgctggtgtgaagagagacactagggaacttactgcggagtgttgggggcaccaggtctcccagtcctcacgttctgtcttctcggcaagcaagagatctttgacatttccccctatccactggacgaaggagattccgataaaggaggcaataggacccggtcaaaagctggggggcatgagggtgggggtgggaggcagagagttgatgaatgagaggacagaacattccagactgtcgcagtcccttacactgcagggttctaagcccctccaccaccaaccgctcgctttcctgctcactgttccctcttaggtgctaacttcaggaccacagtttttgggacctaagtcaccacgtggaatctccttctctcttagcatccctctggtatgaatcccactcctctgaaatgtcaaggatctataggacctacttattttgtctttgtgtcatgatttttttaacatcgcattatgattttaaaattaaagatacacaataagtgtccctgaaaacgcctcacttcttatttttgtctgttcctcaaactggcttttgttctttgcagaaaggttttgggggaaatccaccttggaaacggggtgagggagtggggactgccgcaacgatccatttagctagagaacttggccaagctgaagagcattggcaccagctaaccagaactggaggtcctgaaggctcttggctctagtggggataagtggcctgagaaggggactccagtgagatggaaaagcccctgagtccttgtgctaaagatggattggaggcccatgatgtcttctatattcaggacagtatagcctttccccttttgaagcaggcaggggacctctaaggcatcccgggcagagatactaaggacacagatctttaactttgtagttttcctgagatgtggttatgaagggggagcttgtgaactctaggtagttcagtcaaaatttggattttcattaggttttccttgatataacaacaacaaaaatgaaatacagtgaatactaccgtgcggctgctttatagaaatctattacaatgaaatgcattctggtgaagcaagttcagtacactgggggtatagctcagtggtagagcatttgactgcagatcaagaggtccccggttcaaatccgggtgccccctcacggctacttaccgtgtgtcccttttgctagctcatctagcttgagtctttagagtggaggagatacgggaactcctccaaaccactctattttgctggcttatgctgtcctactggggttgcagttaagtgtttgtccctggccgaaatgtgacgcgagcctagtgtctatgactcccctaggcagcagcgcgagacccgcggggcgcgccgtgccggttggtgtattcaggtgcgggcgatttccactcctgtctcttaggaagatctgagtgtctagggttggggttaggttggaagcagaaggtagggacaagtaagcgtgagtgtgtagaagggagagagaagccgcggcggaattgaagagtgggatccgcccagaggagcgctggcgtcgcctctatcttctggaggacgtatttttctgcctttggaaggaatctcagatcatcaggaaacagcttttgttttgaagctagtaatctggtaggtcaggtcctcgtgtttcttgataacttcgaatcagtcttcccttttaaagacgctttagtgcgcctgcgctagactagcaccaagtagtaactgacgcaaagctaccggcagagggggtatagctcagtggtagagcatttgactgcagatcaagaggtccccggttcaaatccgggtgccccctagcaggctcactcttttctttggaagaccttattacgtcccgcatatttttatggcaatatttccatcgccaactcccaaacagtcagggagcggggacggtggtaaggaactgggaattttcagggcagtggctctccgaatgtgactagcaccacgggacttgggctcgtgctagacatgaagattcttggcctcctctctgacccagtgaactatccctgggtggggctagaaatatgcgttctgagaagtacttcccgtgcatgctcaagttctagaggcttacggttagaaacttgtccacgccgtttgcttctaatatttccaagttgttgcttttgcctgagccccaatacaagactttatggagaacgggcaccgagactgaccgcgcacgacgacaccagaattgaggctggaggtccatcttggaacactatagaggcccttcgcggcgcctgcgcgggcagtctcttaactcttcaagagatcagctaaacggcagccccgtggctcatcacgggtccactgggtggcggtaggaggccacatctggaagggacggtttcttcgataccccagaggctgtcctgggagaattcaggcaaggaattagaaagtcaatggctggctaggtttggtgggctcacctctgtaatcccttcaataaactgaagagtgatcgtgagttcgaaaccaacctggtcgacggcgttagtccttacctggaaaactaacaaaagtccctttggttgcggggcttgccttggctcatagtattacataatattatattgaggtcttggggagaccacctctaggtttttggacccagaggagagtgacactgggattcatttcctttcttggtccttcttttgacctcagtgccaggccactcacctacttaagcccacactctacttctgtccccagctgcagccttcttctggggataagtcccaggaagcagtctctgcaccctttctttccgcactctccaggtcccctacacagaggaagccaggggcccctcagtcctctccactctctaggccccagttcttctccttcccatgaagtaggtcacaggcaccttcgtgccttgacctgattccatgccgtctattaaatctcctaaattgcgggtatttttattccatacttgaagggggtggggtgggggggaagtgccctattcccagagtccggtaaagtgtggtggcagtgggcgccacttctggctctgggtctatcttggactgatctggcctttctgtggaaggggcaccgagctgtttcaaagtgggaatgtgccagtctcgagcacctacatgtctgctggacgggaggggggtgtgggtgtgggatggaatggggtggggtcggtgctggagatgggctgtgaagcagtcaactggggagacgcaattcgtgcctcttctggggtagaagctggggggcgggggggggggcgcggttcgactgcgggagattcctggtgcgtgtctgtgtgtgcacttatgtagaacaccaggaagccacagaagtacaaggactagctcagaaagtcgcatgctcttgggatgggtggtgggagccaacggcccaagtaggggcgcttcctggggcccttcacctcggccttttacttaggtttctggggcagcggggttctctcggtaaccagagatgtcccggcgcggtcccgggtcccgtggggtgcggcgcggagctccgggaggcggggaccccagcgttgcgccccgccctctgggttctcccgcccgcgctccccaaggccgcagcgccgtgcttcgctcgccctgcccgctccgctcccgctccccgctcgcccagcccggggctgctccctctgcagccgccgccgccgccgcgcagacccggaggtcgtccgcgcccaccatgcgagctcagctctggttgctgcagttgctgctactccgcggggccgcgcgcgcgctcagtcccgcaacacccgcaggtaggacgcgcggccagggcaggtgcagacccgccagcgggacctgggtcctgtcctcaggacgccagggataggggacaaggaccctactttctctgtgtgcgcacagagggtgcgcacctcctactgctgtcggaaggacgtggagggacccaggccggggtctccagaatagtcacagggaccggcgatcatttcagagaggcgtttgcttttcttttccatgctcttccctgctgcctctctcagctgctctaggtggggtcccagttgggcttgtgactgcgtgggagtcgccggaggatgggagacatcctggcaccagcctggccgtctaacttgcttcccctacctattgcgtactggtggagaggcagggaccccaggaaaaagcagccagctgctccccgatctcccagggtcaagggttcccttctcccccctgctaggttctgctcggttctcagttgcacaggctgagcatggaggtaagggggtgagggtggaggaggagcttccattctgcacactcctctttcctctagaccagtttctcaagccatttcttcctcttgaggtcctttcagggatctactttgaatccctcacgttatcaagaaaggccgtttttaaaaatatatatggtttagtttctgcacccaggctttctcggggaggtgggggctgggaataagggtgatttcacaagctccttaaaagggaagtgagtgtcccacttgctgttgtgtcagcatagtgcctaactgtgttcttgactttgatggtcacggtaggtaggtagtccaaatgaatctgggttgggatgagatggtatgagtggaggatgctggtggtgactgcgggggtagaggacagagaagtcacatgtccagagactagtgtggacccatcggtgtccatggtggctcccacagaaggtagctgagcacttagcttttagttctgttgtctcacttgctgtgtgaccttgggcgagttacttacccaagttactttctctgggctcagtttttgatgtataaaaagaggttcttgactaaatctttggctcttgaaggtggagttatgaaagattatttttcccccttaagatattctttacttctcggacaggtacaggcaactgataatttatcttaaaatggtaactagaaagggactgagtgggttaagtcccgagtccttttcagccttaggctggtgtgtttcctgaactcagatatggctgggttgatgagggatttgggccgaggagagggttgaggaagggagctggctacatcaggggacccagagacaagtgtcacttttgtaagtacagactacttagccgtctctgcttttagattcatctggaagacatcgggcatctgcagcaagtgagattgaggttagaccctaggaagctgtaaaaagccgtcagggcaattgttgactcatcccaggttgggctgggtttggtagtaaggttttgtagaggccatctgaggatgtgggggaatggggaaggctgggaggggtccttcatggagactggctgcttgctctgtatgatagagcccctgaggtcaatgagggggtgggagtgggggacccaaggaggcctagctccacctggggcaatggtgtccccatcagggctggtgttcctccatccctacagtcttgttcccatcatcatccttacaagggacacaggaggcatcgatgacctgaagaaggaaggagtctactgaggagagcccagaagcagcctgtagtcaggcagagaggaagatggcctccaggcccaggaaggggtcactgatggtctggtcccagagaaaccaaagacatccaggatacacacagaagggagaatctttcaggcagccattttggaaactcacaagcaatccctgcagtcacctatgttctgagccaaggttgcttgtctctagagtcagggccaaacagatgttttgtaacccaaccaaccttaatctgctttcagtttcctccttgcccaccaggggcctcccaataaactaatatactgttgactaaaattcagattcctcacaatggtttctgggattgctgctcttcctgtcagctgcaggcttccctcctcagagagatctaccctgctgggagggcctgggcaaccaccatactgtcctggttcactgggctgtgtctacgggaagacatgcagagtgtttgtgctcaggaccatgccctcctgtcactgagaactcctccacacccccacccccatcccccacacccccaccttgtgtggaaatctgcttaataaatgtgtgtgggaaagctgggcacggtgggccacactgagagcaaggccacttggaggaaaaaggatctcatgttcaaggtcatcttcggctacatagtgagttcaaggccagcctcctacacaaagcagccaggtgaccctgtttaaacaaaactgaacccttggggtaatcctcagaaagcagagccccatcccccacctcaccccaccccaccccttctgctactttgtgtccctttttcttgtgcacccttttaatctccaaggtgaagggcagggtctcaccaggaggggctttatatcaggaggtgggatttgttaggcctgggacaaccttgtgtgaccttgtatgaagcaaagaccaggacttggaggcacagtgtcatgtagccccggctggctttgaactcacttgtaactgaggatggccctgactttctgcctccacccgacagcactgggtaatgggattccaggcgtaacgccatcatgtcatgttaatagagccctggagaattgaacccagagcttctggcatgctaggtgacatgcgaggtgagcactctaccaactgagctacaactcccccgagcgctgcctgggaggttggtcttgccggctggtttgtgtagatggtttgctgaagattcaacctagcaagtgatagaactgttctcacctcatcttgtctgtcagagacggaggcttccagagtctgtaaactgtggcattctggttcaaggttgggcctccagcttggtggcaaacctgtcttctgtcagtgctgtgatagaacatcgatggtctccagcagggctgtgcccgagggagggtctcagtcctagaggctgggtgctgagtttctccctcctcctgccagcctcccaccccctccactcacgggtgcctcctgaacactggtccttgcagtgcccagaattctagatgcagaggtgaccaaggacatgacagtccaggaggccggcttgggtggtgcccttggcatctgggtgaggaggagagaagcgtcagggagactttttgaagcaacggcatcttgtcagatttgaaggatgaggagaagctcacggggaagcgggttacttaggagcacagcgttcttggctgagaagactttgtgaatctatggtggctgaatggcaggcctaggtcctagagggccaggagggatgtgagagaaagagaaagcagaacctggccgtaagggccctgggatcagctccaggggtgtggtgagagggacgcaggaatgatggaccacatgggcataagagctctcagatcagctgcaggggtgcggtgagagggacgcaggaatgatggaccacatgggcataagagctctcagatcagctgcaggggtgtggtgagagggacgcaggaatgatggaccacatgggcataagagctctcagatcagctgcaggggtgtggtgagagggacgcaggaatgatggaccacatgggcataagagctctcagatcagctgcaggggtgtggtgagagggacgcaggaatgatggaccacatgggcataagagctctcagatcagctgcaggggtgcggtgagagggacgcaggaatgatggatcacatgggcataagagctctcagatcagctgcaggggtgcggtgagagggacgcaggaatgatggatcacatgggcataagagctctcagatcagctgcaggggtgcggtgagagggatgcaagaatgatggatcacatgggtcttccatgcggcttgctctagctcgagtgtgtgggcaactggctctagggcataccgggtggaaggtgaaatggatacccagagagagcatcagcagtcagaacaatatggaggcagtatggctagcttgagttgggtcaggccccgggtggtgcaacccagttcctcctcagccctgctcacactgcagcagggctgtgccagatcaggggctgggggcatgatccttgtactcctctatatacagtcctggctgacccaaaactagctctgtaggccaggctggccttgaactcacagagctctgcctgcctctgcctcctgagtgctgagtttaagggagtgctgctacgcttggccatactgcactgtgctctatggttctgccagactgaagccggccggccttagttccagtcctgccatggaatgagtgggtgagccagaggcgggttgttagccttgttttataaaacagatctaatgctagtgcccatctcctggggttgattggcatggggatgaaagaaaggatgaaagaccactgagagtggctttgtctcctggagccactgctgtcacaccatgcccttagatggtatagccctgagtgatggtttagtctctgttctggaggccaaggatggaatgggaacagagaggcagaatcagcaccaagggtgcccaggggtgcccaggcatgccctccatgtaaatctgttaggctgtagcttccattaggcttcaaggctgtgtgcccagacatctatgtggtcctgtgcctatgtgaccaaccagctgcactgactcctggcacggactaagaggtgacatcttgctcatccaactggaagggcagacatgctgtagctggggagacacttctggggattcctagttctgagcctcctctgctcttcctccgtcatcctgcatagaactcatacccttactcctagatggatgggatgcctgaatggtttttactcagtaccgggatcagccctgttattggtgtgattgttacacagagaagctgcagcttcaagaggaaagactgccaggtcctagcttaggggtggtgggctggaacggggagcccagatgtttttcactgccatcctgtgggcctcctccctccctattcaacatccctctccaaggtcagtccaagtccgtggtacttcctgcctgtcctcaacttggctgcctgtgtggctttccagtcctagctcctgccctgcccttggggacacttgcaggaggatttggggagaaggccacccaactcactacaaacagacctgccacgaacagctgtggccttgctgaggaggcctctggggcagcttgcgtggggctgagtggtcgacagctgctacccagcgctgggctttcagccattcggtagatagcttggggaagaggtcagagctgcccctctgcccatatactccaggagcatctggttatgattaggggcagagacgtgagaggggcccggcaagagtccagcaggcaccagcagccaagaatgacttaattggataaaatgtctaatgacaaatcggagcctcacagcagcatcctggctgagcctcaggcctggtccagccaagccccgtttcaatctctgtccttgctgctaccagagagctatcccctagtgtagtgtcctcaattaagcagtgattgagcgcttactgtttgccaggcactctgaggagagcggagagaagcctgaggagcacacgtctccctgggagagatcataaagtggcctcagggagggggtcttgggcagggagacccactagaagagctttggtgagcaagactggtggcgtcagaggtagagaggagaggggtatctgacctaggacccaaaattgatgaaggtcacagtcagggtgatctgtgcctttcatatatccagggcaggagtgacaattagaatgtcactcctttgggaatgggaatgggaatttggccacagccttgggaaccttcatatctctctgaaatgaagaaggatgcttttcaggatcatttagaattagtttatcggccccaagagagctgtatgcttgggagacctgcctctgtgcggccacttgccagtcctgtgcttgtgacagacattactaatcgatcctgacaatcgctgctgctacacacagacgaggctttgggattcctgtctagagtgcttttggttgccgctaattaatgggagatggcatttgagatgaaaacctctctgccatcccagctggcttctgggtccctcattacacaaggaaagtgatttgcctaaggtcaaagcttgaaatagtgatggagttaaaactctgcccttcggcgggacaagggggccgggtgtggcaacacacaccttcaaccctagcaccctaggggcagatacaggcagatctctgcaaaggccagcctcctttagatagcaagttccaagtcagccaggactaagtattgaaatcctgtttcaaaacaaacaaaccaaatcaagttagcaagggaggacaatttgtttccaagaagtttctgttaaagtccagaagga

SEQ ID NO: 594 - DNA, 1369 bp, Mus musculus
tcgcaacactaaagcagatagttccaacttcagttttctcagggtaaagaggactctgggattttccttgcactttcctgtccctagacaaatacctagtcttcgtggtgacgccactcagaccctcagcaccgagaaagagccagcgtccggtgggattcccaggtctcgagggtgacgcttggggttccgcacatttgataggagcagcgggtctggccctcccctaggcagggctttgaagatttggggccagactctggtcctggaggctgctgagccccgcccgcccccagctccgggagtgccatgggacagctgatagccaagctgatgcgaatctttgggagtcaggagcacaaagtcattatcgtgggactggacaatgcagggaagaccaccattctctaccagttcctgaccaatgaggttgttcacacctgctccaccattgggagcaacgtggaagaaattgttcttcggaagactcacttcctcatgtgggacctagggggccaggaggcgctgcgctccacctgggacacttactactctaatgctgagtttgtcatccttgtgatagatagcacagaccggaatcggctgctcaccacccgggaggagctgtataagatgctggcccatgaggcacttcaaaatgcttcagtactgatctttgccaacaagcaggatgtgaaagactccatgaccacagcagagatctcccaatttctcacactcagtgccatcaaagaccacccgtggcatatccagggctgctgtgctctcacaggagaagggctgccagctgggctccagtggatgcaagctcaggccaccgccaactgatgtcctagcccgaggccaaccagaaaccaaatgactagcaccagtgagaaacaccagtcatttgttggtggaaagagggtggctatggacaaaaagattactacagtcctctcagctgtcactgagagctggatcaaagacttcaagttggtgcagacaggactacagatgaagctgtccacccactccatcactgctggtgcagagagttgatgaatgagaggacagaacattccagactgtcgcagtcccttacactgcagggttctaagcccctccaccaccaaccgctcgctttcctgctcactgttccctcttaggtgctaacttcaggaccacagtttttgggacctaagtcaccacgtggaatctccttctctcttagcatccctctggtatgaatcccactcctctgaaatgtcaaggatctataggacctacttattttgtctttgtgtcatgatttttttaacatcgcattatgattttaaaattaaagatacacaataagtgtccctga

SEQ ID NO: 595 - protein, 179 aa, Mus musculus
MGQLIAKLMRIFGSQEHKVIIVGLDNAGKTTILYQFLTNEVVHTCSTIGSNVEEIVLRKTHFLMWDLGGQEALRSTWDTYYSNAEFVILVIDSTDRNRLLTTREELYKMLAHEALQNASVLIFANKQDVKDSMTTAEISQFLTLSAIKDHPWHIQGCCALTGEGLPAGLQWMQAQATAN

SEQ ID NO: 596 - DNA, 28892 bp, Homo sapiens
atccaggccggacctcttaatgctgtcactaacttgccttgctttgttgtgtttttctcacccctgcctgatctgcatggtgtgtgctgtccgtctgctaaccagggaccctaccttgcttccggggaccagccactggaacgggccaccggggagcacgccagcatgcacgagtacccaggggagctgggccagcccccaggcctttaccccagcagccacccaccaggccgggcaggcacgctacgggcactgtcccgccaagacacttttgatgccgacacccccggcagccgaaactctgcctacacggagctgggagactcatgtgtggacatggagactgacccctcagaggggccagggcttggagaccctgcagggggcggcacgcccccagcccgacagggatcctgggaggacgaggaagaagactatgaggaagagctgaccgacaaccggaaccggggccggaataaggcccgctactgcgctgagggtgggggtccagttttggggcgcaacaagaatgagctggagggctggggacgaggcgtctacattcgctgagaggcaggggccacacggcgggaggaagggctctgagcccaggggaggggagggagcgaggggctcacacctgacatgtattcgcctccagggggcgctgactccctcctttcagatgcctttgctcaaagcttggggtttctttggtgttaccatcccagctcccgggaggcccttaagccccagctgtcggtttttacctgcctgttgtggatggatgggggatacccacctttctgaagtgtcccctttctcccatcttaaggggctctcctccctcaccctcctagagaaaaggtgcacttccttaactctttctactcggggccctaagtgacggtcctaagtgggatggctctccttctcccaagctgcagtactggggaagggctgggcgcttttcctggaaagggaggccacagattctttcccatgggggctctcttccccagaccccagatccaaggtccctcaccctgcctgccccttcctcccagcttcctggcagcatcgtctggtcggtgaaagccatagcatggacaccccatggggagcttgtcttggggagggttctgggtggaagctggcaggcatacagcaccctctaccctccgtggccatggcaacgtccagggcccagaaccctgaggagtgagcggccgagacgctgctccccaccccccacctccatgcctcagcctttgcctaccccaggaatgagcttggcctccaacatcccttgcctgctgccattagtagagggggcccctctgcatctgagccccccatccctgtgccacctgggtgtggagcccatggaacactctggtccgcctcattttaaaccaaaaaactgctccttcaccctcaccctgaggccccaggggagaggacccgtgggatggtgcccaggggttgccttgggacctcggatctcctctggggggcttggctgctgctgttgctgctctgtatttgcctctcgtgattctgtttgttacccatgttcacttcccccaggagaggccttggtaccccctctcccctggggcatccctttgccttggcatccctgtagcccagcaaccctgcccctccccagcatcccagctgggccagagagagccgagtgtgccaacaaggactggggcctgcccggctgcccgcctcagggatgggcacctcatgcctgtctcgccacctcctgtgccaatgtcccaccctccacctgggggtggggtgcagcttccacttactgattagaagacaccactgccctcccttcccccctccctgtctggtgtcctgtgcccccatctgtctgtctatatttgtctgtactcccctaggagaagtattttgccatatataaaaccactgtcctgtcctttgtggctgcctcccaagcctgcttctttgtcctcgccacatagtcgtcagcgtaggcacctgggagctgctgatatgcacggggagttgaaagggtgggtgcctgaagatgttgtgccctgagtcattgactcaaaagaaaagatgatcctttgattttggccctctgatgtattgtgcccaagccaggagctgcttgggcagtcccagctccacactggccctgagccccttcacttacctgtctctccacaagtagagccaaaggcaatgggaagctcaatgttgctcagtgggtgagatccagacccactggtgcaatgtcttaaatacacatgactgtttttctgctcttgtggcatcactgtgccccaacacctcaggagagggaggggctgagcttctggctccactaatgcccccctcgttcctgctaaccagctttggggacagggaggcagactacttgtgggggcaggtcagagaaaatcagggattctgccagtcccagactgaaagtcagcaggtgagtgtacccattcctcccatccccagctggcaggatgtggacttctgacagttactgcaaccacctgtgtcctgcctcacacagtaccctcaaactatttcccctccctcctggttctttttctttttttttttttttgagatggagttttgctcttgtcgcccaggctgaagagtgcagtggcgcgatctcggttcactgcaacctccgcctcccaggttcaagtgattctcctgcctcagcctcccgagtagctgggactacaggcacctgccaccacgcctggccaatttttgtatttttagttgagacagggtttcaccatgttggccaggctcctgatctcaggtgatccacccaccttggcctcccaaagtgctgggattacaggcatgaaccactgtgcccaccctggttcttgttttttgtgctggtcgccgtggaggactaaaattcctgagtccgctacctgagtgctgaggcccaacatgagtgagtgtgtgtgtgtgtgtgtgtgtgtgtgtgtgtgtgtgtgtagggcaaaagacatcccccaagaccctacagatgaggagttagtggatcaaaggaaagggaaactgggcaggcccagaggtcaagtggctgaccccagttccctgggggagccaatggcaaagttgatgagagcctagtctctgcctcccagcatagtgcatttcccactgccttcctacagaatcattcattcctgtgtttcttccttgaacaaatgtttattgagcacctcctatgtaccaggcacaagtctacgtaggggccatagattatttcagcacagcataatgtgctctctgctgtgggagcactgggtactgtgggagcattgggtactgtgggaacctgaaagaggggttagtcccataacctggggaggtcagctgaggcttcctggcagaggtgaggcttgagtagaatctggaagcatggttagcagacaaatggggaaagtgttcaaggcagagaaagcaggggacatgcatgacatattcttggcacctcaccaccaaagtgtgctctcaaggtgaattggcaggagcaggtcacagtgggccttgagtcatgttaaggagtttgggctttgtcctgaagctcgtatgcagaaatggaaggattgtaagcaattagcaagattgctttgtttgcagtttggcgcatagattggaaggcctagcttagaaacagctgtgataatccaggtgcgaaaggagggtttgccttacgccacagcagtgggactggaagggaggcaaagaggccagagagatctagcagttagatggccgggcttggtggcttatgcctgtaatcccagcactttgggaggctaaggggacaggaatgcttgagcccaggagttttagactagtttatgcaacatagtgagacccacctttttacaaaaaattttaaaaattagctgcgtgtgtagtcccagctattcgggaggctgtgatagggaggctgaggtatggtggatctcttgagcccaggaagtcaaggctgcagtgagctatgatcacaccactgcactccagcctggatgacagagcgagaccgtgtctcaataaagaaattaaattaataaataaatgttagcatcttgagctcttggagagcaagtggaggcggctgataagagaaaggaaggtgaggccgggcacggtggctcacgcctgtaatcccagcactttgggaggccgaggtgggtggatcacaaggtcaggagtttgagaccagcctggccaacatggtgaaaccccatctctactaaaaatacaaaaattagccaggcgtggtggcggcgcctataatcccagctactcgggaggtgaggcaggagatttacttgaacctgggaggcggaggttgtggtgagctgaggtcacaccacttcactccagcctgggtaacagagggagactccgtctaaaaaaaaagaaaaaaaaaaaaaagagagagagagaaagagaggtggccaggtgtggtggctcatgtctgtaatcccagcactttgggaggccgaggcgggcggatcacctgaggtcaggggttcaagaccagtttggccaacatggcaaaaccctgtctctactaaaaatacaaaaatcagccgggtgcagtggcacacgcctccagctactctggaggccaagcaggagaatcgcttgaacccaggaggcgaggctgtggtgagctgagatcacaccactgcactccagcctgggtgacagagcaagactctgtcttaaaaaaaaaaaaaaaaaaaaaaaaaagggagtgactgctgatggtggtcttctcagcaaaagcaggtaaaaaaaaccaaagaagttaggggcagaagtgatcagtccatctttggtcaaagtgggtttgaggtgcctgtgggacattcaagaagagaagcagaggctgggcgtgctggcttgtgcctgtaatcccagcactttgggaggaccaagtgggcagatcaattgaggtcaggaattcgagaccagactgggcaacatggtgaaacctcatctctactgaaaatacaaaaattacctgggtgtggtcgtgggcgcctgtaatcccagctactcaaaggctgaggcaggagaattgcttgaactcgggaggtggaagttgcagtaactgagaacacgccactgcactccagcctgggtgacagagcgagactctatctcaaaaaaaaaaaaaaaaaaaagagagagaagaggaaaagacagctgggtacatggtctggagctccacagagaggtctggagtagagtctgatgttttgaatcaatgtcaggtattattaactccagtttacaaagttcagagaggttaaactatttgaccacagttatacagccatgaggcaaggatttgaactcagatatatagatgtcaagttctgtggtgcctttgacccccaagttcagtgctaattcccttgtcccaggatgcatcagcttctgcaagggggggctgggggtttgagaaggaggaagcaggtgtctgagtgtatttgtgccccatgtgccttctgcctgaaattgcatttgcagcccggacacggtggctcatacctgtaatcccagcactttgggaggtcgaggtgggtggatcacttgcggtcaggagttcgcaaccagcctggccaacatggtgaaaccccatctctactaaaaatacaaaaattagccaggcgtggtggtgggtgcctgtaataccagctacttgggaggctgaggcaggagaatcgcttgaacccaggagggggaggttgcagtgagctgagatggagccactacactacagcctgggcgatggagggagactctgtctaaaaaaaaaaaaaaaaaagagagaaaagaaattgcatttgcctggaacttgcaggaaaggcatttctagctggcttggagatagcgagagatgggggcagattcttgtttcttggtaatcagaagctctcaattaactctggctacaccatcagcaagttagtggttgtccatgtgtgaggatttcgacaaccatgaagtcagctgagaccaggcaggaactgagggactggggacttctgctacctgggaccctttgtttccttccctgactagctgctcctgtttttgcagtgggttctgtcccagaatgaggtgatgtgggagaggcccaggtcctacatgtggcttaaggtttccactgttctacactaaagagaactaggctgaggccaccatggtccagggacaaggggctgtcccagttcagtatcttagagaaaaattttgtcttagctccaataatctttttgtgtccggagttggttcctgctggtggggttcgtggtctcgctgacttcaagaatggagccgcggaccttcgcggtgagtgttacagctcttaaagatggcacggacacaaagattaagcaacagcaagatttattgtaaagagcaaaagaatgcaatagaactaaagcttccacagcgtggaacgggacccgagcacattgctgctactggctgggaggtggccagcttttattcccttattggccccgcccatgttctgtttctgtcctatcggagtgcgcttttttctttttctttttttttcctttcttttcttttctttctttttttttttttttttttttttgagatggagtcccactgtgttgcccaggctggagtgcaatggcgcgatctcggctcactgcaacctccgcctcccgggttcaagcaattctcctgcctcagcctcctgagtagctgggattacaggtgggcactaccacgcccagctaatttttgcatttttagtagagatggggtttcaccatgttggtcaggctggtctcgaactcctgacctcgtgatctgcccccctcggcctcccaaagtgctgggattacaggcccgagccactgcaccctgccagagtgccctttttttcaatcctccctgtgattggctacttttaggatcctgctgattggtgcgttttacagagtgctgattggtgcattttccagagcactgattggtgcattttacaatcctcttgctagctacagagcactgattggtgcgtttttacagagcactgattggtgcattttacaatcctcttgctagctacagagcgctgattggtgcgttttacaatcctcttgtaagacagaaaagttctccaagtccccgctcgacccaggaagtccagctaggttcacctctcattttcttcagagaagggtgccttgctttctttctaaatcaggccttcctactgtctctcagaggggtgtgtgtgtgtgtatctgtctctctctctagaccacaagctccataaagacccagactgggaatgggagcagtggctcatacctgtaatcccagcactttgggaggctgaggcgggagattgtttgagtccaggagttggagaccaatggcgaagcccatctctacaaaaaaaaaaaaaaaaaaaaatagctgggagtggtggctttcacctctactcccagctactcaggaagctgaggtgggaggatcacttgagcctgggaggttgaggctgcagtgagccgcgatcctgccactggactccagcctgggtgacagagcaaggttctgtctcaaaaaaacaaaacaaaacaaaacaaaacaaaaacataaacacctggactaggtctgttttgtctacttcatgtatttcctggctcatatttgtcaaatgaatgaatgaacgaatgaatgcttcttaagatccaggtcctgggcctcaaagtggaggcagatcttctcgtctgtttttctattttcttttcttttttttttcttcttttctcttttaattattattttttttaatcaggcagcttccagagccagagtatgctcagagagatgccctctccttgtctgtttactgaatgtgtttccagcttgcagagtgttactttcaattctgcaaagaggaggtggggagggcagcatgcactaagatgttcctccccgcatcccactaaccccaggaaacagatggtaaaatgcttaagacactgctgcttccctcagcacccttggtgccccaccccccagccccagacttggctccttctctcctaaggctgaaatgcaatcagcccagatgggctctggcagtcaactctatccttctaactctgggcaccaagcagggtgggatgaaagtctgtatttagtcagctattttccttcttcttcccgcaaacttcccagccttcctcaatcctcttaaacttgtgttcacattccttttttaatactccaagtgccatttctcaggctgtagcttaactcattctacatcagtctgacagcaacacattcctcctgtgtgcagggttctggaccaggcagggagtgattgggctggcgggggaggtcatatgctggttaacaatatatgaatcccaccctggtactcacagttgatgggaggaaacagacttgcccgtctataagcccagtgtagggagaagccccatgtggctggagaaccaagtcagggctggggaagcaggtggcttttatggcagggcagctaatgggtctcaggcattctcctttctgagaaggtgaaaggcactcaaggaggaaatgcagaagcaaaggcaccatcagaaagagccaggcatgtataggcaggaaccagtagatacagagcctgggagataaacctgtgaaggcaggtgggggctgttcgtggaagctcttgaatgtcaagtggagactgatctgaatccagtgagcaatagggagccattgaagatctatgagctgggggagttacagaccctgagctgtgctttaggaaggttaataggggccatggagaggatgccttgggaaaggagaggaagatgcagggagaccagttagaaagttgttaccttaatggagggttgttaccttagtggaggctgcaggaaggcagtacagtcgggtggaaggagctggctccctggtgtgttggctggatctcctgctaaccattcctgcagcctgagggcacgttgccttttggacttctccttttgttatctgattttttgtttttctccccccagcttaagcaaagaaagaaattcacaagcaacagcaggaaactccaccttccattccctcctcaggcctggcctcctggttctctgttggcccatgtactcctctgccaggtatctggggcctctctgcagggtctccagccggaggatctctcttcatgctccatccttgtcttcaggcgcccacttttggggatcaggaagctgtgcctgggcagtaggtttgtccgtgaattgtaggagtactgatttatcctagaagttgccaagcatcaaggggagaccctgcccttccccaggggaatgcaatttgagtgggcccacaagacccacgctagtgaaccaactgcacatctgtggagggttggaatattctcccagctcagagaggatcggtgagccctgtctgtactacacagctggtaggtacagaaagtgggtcgcctggggttttgcttcagtctagtgccctagacatggcactcagaggagggagagctgggatccggttccgcgcgcagtgctgagtctcccctgatttgcggtagtggagcagtccacccggagaactcaggagttttcgcagggcgagggggagggctggagcctggaacccccatattccttgcacctcttgggcccgggacaggcagcccttagtcactggggtgtccatagtgcccacgaagggccagcgtcccagagggttcccaggtcaggttggtgacgtgtggggcttccctaacttcgtaggcaaaatctgccagaccctcccgggggagcggagctccgagtaccagggccgactccgctcctgaggccgctgagccctcctgcacctgtccggcccgggaagtgccatgggacagctgatcgccaagttaatgagcatcttcgggaaccagggtaaggggcgcacagggcatccaagcgagcgctttgatctcgccctcttctgggactcctctgatctgtggtcggacgcacggggggacctcgggctccgagggtcgtatatgggcgctcctcgactgccccgcggcctcccctgcccccgtccctgcctgctcctcttgggtcccggcgcttcggtgcgccccaggacgcaaagctgggcgaccctcctttctccccgctaaacggagccagcggcggggatggggggctgctgcgagtttcctgcgattgtgacttcgcgttatgctctttctctaaacaccgtctcttggcaagccccgaagcgccccgggcctttcagacacttttctagaatgtgaagggaggtgggggctcagctgtcttttccaccgtcccggagtggggcaggtgtcggagttgggtgggaagcagacgcggtacggtgggcagaggtccccagcctgcggggagcgctatctccttcctgggaggtctggtgggggcacacagtcccttggtcttcgggtttggccctgacgctgcccttcctccgacgcttccagagcacacggtcatcatcgtgggactggacaatgaaggaaagaccaccattctctaccggttgtaagtgactctcgggcggggagggtagagagctgggcctcccaccagactgacaggcagggggaccaatcactggagctcttccctgggttcccgggctcctctgtagtccggaggagcgattgggcacgctgcttggaccttcctagtactgcggctcctcggtctggcattcaaatcctgcaccgtacaggcaaccctagctcccactgctttcctccatcttcccgggggccctgccaaacccagctccaggcctgccaagtgtcccaaactgcctccctgctcttcgctccctctagcggcaggtccctcctttctcacccctgtcccctctgccagttaactttcttccccttcttcaaacccaaaggctcactgaggctctgtagctcctggtctagcaagcctggcacatatgggtggtgctgagtaaataccgatcgcagctttccccgatattcgctctctggatggcacctctcccattttacagcctccaaagtactttacttaggagaagcttttccatgaaaaagtaatacatgtaatgattttaaaaaattataaaggaaaatttcaaacaatggaggaatacacggtgaaaagtaagtttccttcttgcctctggctcctagttttcctcctattgtaactttgcgtaacttttcagaagcattatttacatataaaagcatgtgtatattttctatgtcactttaaacaaagcacctctctgatgtccctcactgtgtctgtctcatttttctaaactcttgctcctcaaagtgtggtctacagaccagtcacacaggcatcacctgaaagcttattaggaatgcaaaaccatggccgggcgctgttgctctcaaagtgcctgtaatcgcagcactttgggaggccgaggcgggcggatcacctgagatcaggagttcaagagcagcctggccaacatggtgaaacctcgtctctactaaaaatacaacaacaacaacaacaacaacaacaaagggctgagcaaggtggctcacgcctgtaatcccagcactttgagaggctgaagtgggtggatctacctgaggacaggagttcgagaccagcctggccaacatggcgaaaccccatctctactaaaaaaatataaaaattagctgggcgtggtggcacatgcctgtaatcccagctactctggaggctgaggaaggagaatcacttgaacccgggaggcagaggttgcagtgagctgagactgcgccactgtactccagcctgggcgacaaagggaggcggaggttgcagtgagctgagattgtgccactgcactccaacctgggcgacagagagagactacatctcaaggaaaaaaaaaaaaaaagcaaaactgtggccggatgcggtggctcatgcctgtaatcccagcactttgggagtccaaggtggatggatcacttgaggtcaggagttcgagactcgcccagccaacatggcgaaaccccgtttctacaaaaatacaaaaataagcctggcgtgggggtgtgctcctgtaatcccagctactcaggaggccgaggcgggagaattgcttgaacctgggagacatgatcgtacctacactccagactgggcgacagagtgagactctgtgaaagaaagaaagagagagagagaaggaaagaaagagagaaagaaagaaagaaagaaagaaagaaagaaagaaagaaagaaagaaaaagaaagaaagaaagaaagaaagaaagaaagaaagaaaggcaaaagcctggacccctgcccagactcactgggtcagaatctgcattttgacaaaactctcaggtcattcaactgcatattaaagtttgaggaggctgggctctgtggctcatgcctgtaatcccagcactttgggaggccaaggcaggaggatctcttgacaggagcccaaggtcaggagttcaaggtaagcctgggcaacacagtgagaccctgtttctataaaaagaaaaaaagagataaagtttgaggagcctcctctaagatgtttcccttctctggggtccaagccagggcagggcttagtctcactcctgtcttcattccccagggcccagcacggggcctggctccgagcaggtgtttggtgaacctgggtggacttgttctgagttagattcagactgctttgggagtagagcatttgggggccagagttgggagtaggctggactgagctcttggtgcccactcctacctccccagcttgaccagtgaggtggtccatatgtgtcccaccattggcagcaacgtggaggagatcattctgccgaagacccacttcttcctgtgggacatagtgagacctgaggctctgagctttatctggaacacatactactccaacactgaggtgaggagggcaccagggctgaagggtctccaaggcaggcgtgtgatatcagactgtcatgtaacctttctgagccttggttccccaacttgtgaaatagagattataatggtcggttcctgtggctcacacctgtaatcccagcactttgggagtccaaggcgggtggatcacctgaggtcaagagttcgaaaccagcctggccaacatggcaaaaccccacctctactgaaaatacaaaaattagctgggcatggtgtcaggcacctgtaatcccagctactcgggaggctgagacaggagaactgcttgaacctgggaggcagaggttgcagtgagccgagatcacgccattgcaactccagcctgggcaacagagcaagactctgtctcaaaaaaaaagttttatatatacatatatataatgatctccctaagttgttgtgaaaattaaataacaaaccaatatgtaatgcatatatgtcagatactcaacacagtgcagtgcctgcctgttaacgtgtttgaatacttcctggcagctgctggcagctttctgtttgatgcactggatgggtaggccccttctctctaggggccttactttcttactccagcaggagtagaattcagtggtataattcctggaccgagacagagctgggttccatttccagcactgctactcaccagctgtgtggtcaagagcaagatacatagcctcactgagcctcagtctcttcatttgtaaaatggggatactaacagtaccaagtccacagcgttgtggtaaggcctaaatggagtcatgaacacccaatgcttatgtagcacagcctctgccacacagtcagaggtgtgctattcccatgtctggatagaaaagacaattacaggccaggtgtggcagcacacctggtggtaatcccagcactttgggaggctgaggcaggcagatgacctgagatcaggagtttgagaccatcctggccaacatggcgaaaccccgtctctactaaaaatacaaaaattagccgggtgtggtggcacgcgcctgtaatcccagctacttgggaggctgaggtgggagaatcgcttgaactaaggaggcagaagttggagtgaaccaagattgcgccactgcactccagcctggatgacagagcgagactccgcctcaaaaaaaaaaaaaaagacaattataatggaagcagggtggtgaaatcttgaggctgcatgctttcatttctctggggctgacatctgggcagtgcagagaccagtggggaaacaaagagggcaggaaacacatttaccaaagagaaagcctgtctctcacggctcccctctgctgcccagtttatcatccttgtgattgacagcacggaccgggatcggctgctgaccactcgggaggagctatataaaatgctggcccatgaggtaagccccctgcagttgggagagggcccagtggtactagctgtgtgccctcaggctggtcacttagcttctctgagattcgttcctgctgtcccagtttctgagagcctctataccagcagcatgaggagggctggtttgtgcctgatgaagggcatcagtaccctcagtgcaattgactatagaagccagagttgctggttcaagttctaactccatctttcattcactgtaggactttggacaagtgacttcacctctctaatcctcagtttccccaagtataaaatgaggaggatcatcaattcccacctatgggattgtcataaagaggctttccttgagctgctgatgttatttgatacggttgctaccattgtggcagggcccccatctctgccccatccaggcatgggcctctcttcctgggacagctggagagggagccagagagcgcctgtgaggcagtaggaaggaaggctgggcactagcaggctgactggggctgggctcctctgtccacaggctctacaggatgcttcagtcctgatatttgccaataagcaggacgtgaaggactccatgaggatggtggagatctcccatttccttactctcagcaccatcaaagaccactcgtggcatatacaaggctgctgtgccctcaccagggaagggttagtggctgccctacctggatctctagggcctggctgaaccaatggatgactgaccatcagaacccttctcctgcctctctcctgtgagaatctggttcacagttggctcctgggccaagccaatttggcatctccccacaggtgagatgtggtgggtaagccacaagcagacagcatccctgctctcaggggcttgttctagtggagaaagaggtagcactccgcctaaatgcaataatctctctctctttttttttttttttgagacagagttttgctctttgttgcccaggctggagtgcaatggcatgacctcagctcactgtaacctccgcctcccaggttcaagcaattctcctgcctcagcctccggagtagctgggattacaggtacccgccaccacgcctggctaatttttatatttttagtaaagatggggttggccaggctggtcttgaactcctgaccacaggtggtccaccggcctcggccttccaaagtgttgggattacaggcatgagccactgcacctggccgcaataatcttaggtgctgagaagtgatgtgaagaatcccactggttaccagaaatggaagggagaaggataggtctgatttagttctggtggtcagggctggcctctcttaagagatgacttttgagctgagacctgagtgaagagtaggagacagccatggggagacctggggaacaagccttccaggcagaaatcattgactcactctgacttcagtttcttatctgtaaggaagaggatcattatacctcctagagtttctgtagagtaaatgacaccattcagtacacaaatctttcttgagcacctcctttgtgccaggtactgttctaggcactggagaaacagcagcgagcaaaacagacaaaaatccctgccctcacggagcttactttccggtaggggaggcagatgataaacaagaaaaatatatagtcagttagaaaatgatggcggggcgcggtggctcatgcctgtaatcccagcactttgggaggccaaggcgggcagatcacccaaggtcgggagttcgagaccagcctgaccaacatggaggaaccccgtctctactaaaaatacaaaaattagccgggtgtggtggcagatgcctgtaatcccaggtacttgggagggtgaggcaggagaagcgcttgaacccaggaggcggaggttgcggtgagtcaagatcataccattgcactccagcctgggcaacaagagcgaagcaccatctcaaaaaaaaaaaaaagaaagaaagaaaatggtaaacggcttgaggccaggagtttgagaaaagccttggcaacagagcgagactctgtctttacaaaaaaaaaaaaaaaaaaaaaccgctggatgtggtggcacacacctgtattcctaactgctcatgaggttgaggcaggaaaatcacttgagcccaggagttccaggctgcactgagctctgaccatgttgctgcactccagtctgggtgacatagcaagatcctgtctcaaaaaaaaaaaaaaaaaaaaaaaaaaaagtgataaatgataaggtgaataaagagtaagaaacagagattgggccagcatggtggttcatgcctgtagttctagctactggagagtctgaggcaggaggatggcttggggccaggagttggagtccagcctgggcaacatatccagacccccatttccaaaagcaaaaacaaagaaaagaaaagggagagtggaagtgtgtggagggaatgttgcaattttaggtaagttatctgacaagggacactaagcaggtagatattgagtaatcacctggaggattttaaggagctgggccacgtagaaagggccttacatcaggcctggaaaacttccctttcgtcttacctgtcaagtggaatcatggcaggctgggcacacaggtatctttttttttttttttgaggcagggtctccctctgtcaccccccaggctggagtacagttgtgcaaacatggcttactgcagcttcaacctcttgggctcaagcgatcctcccacctcagcctccctagtagctgggactacaggcgcacaccaccatgccctggtaatttttgtatttttgtagagacaaggttttgccacgttgcccatggctggtgtcaaacacctgagctcaaatgatcttcctgccttggcctccccaagtgttgggattacatgagtgagctaccacgcctggcgcagatgtgttttttgaagaaggggagactttaggcaagtcagtccaagggaccacacgtttctagcagtgtccttgccacccgctgggtcaggagaaccctcttccacaacccacagtcagttcaatcagcattttccctcccttctttccctccctccctccctcacttcctccctctcttccttccttccttccttccttcctccctccctccctccttccctttcttcgacggccacttgctctgttgcccaggctggagcgcagtggcgcgatctcggctcactgcaagctctgcctcccaggttcacgccattctcctgcctcagcctcccgagtagccgggattacaggcgtgagccaccacgcccggttaatttttttttttgtatttttagtagagacggtgtttcatggtgttagccaggatggtctcgatctcctgacctcatgatccgcccgcctcggcctcccaaagtgctgggattacaggcgtgagccactgcgcccggccacttttttctttttttttttttgagtggagtttcactcttgttgcccaggctggagtgcaatagcatgatctcagctcactgcaacctccgtctcccgggttcaagggattctcctgcctcagcctcccaagtagctgagattacaggcatgcgccaacatgcccagttgatttttgtatttctagtagagacgggctttctccatgttggtcaggctggtctcgaattcccgacctcaggtgatccacccgcctccgcctccctaagtgctgggattacaggcgtgagccactgcgcctggcccaatcagcattttctaagtaccccccatgttccctgtgcggtgccagaccaaggctgaggatgatacagagatgaccaagactccacccatgcgccggagttgcttacaatctaatgggggaacttgcgtagggaacctctttctggcacagatcaccgtgaagaatccttgcccagagacacagctaaggggcccagcaaggtgagtctccaggctccttcctcagagaagccctccctgactctcaggcatccagaggcctctgtatatttcctttatcacagtatgtaattacagaattatgtgtctgaccatttatttagtatccatctcttctactagacagtaagcctcaggggcatgtctgcattttcaccagtaactccagagccttgcacagtacctgatgcacagcagatactcaagccagttcatctctgttaattgaattattggatgtaactttggttcctgcacccagtccgatctgggcaagggctggagacttgaaggccatcattctcttgggttaggctgacccctcctgttccttcctccctgcaggctgcctgccagacttcagtggatggaatctcaggccgctgctaactgatgttccagtctgaggtcaaccagaaactttggggttttgcatggtcaacatgggtggaaaatcaagtggctatttattacttttctatggttctctagtgggagcagtggctgctatggacagtgagattgacaccattctcccaacccgttgctgagaagctggactgcataccttggattcctgcagacagcacagcagaagaagctgctcctcactccatggccgcaggcatccttcttggagacgtcagggaaatgttggatatgttgcagatttagtgagtggaactctctccctctcctcagccctcagtctctccgtaggaataatgtgtgtgtgtgttgggggggcagattaagagacccctgaggctgggcgcggtggtttacgcctataatccagcactttgggaggctgaggcaggaggatcacttgaggtcaggagttggagaccagcatggctaacacggtgaaaccctgtctctactaaaaatataaaaattagcttggtggtggtgcacgcctgtagtcccagctactcgggtggctgaggcagaagaattgcttgaacccgggaggtggaggttgcagtgagccgagattgtgccattgcactccagcttgggtgacagagcgagacaccgtctcaaacaaaacaaagcaaaatacaaaaattagccggacgtggtggcgggcgtctgtaatcctagctactcgggaggctgagacaggagaatcctttgaacctgggaggcggaggttgcagtgagttgagatcgggtcactgtactccagcctgggcgacagagagagactccgactcaaaacaaaaacaaaaacaaaaaaaaaaacccctggaattgctcttcatttcctcaaacctccttccaccctcaggctttttagcccctcagccatttttgtcccattccctttgggcaaaggagattctagcaaggtgaagaaggtgggctcaaggggaggagggcagaggcaaaaactggaaggggaaatggaggaggacaggacgtcccagatagggacagccctttgcactgcagggattccacttctcctcgtcttcccattccctctgagatgctgactctgaccacagctcttggactttaagccaccccacagcatcccctttacttctagtgtccttccaatttgaatcccactcctcccaaatataccagattcctaaaggggctgcttgtttgtctttgtgtaatgatttttgttgttgttgttattgttggagtctcgctctaccgcccaggctggagagcagtagtggcgcgatctcggctcactgcaacctccgcttcccgggttcaagcgattgtcctgccccagcctctcgagtagctgggactataagcgcgcaccaccacgccctgctaatttttttgtatttttagtagagatggggtttcaccatgttggccaggatggtctcgatctcctgacctcgtgatccgcccgcctcggcctcccaaagtgctgggattacaggcgcgagccaccgcgcccggccaggattttaaaaaaaatactgtattaggatttttataaggctgtagtaaatgctattgaaaaatgcttacctcttatttcagccttctcctctgtctgttcctcaaactggcttttggtttgagagaaggggaggagcgaccctggggttggaaaagcccaggagacaagatggagatccagtctgttcatctgtacatccctggacctggggcggtcctggggacagtccttttctcaagccagtcagtggacatttgggggagagtctaggcacggatatagaggacccaatattcctttttttttgagacagagtctcgctctgttgcccaggctggagtgcagtggcgcgatctcggctcactgcaagctccgcctccagggttcacgccattctcctgcctcagcctcccgagtagctgggactacaggcgcccgccaccacacccggctaatttttgtatttttagtagagacggggtttcactgtgttagccaggaggtctcgatgtcctgaccttgtgatccacccgcctcggcctcccaaagtgctgggattacaggcgtgagccaccgctctcggcccaagattccttaatctagttggttttccgaaagcgtggctatgaaggaagaactcaggagttctagccattcccattgtattttgtgtttttttcagtaggtatcccgacgcaaccctcagattaaaactttaagggaaaatgaagaccacacccctattccatagaaattaactctaatgacaacgtagtggcgtggcgggggtatagctcagtggtagagcatttgactgcagatcaagaggtccccggttcaaatccgggtgccccctctgtgctccggagttacctcgttttgttggtctccggaggtcctctaaagagttcccgcacagatggaatgggagggagtctcgagccctgccaccctttttgctttcgcaggcgagtgaggatggagtcctggcccctgccagtggctcagcctgtgtgtgtacccagggtagaatgcaatgcgagtgagggcgaggagctccgggctgacccttggaacacggtacgggtggctcaacctcgcaatggcagggcggaggcgagcgcacccccaggtcagcctggctctttcttggcgggaaggaggctgagtttctaagggctgggctggggaagacaggtcgggagaagccgcgtgagcatgtgggagggagaaagaagctccgagacgtggcaaggggtcttctgcagggcaggagagtgggacgcccccgaagtgaaatatttcgagagacttctccttccacaccccaggaatatattttcttatactgccagtggggatcttcagctcagagcttcagggaacaacccctgcttccaagtgagtaattcttctgggagttgtattttttccatctcttgtaaacgtcttaccccacttccacttcccttcgggaacgccacacagcgcctgcgcagcaataccactaagcgactacgtgcggtcggtttgccggcagagggggtatagctcagtggtagagcatttgactgcagatcaagaggtccccggttcaaatccgggtgccccctctttggccttttcgagatactgtttttgtcctgggtgtcgatttttcctaagctgtttgcttttactcctactggcagacgaggagcagtgagggactgaaaggaactggggattcaacagcagtggctctcaaaatgtggtcctgggaccagcagcattacctgggtacgctcgggcctcatcccagacctaatgaattagaaacttgagggtggagtccagaaatctgtgttttcatatacgctccccatcgcttgagtccaggagttggaagctgcagtgagctatgatcgcagcactgcactccagcctaggcaacgtgcgagaacctgtttcaaaaaacaaacaaaatacacacacacacacacacacacacacacacacacacacacacacacaccctgcaggtgattacgatctcaagttctagaggcttacgttaaaatttacacatttgcttctactatttacaagtttatgtttcagcctgagctcttcttgtaagacagaccacgaggtaccccagatggaggaatgtgcaaagacgccggggctggagctggaatccgtcccgagacttctcaccttgacctcgaggaaggcaggaggtcggagacagggggtgggcaggccggggaaagaggaaacccgcaggacaagagggttgtggctcgtcacgtggccacttgagggcagcaagtagctgcagctggaggtagctgcctatctgattctgtttgagagtccgccaagttgggatttaaattagacatcaagaagaatttacagaccggccttgccttgttccacggtaaggggacattgggtttagggctggaggaggtagtctctgggactctgggcccggcggaaggaggaaccggcgttctaagagattagagagcctttagttgtttcctttcttaggtgtttttttttcttttcttttcttttttttttttttaacctcagtgccacggaatccgtctcttccagcccacagtgtaccttctcctgtccccgcccatatccctcctcctggaaaatttctccaatggcgctcagcgttcgcacccttcctctccgcggttttctagtccctaggccccagcccactagaagccaggatgccccctcaccccgtctcccactctccagcgccccagctccttgccgtcacaagaacgaagtaggtcaggggagggaagaggcatcttcgtgtcctgacctgattccttgccgtctattaaatatcctacattgcgggtatttttattctgtcctggaagaaaaaataaaaagattatctatccccagagcctgtcagaaggtggtgacaggtggggtgagccatttcctcgtctggggctggctctgaagattgattgggtctggccctgagtaggcctggaggccccagagaggcaggaggcctgggttacctactcgtggggaggggtccagactgttgcagagtaaggggtagccaggccccctccaccctcacgtctgctaggcttggggggcaaatcggtgctggaaatggggggtggagggataaggtggagtcatggaaggggggtgggattcaggcccctcttggggagaaaagctgggggtctttgctgcagggggagatttctgggggtgggggctggaggacaaagcatcagagacgcacagaattccgaagaacagctcaggaagtcgcagagcttggaggagctgggggcgggggacagtcaggggcccgtgacccagggatggggcgcctgtcccttccaggggtccagtcctcgggccttctctctgcagctttcccggcggaacggaggagggaaagggagccaggagctcagtgaggagcgcggggcggctgatgcttctaggggttctctcagcccgaggggctcccgccctgtcccctactctgcaccccttgccttgggagcggctgcagagctctaggggagcgctccgttagggctgagggcaggcgccgggagagcccccaacgacgccgcgccccccgccccgccccctgccccagctcccccccacccccaccgacccagcggcccccccagctccccgcctgctcccggaggccgcagcctccagctccgctcgcgctctcgccgctcctgccggctcgcccggccccgcgctccgccgtctcctcgccgcccgcccctccgccagccccggggaccgcgcggccgcagcctgagccagggccccctccctcgtcaggaccggggcagcaagcaggccgggggcaggtccgggcacccaccatgcgaggcgagctctggctcctggtgctggtgctcagggaggctgcccgggcgctgagcccccagcccggagcaggtaggactggcgggagccggcccgggtgggccgggggcggggagggacgggcagtcaggtgtgggcatgggcaggtgtggacggcctggcgatgtccgcgaggggggcattgtccgcaggaggccaggagagctgtgggctgtgggcaggtggatagggaccccactttcccaaacacatagggtgtgtgagtgacggtggagacaccgatgcccggacctcttcttctctcctggaaggatactggagggaccttaggagaggcggctctatgtggccatgggctctgaaaggggacagcgggagagtcatcaggacccctgatcaccccaggcaaggctgaattctgatgagatgggagcctggggaggcccctgccccagccatgccttcttttcctcttctctgccacacccccgaccccaaagctgatccaggctagggataggtgggagcagccagggggatggtggggacacagcgtctctgcctgggaaggcagcagccattcggtcaccttcccttgcctatttggtgtcagtagagaggcagtgggcccaggaagaagcaacttgctgcttctgcacccccagcctcaagagtccccctcctcacacctgctcccatttgccctggcagcctttggctttcagctactctggctctagatggggcactggggtagggggtggagggaggcgtcccattctgcacactcctcttcccccctaccagttctccaaactcatctctcccacctggaagtcctttctgagatctacctggaatccctcatggtataattttcatagtctctgttctcccctaagcacctagactttctctggggttggggagatgggtaatttgcagcctggcccctcagcagagatgattaagaagatagatacctgtgcatcattggcatgggtgcccctcaggtggggtgagggaggcgctgttgaggtgagtgctgtggttgacctgctgtgtctcaggagtgtgctggcaccaggcacagtgtcagtggcaatgttcttgactttaatggtcccagcatgtagctgagacagacctgggtccctattgagaagaagagtatgttgggggtgggaggggaaggaggctgacagtgggaagtatgggcagagggcagtggagctgacgaaccgagaagctgctggtgagaaccaccaattttcagggagaccacacagagggtggccagagacgtggcttctagtcccgccatctcacttgctgtgtgactttaggcaagttactttctctctctggacctatttttgcatttataaagtgaggctgttggcaaaatctttgactcttgtgcgtggaataatgaaggatcttttataattgcctttccttttcatatttgttagggtctttatgggtaactgatactttaaaaaaatcaaggtaaacaggagagagttggatatgttatgaataatttctgggctcctttgaatcctcaacctggtgtgatcttctgaactctgggtgtaacagagtttatgaggggaggatctgaacctttggctggattgtgtgaaccacggagagggctggggaagggggaattgggaggtaacaaggatgggctgggagatagtggccagacccgggcctggctgagggcggccccttcagagtagggttggggtagtagacggttgaggagaccaggaagagtggggcaggcagagacttgaatcacttctctaagtagaggctatcctgtcttcttggctttgacagagattgagccaggagaaatgcactttttctgcagcaggagggatagaggttagacttaaggaatctgtaagaagccagaggcggcagctgttgactcccagtccggtgcccttttcacaggccaggtgggatttcacaggcaggaggacctatgaggaggaagcgggtgtctggggaggccagatgtaggagaaggacattctgggggagagttgctaaggaggggcagcctgacctgattgatggcggagttgttgtgaccagtggaagggcagctgggagcaggacctgaagagatgctagcatccttccccaaggctctgggtttgtggggctggtggggggccttgggaagtagctgagatctcccctcgctcctgatggacaggcttgtttggtagagccttgaaacctcatctatcattagaacagcagcagcagagagatgagtggcccaaagacagagtcagacagcaggggagaccaggatgacagacaggaaaatggccttggggtgcagagcaggggcccagggaactgacagtctggtcagatggaaccagaggtgcatatgacagataaagaagaggcagcgagagttggcatcctggcctgggagtcctgcaggaggccaggctcaataccaactactggtgaccctgacagcttcctcctttctctgaggaaggtttccccgtctataaaatgggggcttgcaccagtcacggtggctcatgcttgtgatcctaacactttgggaggctgaggtgggaggatagctttagaccaggagtttgagaccagcctgggcaaaatagtgagaccccatgtctataaatgatttaggccaggcagggtggctcatgcctgtaatcccagcactttgggaggccgaggccggcggatcacctgaggtcaggagtttgagaccagcctggctaacatggtgaaaccccgtctctactaaatatacaaaaattagtatatttagtattgttattaatattattaatattagtatattagtaaaaattagccaggcgtggtggtgcatgcctgtaatctcagttactcaggaagctgaggcaggagaatagcttgaacccgagaggcagaggttatagtgagctgagatcgcaccactgcactccagcctgggcaacagagtaagactctgtcaaaaaaaaaaattaaaattaaaataaaaaattagctgggcatggcggtgtgcgcctgtagtcccaggtactcggaaggctgaggcaggaggatcgtttgagcccaggaactggaggctgcagtgagctatgatcatgccacatagtgagggcagcataacgaggtcccatctttttttaaaaaaaggagggaaggaggttggaccagattgtctctagggctccaacaacctgagactaaaatgcgaacttatggaggtcaggcagcccctccctcatcccaccatcttctctagctctccccagattcaccccttaacccactccagctgccgtcccctccgatcgacagataactaactggcttcttctcattcaggtcttaatcagctcaaggggaccctcctcagagagccccacctcatggctctgtgtagagtagcaacaaccccaaccctttcctctgtctgattttcttcatagcccttaccaaatgattcattttgtatgtctccatgaagaaaactagactcttcctgggtacagggcttgtgtccccccagcacccagcacagtgcctgcgactcaataaaagtgtattgaatgaatgagtgagtgactgagtgagtatatcagaggtggcacagatcccagactctcccctcaagggacacacatagagagctgaactcttcttgctgtccctcccttcccctcccctccccttccctccctccctcttcccttctgctacctggtggtccctccctgcacttcctttgactccttccctctccccaggtgagggtcctcagtgggtccctacctgccagaggaaagggagagggtatggttaggggctttgtaacttggaggcaggatttcagtttagggtttggagccttccctggcccctctgaaagctggtcctgtgaccctaaccggtgtgttgcccaaggtgcagcaagttgacacaccaacaccgagggggcagcagagaaagagtttcatcatcgtggggcagcatttggggctagaggttttatggggtttggggtggggtggccaacgtgtgggaattgttaattggttgaagagtgcatgaagaaataaagaaactgcattctcatgttaaatcagttcctcggctgggcgcggtggcccgcgcctgtaatcccagcactttgggaggtcgaggtgggtggatcacaaggtcaggagttcgagaccagcctgcccaatatggtgaaaccctgtctctactaaaaacacaagaaaattagctgggcgtggtggtacatgcctgtaatcccagctactcgggaggctgaggcaggagaattgcttgaatccgggaggcagaggttgcagtgagccgagatcgtgccactacactccagcctgggtgacagagcgagactccgtctcaaaaaaaaaaaaaaaaaaaaaaaatcagttcctgtctgagggtcttcgaattggcccttctgctggaattcagg

SEQ ID NO: 597 - DNA, 531 bp, Homo sapiens
atgggacagctgatcgccaagttaatgagcatcttcgggaaccaggagcacacggtcatcatcgtgggactggacaatgaaggaaagaccaccattctctaccggttcttgaccagtgaggtggtccatatgtgtcccaccattggcagcaacgtggaggagatcattctgccgaagacccacttcttcctgtgggacatagtgagacctgaggctctgagctttatctggaacacatactactccaacactgagtttatcatccttgtgattgacagcacggaccgggatcggctgctgaccactcgggaggagctatataaaatgctggcccatgaggctctacaggatgcttcagtcctgatatttgccaataagcaggacgtgaaggactccatgaggatggtggagatctcccatttccttactctcagcaccatcaaagaccactcgtggcatatacaaggctgctgtgccctcaccagggaagggttagtggctgccctacctggatctctagggcctggctga

SEQ ID NO: 598 - protein, 176 aa, Homo sapiens [sequence omitted]

SEQ ID NO: 599 - DNA, 537 bp, Homo sapiens
atgggacagctgatcgccaagttaatgagcatcttcgggaaccaggagcacacggtcatcatcgtgggactggacaatgaaggaaagaccaccattctctaccggttcttgaccagtgaggtggtccatatgtgtcccaccattggcagcaacgtggaggagatcattctgccgaagacccacttcttcctgtgggacatagtgagacctgaggctctgagctttatctggaacacatactactccaacactgagtttatcatccttgtgattgacagcacggaccgggatcggctgctgaccactcgggaggagctatataaaatgctggcccatgaggctctacaggatgcttcagtcctgatatttgccaataagcaggacgtgaaggactccatgaggatggtggagatctcccatttccttactctcagcaccatcaaagaccactcgtggcatatacaaggctgctgtgccctcaccagggaagggctgcctgccagacttcagtggatggaatctcaggccgctgctaac

SEQ ID NO: 600 - protein, 179 aa, Homo sapiens [sequence omitted]

SEQ ID NO: 601 - DNA, 28540 bp, Mus musculus
atcctgagtggttaagagggccccgcctggccggaagagacagcacactgttcagccccagaggattacagaccctgactgccctgacagactgtagggtccagtgggtattccttacctggcctggctctcttggttctgaagactgagggaagctcagcctgcaagggaggaggccccaggtgaatatcctgggagcaggacaccccactaggactgaggcacgtgcatcccaagagggggacagcacttgcacccagactggtctttgtacagagtttattttgttctgtttttacttttgttttttgttttttttttaaagatgaaataaggatacagtgggagagtgggtgttatatgaaagtcggggggtgctgtcccctttctccatttgcaatgagatttgtaaaataactggaccccagcctatgtctgagagtggtcccgggccgggtcaaaccgtattgctcatctgacacacagctcctcctggagtgagtgtgtagagatcttccaaaagtttgagacaatttggctttgggcttgagggactggggagttaggattccttctgaaggccctttggcaacagggtcattctccgttggacacactcataccaaggctacccccagaatactccgttggacacactcattccaaggctacccccagaatgaagtcctgtcctcccagtgggagaggggagcttgtggagagcattgccatgtgacttgttttccttgccttagaaagaagtatccatccaggaaaaccccacccactaggtgttagtcccacccactaggtgttagcagggccagactgacctgtgtgccccccgcacaggctggacataaacacacgccagttgacacaagcatttgtaattactctttattgccaagagccgacactgcccaggattcagggaaaataagttatagcaaccgtggcatctgaaaggtattgccacgctggggagaggaccaaactgcagagggcacagatcccgggagagcgatggtgatgttcacagagaacatctcttttctgcctttggccacagaaatgtctagtccctccttgtgccctaagaggcaaagtgaagtcagggtcttagttacctagggccaagtgaggggctaaaggtagagggattcctagcgtaaccacaaggaaaggtttaaaccccagaaccaagcttccaagaatcatttcttagtcacaggatgacacagggaggccggctgttggtgatcttttctacaggttctccattgctggctcttcggatggcttccatgagctagcggacagagacatgggcgagtgtcatgcacaggagaggagggtgtgtctcgtctcagccaccctcccgaggtacattaaatactcacgtctttctcataaggaaaccctccattctccagcttggagaacaccagctgtccattgatctcaatctcgaaggcccctggtaggaaataaatgcaagaacgaactaagaacaacaggcagaagttcagggaggtccttggcaccacctcgagtccaagcaagactgttcatggcctcggcagacaccgatcctgaagccattcagccccaaaccccaaagtcctcacccgtgcgtctttccaatacgccattaagagttccttcactccaaacccacagtaggcatttttgctatgtgtcagaccctactaggggctttatatacaacagccaatgtcagctctagaatgtagggagagctggagttttatcacatggactgactcagcaggtgctctgcggacctcacctgtccccccgagtcgcgactcaatctcaatgcccggatactcctccttcacagcgctcgccagctccaggtaggtcgcctcaaagccgcagggtttactggggagaagagacgtggagtgagctggggttccgggggtggggcctcccgtggatccacccccatcttgcgggcgagcacaagaggctccttttcaacccgagtggcttaccagtactccaccacgatgtggactccactgcctgcttccacctccccgggagggggcactacggacaccggcgctggctccccactcattgctgcccgctccgctgcagggctgcttccgggtgtgacgccacgccaaagtcacgtggggggcgtgtccgtgggcgtgtccggacctcgctttgcgtcggggcgccctctgccgtcagcaggtactgctacatcttgatccagctgcagagcgaatatcctggaccagcactgatcctgggttctgagagctcattggcatccaatgctcacagtcatggatttgcttactaacgaactgcctgtgatcacaaagctattttccatttacaaaagacagagaaaatggggcaggcggccgaggtagctgatggtctgtgattggtgttgctatttacctctcgaacgatgatagcgtttgaaaccacaccatactgcttttctttcgagttcttttttttttaacttttaagaatattttaattacgtatatatgtgtataagtgtgaatttatgcatgcgagggcatctttaaaacttactacatttatttattaatttgtggacgagtgtgtattggaggtgggggccatgccatagcatgcttttgaaggtcagagtacagcaactttcggcctcctccatcttatcatgtgggtcccagggattgaactcagagtatcagattctgtctcaaaggtctgtctcttacaggtcaagcgtcttcatcagcccagaactctagttcttttgactctgaagtgctgacccccactttatgcacactcctcatccctgcctcttgctagagggctagtgtcattgaactcagtttgtaattctggaactgcagcctgggtcctccctgtctcttccttccctgaagcaccactacagtatcgtaacaagtcacccattctggtgtcccttgaaactgttcattgttgggtcggtctgtgtttgctgagttctgacgtcatcccatctagttataggatatttcaatggatctaagaaggcctttcctgtttgcttgcagcttccaactccagccccaagcaatcgctgctctgctctctaaacttttctggacatttcacataaatggactcttgcagcatgtgacgtttgctctgttgtatcagagcaagcctccatccagtgctgtgtcccaggcgttcctttctattgatgaatactatttcattctgttgtatagaaaaagcacagattatttgtctattaacattaatctgggtttctttgggttgtttgttttgagtaaatgtcttgtagatgcctttgtatggatgtgttgccatttctcttaagttccttagagtaaaattaaaactactgggctgcgagaaatttatatttaactctttatggattgcctacctgcttttgtttttgttttttgtttttgtttttttttttctaagcagctgtagcattttacaccaccaaaagggcacaaggagttgtttcttcatagccaccacaaatactggttgcctgtctctttgatgatattacttttttttttttagattaaatttatttatttattttatgtatatatgagtagactgcagctgtactgatagttgtgagccatcatgtggttgctgggaatttgaattcaggatctcttctcactccggtagaccctgctcactctggtcggcccgcttgctccagtctaaagatttatttattattatatctaagtacactgtagctgtcttcagacaccccagaagagggtgtcagatctcattatgggtggttgagtgccaccatgtggttgctaggatttgaactcaggaccttcagaagagcaatcagtgcttttaaccactgagccatctctccagccctgatgatagttattcttttaggtaatgcaataggccatcttttcaagtagtcacatttttgctgttggttttttttttttttttttttttttttttgagacagggtttctctatagccctggctgtcctggaactcactctgtagaccaagctggcctcgaactcagaaatctgcctgcctctccctcccatgtgctgggattaaaggcctgtgccacctttgcccattttatagcccagttaaattgggttactttctttttattattggcatctaagagttctctatatatcctacatacaatatctcaagtgaaataagtatttacaaagattttctcttgctatttgcagcacacacacactaaatgaatatacgcaattaaaatgtttttcttttaaaagtcctttgcaaggccgggcctggtggtgtacacctttaatcccagcacttgggaggcagagacaggcagatttctgagttcgaggccagcctggtctacagagtgagttccaggacagccagggctatacagagaaaccctgtcttgaaaaaccaaaaaacaaaacaaaacaaaaaaagtcctttgcaagccgacagaggagacacaagcccttaatccttagtccccacactggggaagcagaggcaggccgctctctgagttccaggccagcctgatctacagtcagtttcaggacaggtaggctacacagagaaaccctgtctggaaacactacaaacaaacacacaaacaaataaataatcttttgcctaacccaaggctacaaattttctcccattgttatttatttaactttttgatgtttcattgtgattttatctcttcagctctgatatttaggtttatgatctatttttcttgtttgtttagtcttttgtttgtttgtttgttttgtttttgaaacatcgtctttgtacatagcatggctgtcctggaacccattctgtagaccaggctggccttgaactcatacagatccttttgcttctgcctcttgagtgctggaactaacggcacgtgccatcaccacctggctatgatctatttttttagtggttattcttatttatgtgtatgtctatatctgtgcatgtgcatgcatatgcagatgcctgtggagtccagaagagggcattagagcccctggagttacaggcagtcgtgaacctttggatgtttagtgattgagaactgaacttggggtcctctgcaagagcagcaagtgctcttgaccactgagtcatctctccagctccttaagacctatttagaattatttttgtgcatcatgagaagcaaagagctaaattactcttttagtatgtgagtattaaattgtgacggtgccattagttaaaatatcttttatcgggtattgtggtacatgtctgtaacctctgctatttgggagacccagcaagaggattgactgaattcagggaccttctgggcaaaatagcaaagcactgtctcaaagattgtatctgttcattaaatgggctttgcaactttgtcaagatgctactaactcagatcatggtggcttacgccttcatttccagcactcaggacagaggcaggtctgcctggtctacaaagagagttccaggccagccagagttatgtggtgagatactgtcttaagttaaaaagaaaaagaaaggctgggcatggtggcacacgcctttagtcccagcacttgggaggctgaggcaggtgatttctgagttcgaggccagcctggtctacaaagtgagttccagaacagccagggctacacagagaaaccctgtctcggaaaaacaaacaaacaaacaaaacaacaacacaaaagaacaaacaaacaaaaagatactggtaaaagcataaaggtttacatttgggctgtcagtgctctcatggatctgtatacaaatagtaccttgaagttttgactttatagtagtgtatatttgaaaaagattcaatagaaactggaatttgatgcttggtagtttagatgtcaatgtacattttccaattaaagcattttaaaattaaaaacagtattcattctggatgtggaaacaccaataccatggtgctcttgtggaggtcagaggtcaactatggtagtctgttctctcctcactgtgtggttcctgaaaggagaacttaggccctcaggctcgcagcaagctgagccatctcccaggcttcttcacaccaaggtattttatgatggcacagattttataagcccagcagaggcaggaagatggccacaagtacgtgaacagcttcagttaaatagggagtctgagaccagctggggctacatatcaagacgccaagatgtcatgttggaaaggccaaagtgagccagagcaatggctcagtggttaagagcactggctgctctagcaaaggaaggacctgggttcagttcccagcatccatatagtggctcacaaacatgtctaactccagttccaggagttctgatgtcctcttccggaccccttgggcatcaggcaagaacatgctaaactcaaatacatgtgaataaatgtaaataaacgcaaacacatacacataaatacaaataaataaaccttaaaaacaaaaactaagcccaaagccatggaacaacaaaaatgaagctttacttcatttatttagttttgtttgtttgttttgagacaaggtttctttgtatagccttgactatcctggaacttgctctgtagatcaggctggccttgaactcacagaaatcttcctgccttagcctctggactgttggaattaaagccatgcaccatcaccacctgaccaaaaactaggttcgtcttcttaatcactttttttttagatttacttttatttatttacttttatttatttactttattgtctgagtgctcagctgcatgtacacctgcatgccagaagagggcatcagatccttttatagatggttgtgaaccaccatgtgggtgctgggaattgaacttgggacctctggaagagcaagcagccagtgctcttaacctctgagccatctctccagtccccaaaactaagttatccagatgtaatagcatcataaggcaaggagcatcagtgacctggttcctgctcttgtgccttttatcttgacagtttttggtagagatgctcttgctctggctggccttgaacttgtaactctcctcagcactgggattacacattcagcttgtggtgactttgatcctaaatttaattaacttatacatatttaaagttcacccttggtggacacgaaagctatggcattagaggcacctgctgccaaccttgatgctatgagttctcattcccagaatccaccatgcaacgttcccagaatccctcatggctcttttggcatgacccttatacatctatcctaaggttccagacagaatggttcccaagtccttacaaacccatgtcccctactgctagctccttttgtctcctccctgggacctcagatcagttctccacctgccctgttctcaaagccctacttctagatcagtgtttctcaacctgtgggtcttgacctttgagggctgggggtgggagtgggggtgggagtgggggtgaggatgggggtggaggttgaatgaccctgtcacaagggttgcctaagaccattggaaaatgtatatttacattatgactcacaacagtagcaaaataacagttatgaagtagccacaaaaatcattttatggttggggaacaccacaacatgaggaaccgtgttaagcgttgcggcattaggaaggttgagaaccactgttctggatggaatccctgggctggagagaaatggctcaggggctaagaatacttggtgctcttctggaggtccaaactgcctgtaactccagctgcaggagacctggcaagttcctctgcaggaacctacacacagaggcatgtgcacataaataaaaacagaagtctttgtaaaagaaatggagggctggagagatgtctcagtggctaagagcactaactgctttttttcagaggtcctgagttcaattcccagcaaccacatggtggctcacaaccatctgtaatgggatctgatgccctcttctgaggtgtctgaagacagctacagtgtactcacatattataaagatccttgaaaggaaggaaggaaggaaggaaggaagaaagaaagaaagaaagaaagaaagaaagaaagaaagaaagaaagaaagaaagaaagaaatggagccaggcatggtggcacatgactgtaataatcccaccactagagaggcaggaggcagaggcaggctgatctctgtgagttcgagagcatctttgtaggccagcctggtctacaaaacaagttccaggacagccagggctgttacagggaaaaaccctatcttgaaaaacaaaagacagacagacagacagacaggaagggagggagggaagggggagagagagagagagagagagagagagagagagagaatatcactcattcagctggagtctggctttcctccagctcagccttctacatagtgatcttttttcagagtgcagccctgcactcctggcagggtctggcttctgcccactcctcctgccagtctggacaaacaggatggatggctctcaaacctggtttgcaaaacagccacctgagggcttgtcaatatctcacattcctggggctctgcctcctcagtgctttgagactctggtagctgaggaggggcccacgggtctgctctttccagagcagcttaagagactgtgttccccccttttaagagctgcagtgttttccctccacccctcccgtacctgcaagacctgcccagactacctgatggcctccgttcctgtccacccccactctcttctgcattccctcccagcagctgcttctccacactgggggtccaccatggcaggttaacccctctggttcccactcactgccaggtcctccctggctttgttttcatggccttccctgcctcctgtgagtcactcacctggcaaacttgtcacctgtcatttcttatttgtgtgactcttaaaggtcagtctccccgactgggttgcagccagcaaagggcgggtctgtttttgttgttttgctctgtatacccagcgccaagcacaggtctgctaggttggaaatgaggaaattgtctcctgcaatttgttcaaattgcttcctggcccaagcaacctgccccttcctcacctttttgctttgctctattcatactagtctgtctgatgtctgtctgtctgtcgtcactctgtttttgaaacagggcttctctgtacagtcctcactgtccatgtagaccatgctggcctcgaactcacagagatccacctgcccctgcccctagagagctgggattaaaaggcacacacttccacggtggctttccacattagtttttcaagcggaaaagctaagggaggctgtgcttcctcagggcagaccccttatcgccccagtggcttgtttgttttcttaactcttagccataggaagctgggaggtggcccgctgcctttgatctggggactctcaacccctcttcctgatcctccaatgtttgctgtgagctgaaccagaaagctggagtaactgctgtaatagaagccatctgcatcaggccacaacggtcaccagaactgtggcccctcccactaggccaccttgccactcttaaacttgaaactaggaaggtgagaccctggacttgcctcggaagagagggtgcaccttgggtattttagcagggccaggacaacagcctgggcggctggactgtggttggaggtcaaagggcagagcacctcttctggcttcccttttaagcccagtgccctttgccctagggggtgagatccgagctgaagacggccccctagcttgaccaatgaactgaccatcattggaatgggacgagtaggagtgggcgggaccattcgcgtttaacaaacagcctccaaactccccttcccatgtagtcaggattctagatttttctctgtccagcctgttctctccggggcacctgctctctctctctctctccctctctcctagcacctgctgctcagtaggaagggcaagagcaattcgaggcggtgcattgtgaggagtctccacccctcctcctgcgcttccttctccagggagcctctcaggctccgcccttacctgcccgagataattttagtttccctgggcctggaatctggatacgcagggctcgctctatattctcccgcctcaacattccaaaggcgggatagcctttctaccatctgtagagaagagagaaaggattcgaaatcaaatctaagtgtctgggatctctagacagagccagactttgggccgggtgtccggctccttctgttggaggtgctccaggtaagccgaccgagatcggtcttagataatctgctcctacccccagcctcaccgagggccccaggttgtgcctgcatcgagcggatctggcctgctgcccagttagatggccgggaggctgccacgctctcccccctgaccgccctctctcggcgaggtcaggccagaggcggggggtgggggtgggggtgggggagaaggggggtgggtgatagttaaggcctggaatcttcctccctaaaccggtggcctcaggcaggtgagctatggtctgggtaaaggcggaagcgggaacttcatcttgggggatgggatgggatgggatgggatgcaagttaggtctgggtccctaaggaaagagtcacactcctgatgctctctgcgctgcattgtttgttttgtttgttgcttggcatcaccaatccttccccttcctcatcttgctccctgagacccgaggtaaggtctctccatcacctgaaatcttgactttccggctaaaactagttcttacccaacaccagttagtagggggtgctagatccggaggttgcccttcaataccttattgagctcagtttactacaatctggggttcccattcggaggggagtaagggagagcgactcccgcaatggttggaactgcatctctccacgttgtggtcccatctccgatacggaagctcagcaggctgcggatccctcctggctgcaaatgagtgtggacaaagaaagctagaggggtgggtgtagtgtgaaggtctgcagttcggggcctggaaaacagtgtatggccgggtatgtgggcctgcctgaggctgaagttgggggaaagacctagttaggtctgggttttcatggtaggatggagacagagtgcatctgagggacagctgatagtattttcaaccttttctccctcttttccccccaagaatgcaatgccttctgggtcatgagtctgtctagcttggactctgctctcccccaatagcgcgtgctaatgtgtgtgtgtgtgtgtgtgtgtgtgtgtgtgtttgtgttctccccgaaggcaaactaatgattaactctacagagaactctagcattcttcccaaattaaacattaaaagagttgtcccgcccgctttatttcattggatgttcccaccccccccccaaccccggcggaatgggtggagcatcaactttgggtcaactcagggtttcctacctccccacctgctcccggtacccggaaaggttaagcccccccccccccccacttccctccccaagtcctgatgggtgttagcttcctgtgctggtccagagccggatctcaggctgcccaggccagcagctcagtgtctgccccacgaacccttcgcctcatcttgggaagaggagatggtggccttgtttgcagttggccccaaacattaggccttgccactcgcccctggggctttctaggtggggcaagattcaggaagtaaacaaggcagcagggagggtaggagagagggtggggcaggagctgctggggctggagagccagagtttggagtggcctagctgagaggacaaattggttgggggaccagtttctccaacggaacctttgcttaggccctagtttgaatgttttccatcttttgggcaggccccacagcaggctcccctgcctcatctcaaattttagttactctaccgtcccctagagctgtccatcttaagggtgtggtggagggatctggaagctaaccctagtttagcctgcacctgagcttctaacatcagactgtaatctgacttcaatctacttcctcccgtttcaaacacctgtctaactgggtgttgttttctccatttgagggaggggcacccttgctgatgctcccacctctgcttgaaaaaggagattaggtgagtgggagtgggtgcccggtgttgatgttccttgcttggtgtcttgaggatgctaagtgtcagatgggtcttgcttgctcttcttggctgtcctggggggtgctttgctgcctgcctgcctgtcttcttgggtgttttaactccacttctgcctggtgatacccctcaggtcaggacaccccagagtgtgtttagagaccctctcccacagagcaatccctgggactagatatacaatcaccatcatatatcttgggatagttaacagcaaacagagttgtaggttccagacccaggccaggcagggctggatgctgcttgtctatcaccaggaggtgggctccaatcctgataggctcctggatccaggccgggcgtttcttctctccttcctgggctatgggcagggagatggttcaggactagaggtgggtagatgattattcccacctgagctggacactggccaagggtggggagggtgacctcagaggagcctcaggctgcccctcctcacatcttcatctctacccagcccgcaccccttactcccaggctacctgtaggttgggaagtcagggatggaaggcagaggcaggttgtttgtgctccttcttagccaggaagtcctgtggatgagtcaaggttgaatggagagcctggggcatagctgtcccgccccgccttgactcacctgtcccccagatcccttcatgccctcatggaagggtcaaccctggtggagggaaccctgggtgtcctgggtagcctcacagtcccggtgaggatgtctggagaataggcaggctgctgggattggcattttgtctgagccctgccaagctcagcaccaagggtttgctggttcctgcagagtaggggctggaactcccccatcccaagatctctttgcccggtctttcctgtcctcacttgtctctgtacccgtgggcgctaaggcataggtgacactctggtgtgtatgccaggtgctttcagaccagggaaaggctaagacaggtgcacagtaatgggggcagagttcccagctcagggctgagtgtggcaaggccaagaggatttctcttatctaggaggtgactttagcattgaggcttctgctaggccttctgctcccaccacaacttgagcacactgtcctgccctcctgattcttgcccttcttccccacccccctctctcggtatcactcatcacgcagccaggtgctaccacaacaggcttgacaaccgcatctggcaatgaggtaccgaacgacaaagcgcctggaaaatctgggacagagcccagtaaaataagcaacctttgccttggcccagtggctgtagctaaggggcgtgaggcacggagccagccccaaccttcccgagctgcttttgctggaggctgaacactggctttggagtcccaagcactggcctgacaaccactgggtacataaacgcatgcttccgtataaaggacgcacatcctgttctctgaggactcagaggcagccacagtttgaagggatcagcggcagcctgtgatgtcagcagcggcagcctgtgacgtcagcagctccgccctttctctataggtgccatggaactggatctgagcccgactcatctcagcagctccccagaagatgtgtgcccaactcctgctacccctcctgagactcctccgccccctgataaccctccgccaggggatgtgaagcggtcgcagcctttgcccatccccagcagcaggtaggatggggcaatgggaatgcattggtagggtggtcagcggacagggaggctagccagctctgactgacatacagggcttctatccttcactcgttgccataggaaacttcgagaagaggagtttcaggcaacctctctgccttccatccccaaccccttccctgagctctgcagcccaccttcacagaaacccattcttggtggttcctccggtgcaagggggttgcttcctcgagactccagccgcctctgtgtgagttgttttggaaaagggaaaggtggggacaggcctctttggtgcaggtgggggcaggtatcctggtccccgaggaatgacacccccaccttcccctaagtcactcggagttcttggggtacaggtggtgaaggtgtacagtgaggatggggcctgccggtctgtggaggtggcagcgggcgccacagctcgtcacgtgtgtgagatgctggtacagcgagctcacgccctgagcgacgagagctggggactagtggaatcccacccctacctggcactgggtgagttgaggtacaaggagctatgggggcatgtcttccatcttgggcgagtaggtagctcatctcggaggcttagctaatctctaccaaccaatctctaccaacccctgttttttttaccctcgaatccagagcggggtctggaggaccatgaatttgtggtggaagtgcaggaggcctggcctgtgggtggagacagccgcttcatctttcgtaaaaacttcgccaagtatgaactattcaagagccccccagtgagtgtacaaggagaacctgggggcgcatgcccgtgcgacccccccccaccccgccccggactctgcccccggaccccagcctggattcttgagctctgattcctcatttctttcttccccagcacaccctgttcccagaaaagatggtctcgagctgtctggatgcacaaacaggcatatcccatgaagacctcatccaggtgaggtcttcaccatatagccacagtccccctacaagtcatccagggtttcagccccacggccaccaggccatgtgaggtctgtgtttgttggtgtgaccttgcctgagaatttgtgactgtcattcccggtgcagcacctcctcccgaggcctgagaggaggctggcccttcataccccgcacacatctctcctcagaacttcctgaacgctggcagcttccctgagatccagggcttcctgcagctgcggggatcaggccgggggtcaggtcgaaagctttggaaacgtttcttctgctttctgcgtcgatctggcctctactactctaccaagggtacctccaaggtgagttggtggggagtcagctccagcctgtcacgtacgtcttcctcagtggtttgcccggacccttccactctcagactaggggaccctcagctctgcttccctccccttgggctggctgtctccagacttgcatgcaccttcctaccccatcccacttggcaaacctaccccaggagtggcagtagaaaagacaggcgactggaatcagcctctgcttgtgtgtgtttgtgtatatgttcccgtggggtgtgtctctgtgtgcctgtgtatgtctctgtgtgtgtccaaatgcatgtgtgtgcacctctgtatgtatgtgtctgtgtgtgtccctctatgtatgtctgtatctctatgttcctgtatctatgtgtgtgtctctctgtgtgtctgtatgtttgtgactctgtgcctgtgcctctgtgtgtgtgtgtatgtctctctgtgtgtgtacctgtgcctctgtgtgtggatatgtttgtgtatgtgtgtgtctatgtgtctctgtgtgtgtgtctgtatatgtctgtgtgtgtctatgtgtctctgtgtgtgtgtctgtatatgcatgaatgtctgcagtctgcctcaggtggatgtcctcgggaactgtctatcttgagttttaacacagggtccctactgggacctaggacctaggattaggcgaggctgcctggccagagagccctgagaaccctcttgttcctcacattgggactagaggtacagcattacatccggccctgtaggtgggtgctggggctctttaccagctgagccacctcctcagcctctattggctgtgtgccctgcctctccctgatcctaaaatctccctgcctggtaggacaccaatatggagataggctctacctgtactaagtcctgctttctcatgctgcccaggaccccagacacctacagtatgtggcagatgtgaatgagtccaatgtctatgtggtgacccagggccgcaagctgtatgggatgcccactgacttcggcttctgtgtcaaggtgagggctgcacctgacccgggctgggggacagtgacagctgcctaaggtccagtgtcctacttgtggtttttgagtgccatgttgaggaacccagcctcttctccatctacctgaacttttggatagtccttgggtccttccctgcccgatggcagctgagcacagaatcatataggggacagtccgcttcctctccccagcccaacaagcttcgaaacggccacaaggggctccacatcttctgcagtgaggatgagcagagtcggacctgctggctggctgccttccggctcttcaaggtgagacgcctggaatggctgtggggctggtctggcctgatggagtcgacatagctctgccttcagatgtcttcccatggaagagatcatcaccacccagctcagaacacccaccaggaaggccaggctcagccctgctgttaccccccatctcctaggctctcataacctcaagccctcttttcctccctgtctccagtacggggtacagctatataagaattatcagcaggcccagtctcgtcacctgcgcctatcctatttggggtctccacccttggtgagtgtactcttctggggtacgggaaagagaagtgggtatgcaggctcagggcagcgattctgacccttcccctcttcattctgtcctctcttcagaggagcgtctcagacaataccctagtggctatggacttctctggccatgcggggcgtgtcattgataacccccgggaagctctgagtgccgccatggaggaggcccaggcctggagggtaagggccttcacccatctgagcctctgctgcactggttcccagtgggctttcatggagtgggaggaggaagagggtgtggggaggcagtgggtaccaagggtaccctgacttccatgtctcccattgcagaagaagacaaaccaccgtctgagcctgcccaccacatgctctggctcgagcctcagcgcaggtgggtgatggtctagaatccctagggtgggctacgttgctactcggagtggtcttggctggggtgggggagttcccttccctgaatgatcaacatttcttttcctctgaccccagccattcatcgcacccagccctggtttcatggacgcatctctcgggaggagagccagcggctaattggacagcagggcctggtggatgggtaaggggctgggctgggctgggtaacagacctggggaccaacaaggaagcagctgcaaccaggagtccctgataatgctgctttgtctcccccaagtgtgttcctggtccgggagagccagaggaacccacagggctttgtcctgtccttgtgccatctgcagaaagtcaagcattatctcattttgccagtgagtaactaactcccttactcctaaggtgggttcttgtagcctgggaaccatgacttgaagccccacgatgcacctcctttctccctgtacaagaaacggggggccaattgctgtccccacccacgggctgctcctctgcccgggacccctccctgacctgccttctggccacaccacagagcgaagatgaaggttgcctttacttcagcatggatgagggccagacccgtttcacagacctgctgcagctggtagaattccaccagctgaaccgaggcatcctgccctgcctgctgcgccactgctgtgcccgtgtggccctctgaggccgcacaagctactgcagccatgggtttgcctaccacctttctgttctgtggactcggtgcaggtgggtggggtggtaaacagtggaagagctcctccccccaattttatcccattttttaaaaacctctctcaaccagtgaaacatcccctaaacctgtccatccctgactcctgtccccaagggaggcattgtggtcctgtccccttggtagagctcctgaggtactgttccagtgaggggcattatgagaggagcggggcagcccaggaggtctcataccccacccgtaatctgtacagactgagaggccagttgatctgctctgttttataccagtagcaataaagattattttttgatacatctgtgagtcctgtctggcaagaacatgtcagagaaccagcagaggtgaaggtcttggtcaactagaatataccctgaggacaaaaatggtgtcagctgccagagagcgtccaaatcctagcaggtatcctggcgcagcctggagtgtcagtcaatactggttaaatggatgaatggacactgaataacaaggaatggtgcttttctttcattttttttttaaacttaaaattatgtctgtgtgtatataagtatgtgtgtgagtgcacgcaaatgttcaaggaggccagaagggggcgctggatccctccaagctgtagttagagtcagctgtgtgctgatatggatgttggtaaccaaactcaggtcttccacaagagtagtacatgcctttaaccactgggccatctcttcagtccccctcctccaagggactgggcttttctgacagcctagatctgggacctgtgatgcatgcctagaatctcagcactccggcagcagctacaggaagaagagttcagggccagcctgggctgtatgagaccctgtctcaccacctcccttctctccacaaaccaaagcaagacgagtcagcagttggtggacaatgagtcctgactgacagacggatgccacaggggagagtggtctcacttccctcacgcccctgttttctaccaacctcttcgccctctctgcagtccccagatctgctctctgtccctatagtctccctcactcagaaagcctggaagggaagggacacgcagccccgagtctgtcttctctctccagcccgtccttcaacttccagagtgagttctgtactgtgcaagtgtgcccactgctcagccaggctgtgttttcccagagtttcatcccttcactgaacgggagccttaaaagaacgcacgtccaacgacacctgcacctcctcctccagttggagaacagtttttagaatgtgaatcctaagtagattgtattttgaaaaaaaaaaaaaatcaaacaactttgattccatcaaactcatttcccagaaatacaagaacacatgagttgacatgagacagttatcaaaatctggaccaggaaacaggatagctcaatttctacttcagtgacagaaatgacaagaaatttagacatgacagcgaaatgacacaaactcgctgtaaaaatatattcacgagtaactgggggaccaagatgagtcatcctttaagcctgtctgaggagttaatctgtcccccccaagaaaacccagcacctgaagtcccaggcaggggagctcaccccttctatgtcaactagcaggtcagaatccctgagatcgacaggccttccactttacacataggaaactgagcctcagaaagagtgacccacctggggtcacagagaaagttagaaacggccagtccagcctgcagaccgtagataccatcttttccagccctgggggaggatgggggggggtgctaagagctatgagggatggcatctaccacctggtgggaggagagaccctagttctgcaagttgtcctctgacttcctctgctacacatgtatcatggcctgtgaccttccatataaataaataaataaataaataaataaataaataaataaataaatagttttgagggctttcagagtggctcagcggcagggtatcagtggttggaaatgggccttgtgattggagttgaggaaaagctgtgtgggagtgagacgtgctgtgggcacaccacgcacacgtgattatggaaggcttgtgcatcctttaacctgccagtttctaaggcctggcacacggtagaaccccttccttctgggtacctgcctactttccccgtcggattccagcatattttaacctccgccaaccctggtctaccctgctctctcacaatcatcagtttctatacggatttcacagttttgggttccctcctcccaagctgtagagccgcccagtcccacgcgtctaagggatgaacttggtattcttcctgcaacccctcaccactggacgacggggtggtgaagggacctggagtgggtttagtgaataaagagaggctccaggctggtgagaccgggttggagttggagagcgcatgcacgccgggagtcccacccacacagatgtgtgcaaggtgatccggtgtccatggctgccctcctgcggccaactcgcctgcacgacaacacaattgctgacaacctgacgtttttttttgaacgaggacccaaatactcgccgtcggtccctggacccttcctagggtctgcagcgacatcacatcttgaatccttccccgcgcagcgccgtgccggcaggtgcgcgcagcagcctcgggttggcgccccgcgagcccccccccgccccccccccgggatcccgagcgagtccagccacgcggctgcagtgtcacccagcggccattcctggaactacaggcgacacctcccgaggttcccctgcccctcccccgtttcaaagccgcgctcaggggcgcggggagctcctacctcgctgcagtgcccggaagggcggggcgcggcgcggcgcagcgatggcgctgggctgtgaccctggcggtttcacttctggatcccgctttgctgggagaggaggacttgggtggggagggcaagggcggtacctgcgggcaggcggggtctggcgctcgggacccctggggtgtcacgcgacccacgccttcctgcacttaccttccacccgccccgccccctcctcccccaggctccattccgcggtccccagatctgttgcgtgtccgcagcggccaccgccccgtcgaggctgcagacccccaagaggcgctgggcggcgtgggcggcagaaggggagagctgtgaagccgcaggctccgggttaatctgcaggctgctgggacgcctggctgtttctcagaaatatagctgccccttccctcaccctcttggctcccaccttgcacctcaccctttcacctctccggagcccttcctgggttgtctctcctaggttccctgaccccaggaatcggtatccaccctgagaaaggggtgtagggcaccccaacccccacatccagagcttcccacagatgaagagtcaggaggagcctggtacctctctgtccttacagacaattgagaaagtgacctcttgcgagaatgttaggctacactcttcacctcccgtggccaccctctagaagccccgaggtgtagagaaaggaacgggaacaggattctctctccccggggtttgtttttgttgttagaggacaggtctctagagtctactagagcaatggggttgacgttgagcttagagtcccagcccaaagaaatcggaaagattcacgactccagggaaaattaaagtccagaaagtgaaacactcgaggtcacacagcaagtcgtgaggctaagactgagaccggaatatgagtaccagcacccaagctgtccagagctttgctgaggtcctctctccctaaaacacacacaggaaaggctgagaatgtcattccagtgggggtgggatggggcttgagctggtggtgggacaaagttgggggaggaggtagcacgtgcccccctggttcccatccagagctgtggtttatttgactgggctgctcttctgggccagggggcagaggggtggtggtggggttgatgggaaaaagattctggggcttcctgccccctcactactgggtagggggcggcggtggcggtggtggcaggttacatcactcacaggcactctaacctccgttctttccatcggagacctttttccttgtgcttgttacatatggggggaaagctctgctatttgggggcagggaggcagctgcagacttcacaggtcaagacaagagttaaaaacaaaaccgcaacaaactcaacacccgtgtccttcagggactttccatgacaccttccttccccctttcccccaagccaaggagcacctccctagagggcctccccagcccaggtgcagtggcttttggcttttatgcaaacaaccgtctgcccggggatgctccaggggcagaacttagggcctgggtgaaccatcccactttaccacttacctcgggccaatcctggcagtctggactctaatgccctgggggtttaaggatgggttggagggagaggaacttggtccttggcctccctgccctcaggtggcagttgcttgcaggtggaggtttgggtccttcaaacttgcaggtggcctgggttgtgcagtgatgttgggggtggggaagtctgcaggtgtcgggtggcttctcttgctgggctcatcacccctttaaggcaacactggtccctggagctagggaaacttaggctggaaagaataccccctcccccatctcctcggaaaaagagttcaaggcctccttgtcttccctttctctcccgcagctgattctgcttgggagggagtgggcttggggaagtccacatatatgtctggcttttgactaagggaaagctacttttaaatgctttactctaacatacaaggctaggctgctctccatcctcttctgcgctgaaggagttgctgctctaagtcctcaagcatgtcagcggtagagctgtttgaccccaccactgatctgcttaggactgaacttactaaatccaaattgcagaagccccgaggcagacatgtgtgtccaaccttttgacatcatgatatgatggtatcatctgcaaagtccccatccgagaactgcacgagcaaatgcatcgaaaccttcatgtttaagttgatggcttgtgtgttggatcgcgttcagggttatccttggctatacgtgatccaggaggggcctaggttctacatgcctttgggtgagtctatatgaactgggcaggaggctagagcagtcgtacccctccaactgtcttgagtaaacactggataataaggcagggatgtatcattcttttttgggagtctcccatgccacacttcaactgaagtttgggtccccgagtatctacagactgtatgtaacttggctgagtttaatgagtgcaaccttgagtttctcactgtttctgagagcctcagttgagaacttccttgacttccctgcctatctcaaaggctctctgttggaggggagggtggtgaagcaatgtagatcagggagatgttctgggggtgttgttcctggtatgtccctgtccactggaatccctagtgaatttcaaagagttgtgtagatccagaaccctgctatggcctcagagaccagtggtgcaccatagcaggctcagcagtgtgcctggggtgagacttctgtggtaattccactgattttgagacttagactttaagaaaaacctaagacaaaatgatggaaatattcctctgggcagaatgtcctgtggacattctgacaggagccatgacaaatgacagacatacaccaggactaattttaaacacatcaggattatatttatttatcactgttaaaaaaaaattaaacacagtaaagaaaacttgacaatactagcaagctgctttatacaggagatgcagtccttacattctggcgaggttagcaagggcttcactcaaagtggactttggagagacggtatggggtggggagtacaggcctgaatcctgatggagggattcaggtaaatctctagagggaggagggaagagagacaccagtgcaagggatgtttctgagaaacacaggcagggggaggctgatagcacaggccttgtggtaacttctaggtgagggtcccctgagctccaagcctccttttgttcttctctcgtcaactctgcaggtgagggtcattcacagaccacacatgtggtgactttgacaaccagaaattaaaaataagctatggttttttccagtagccaaaatgatccttcctccccgcctcccccccccccccccccaccgggggctcactgagcatataaaaaccacagtctgggtgaaggtatgtctgcttttcaaatgacctgctaattcttcacaacccacagtaatttggtttccgtgaatccacagaggcaggccaagcaggaagggctttgccagtgagcctggaaaggtctcatatcgatgagtcactggctgccacaccggtcaattttaaaggctgctccacttccctaacatgttaaaaatgtgtgtctctttttgggaggtaaagaaatagggctgtgcttgagaaaggtagggaacccagtggggctactactctctgggctctcaggaatgggctccctagagtgaaagagggcggggaccctctggaaagactgtgagggctaatggctgtagtctcacagacatggagggagcaaagctattctactgtcctggtgaaaggccatgaaaggctgtatgtggctcacttacagcggctccagattcttaagctctatgccacacaacactaagaaactgctagttaggcatcggtggcctccgtttgccatggcactggccccagtgtgatcctgaacattttcatgtccttcgaaccagatgcaggaagctacagtagaaaccttacgcttgcacagtgttaacctcccttcccccaaagcaactttacagacaagactgcagccaactccacaaaactctggaaggtggatattattaggaccttcattttaaaatcaaagcgtgaatgttccagttttggataacaaccgagtggtatcagtggatcagatggtctgccattggagggtttaggggaacggtgtatccgacttcttcctaaaaacacctatttagcatggtgatggcttggtgggtgatggaggtcacagctttggtaaggcaagagacagagacttccattacgctctgagctcactctgggtcaaagcccacacctgccctctaggctcttccaagtcccttgtccttagaaactgtggtccccaactctatccttattgcccatccccacggctgctcggtcctgtcttcttagagaacaaccccagggtgacccagattcaggtgttggtttcagatgaagagtgtagatccccaatcgtgacgcccggaatcactgtctgttgaagtatcctaaacaaccctttgcatgagatagcattgctgtcctctgaaatgtgacaatatatatcctcttccaccactctttcttcttccttcctgactgcagaagtctaaattcaaggcttctgcatcctcaaagatgcccaagctcgttcccaagtctgtcctgtcacagagatttccaagccttactagagaccagcatgcctttcagtggcgtgcaccttacagggaggacaatggaccttatagggaggaccatagactagttttgttcccatagtcttcctgcctgctctggggtatgtttcaaaactacaatttgtctgttgctatctatctatctatctatctatctatctatctatctatctatctatctatctatctatcagctctcatctgtctatctctttctcttccagccaggcttggaaaccagggcctctctcgtgctagtgctaggcggacattcttgtgctgagctgcaccctagcctggaagtaagactttccctctcaaagtgttacaatcttcacattcagtaaggggacaaagaagctgagggggatggtaatgtagaccttctcagaaaacttttatgtcaatgtgacatttgctagttatatatttcaattaagattttatgttttaaaatatttctctttgcagaagacacctggggccattttcttcagtggtggtggtagtggtagtggtggtggtggttgtggtggtggtggtggtggtggtggtggtggtgtgtgtgctatgtgtgtatgtgtgtgtgtggtggtggtagtggtgtgtgtgtgtgtttgtgtggtgtttatctggtgtagtgtgtgtgtgtgctatgtgtgtgtgtatgtgtagtgtgtatctgtgtgtgttatatgtgtgtggtgtgatgtgtgcatatatgtgtgtctgtgtgtgtgtgtggtatggtatgtgtgtgtagtgtgtatgtgtgtgtgtgtgtgtgtgtatgtgtgtggctgtgtggtgggtgtgtggtgtggtgtgtgtttgtagtatgtatatgtgtgtgtgtgtctgtgtgtgtatatagtgtgtatatgtgtgtgtgtgaatatggatggattaaactgcgtggtaagcacatagaaggtggaaaaatctgtggtgggtggattcagaaatgaagtcaggaagggccgagaacgggcggcagagagaagactagctggcttgtcgcaagggtaatgactcgaggcttatgaagatcaggggcctttcccctcttctctggtaatagtgggcggccatggaaggccacttctactcagctttgtgccgcacttcagctcatggcgaggaacacttggagagccatttctactctttgcccaccctcacaccccaactctgtcaccttggctgcaatggaacttcttgtgggtttggttggtccccaaatcgcagccccccccaccctgcggtgtgtggtggaagtctgcttataagagggctggtgagaaaggaaggcaagatccacagggttcatggcagaggcgtctgtataaggaagctgaagccaccccagaactacacagccccacggaggatgcagatcttccctttctcatctcagcccccacctccatcaggggggcccttaggtagtgctcggatcacgtgcacaggcggtgctaaccacgacaccccactggcctcaactgccagactcaaggtcttcaagctccacaggccctcggagttgagggctccttcctacccaggctacagaagcttctgtgtaggtcaaggctctgtgtgcacatcactcaaagaaggagcctcaggagtggggtgcaaaccatcaggtccacagtcacaggacagagtctgatctggagaggtgtctgggctggtagaatggtagtccgccatcttaagatgacaaagtgtgtgtgtccgcgcgcgcacacacacacacacgcatgcacgcacatgcatgtacacatgcccatgtgtgtctgcccccctgcagctgatttcaacagcactatggtggaaacgcccccccccccatttctgcatctcttctttctagtccctgcttcccaacgccctctctttgtatctcaccctctccccgccaagacaacaggatgtgagatatctcaagcctagactaggcaggtcctctttcacagtgggcatgaacaatgtggtgcagctcacatccgattctgctgagatgcagagatgtgctgaagacacctagcccttaagctgacacgggattgttgccacagaattgttgccacggaatctcataacccaccccccttaccctgagacagacaccatgctacaaggcaggctaagctatttgtgtgtttgaggaggaatgttttaattactggcatcgtatacatgaatgagtaagagccgaatccataagccccttagaaggaaaatgctaacataccgggaatttgggattcctggctctggcagaaatgttcataaaagctaagctcttaatttgtaaataggctccatgaagccgtccctgtaagcagaacttatttttccctaacacaagttcttttaaaaggaaaggaagaaaagggctccggcaagaagctgtagatgccagctcgtgtgtacacggctgctgcagatgccagctcgtgtatacacgactgcatgatcaaaacccttcctgtccttagtcccccctcatcgcctccttcatggtcatgactcagtagctgaaggaaaaacttaacacaactatattttcacatcaaagacatatgaaacacattctcacacgcagacttgtctgcttaatgcccacacatcaagaagttaaaaaaacaa

SEQ ID NO: 602 - DNA, 2397 bp, Mus musculus
catgtagtcaggattctagatttttctctgtccagcctgttctctccggggcacctgctctctctctctctctccctctctcctagcacctgctgctcagtaggaagggcaagagcaattcgaggcggtgcattgtgaggagtctccacccctcctcctgcgcttccttctccagggagcctctcaggctccgcccttacctgcccgagataattttagtttccctgggcctggaatctggatacgcagggctcgctctatattctcccgcctcaacattccaaaggcgggatagcctttctaccatctgtagagaagagagaaaggattcgaaatcaaatctaagtgtctgggatctctagacagagccagactttgggccgggtgtccggctccttctgttggaggtgctccaggtgccatggaactggatctgagcccgactcatctcagcagctccccagaagatgtgtgcccaactcctgctacccctcctgagactcctccgccccctgataaccctccgccaggggatgtgaagcggtcgcagcctttgcccatccccagcagcaggaaacttcgagaagaggagtttcaggcaacctctctgccttccatccccaaccccttccctgagctctgcagcccaccttcacagaaacccattcttggtggttcctccggtgcaagggggttgcttcctcgagactccagccgcctctgtgtggtgaaggtgtacagtgaggatggggcctgccggtctgtggaggtggcagcgggcgccacagctcgtcacgtgtgtgagatgctggtacagcgagctcacgccctgagcgacgagagctggggactagtggaatcccacccctacctggcactggagcggggtctggaggaccatgaatttgtggtggaagtgcaggaggcctggcctgtgggtggagacagccgcttcatctttcgtaaaaacttcgccaagtatgaactattcaagagccccccacacaccctgttcccagaaaagatggtctcgagctgtctggatgcacaaacaggcatatcccatgaagacctcatccagaacttcctgaacgctggcagcttccctgagatccagggcttcctgcagctgcggggatcaggccgggggtcaggtcgaaagctttggaaacgtttcttctgctttctgcgtcgatctggcctctactactctaccaagggtacctccaaggaccccagacacctacagtatgtggcagatgtgaatgagtccaatgtctatgtggtgacccagggccgcaagctgtatgggatgcccactgacttcggcttctgtgtcaagcccaacaagcttcgaaacggccacaaggggctccacatcttctgcagtgaggatgagcagagtcggacctgctggctggctgccttccggctcttcaagtacggggtacagctatataagaattatcagcaggcccagtctcgtcacctgcgcctatcctatttggggtctccacccttgaggagcgtctcagacaataccctagtggctatggacttctctggccatgcggggcgtgtcattgataacccccgggaagctctgagtgccgccatggaggaggcccaggcctggaggaagaagacaaaccaccgtctgagcctgcccaccacatgctctggctcgagcctcagcgcagccattcatcgcacccagccctggtttcatggacgcatctctcgggaggagagccagcggctaattggacagcagggcctggtggatggtgtgttcctggtccgggagagccagaggaacccacagggctttgtcctgtccttgtgccatctgcagaaagtcaagcattatctcattttgccaagcgaagatgaaggttgcctttacttcagcatggatgagggccagacccgtttcacagacctgctgcagctggtagaattccaccagctgaaccgaggcatcctgccctgcctgctgcgccactgctgtgcccgtgtggccctctgaggccgcacaagctactgcagccatgggtttgcctaccacctttctgttctgtggactcggtgcaggtgggtggggtggtaaacagtggaagagctcctccccccaattttatcccattttttaaaaacctctctcaaccagtgaaacatcccctaaacctgtccatccctgactcctgtccccaagggaggcattgtggtcctgtccccttggtagagctcctgaggtactgttccagtgaggggcattatgagaggagcggggcagcccaggaggtctcataccccacccgtaatctgtacagactgagaggccagttgatctgctctgttttataccagtagcaataaagattattttttgataca

SEQ ID NO: 603 - protein, 529 aa, Mus musculus
MELDLSPTHLSSSPEDVCPTPATPPETPPPPDNPPPGDVKRSQPLPIPSSRKLREEEFQATSLPSIPNPFPELCSPPSQKPILGGSSGRLLPRDSSRLCVVKVYSEDGACRSVEVAAGATARHVCEMLVQRAHALSDESWGLVESHPYLALERGLEDHEFVVEVQEAWPVGGDSRFIFRKNFAKYELFKSPPHTLFPEKMVSSCLDAQTGISHEDLIQNFLNAGSFPEIQGFLQLRGSGRGSGRKLWKRFFCFLRRSGYSTKGTSKDPRHLQYVADVNESNVYVVTQGRKLYGMPTDFGFCVKPNKLRNGHKGLHIFCSEDEQSRTCWLAAFRLFKYGVQLYKNYQQAQSRHLRLSYLGSPPLRSVSDNTLVAMDFSGHAGRVIDNPREALSAAMEEAQAWRKKTNHRLSLPTTCSGSSLSAAIHRTQPWFHGRISREESQRLIGQQGLVDGVFLVRESQRNPQGFVLSLCHLQKVKHYLILPSEDEGCLYFSMDEGQTRFTDLLQLVEFHQLNRGILPCLLRHCCARV

SEQ ID NO: 604 - DNA, 30081 bp, Homo sapiens
  misc_feature (1)...(30081): n = A, C, G or T/U
ctggtatggagtccagtctaagcagagagactgatgggcaggggaggtgggaccttcagcccagggtccactgtgggggcagagggagtggcagagacaccggggttccttcccctaatgggtcaccttctcttgacctttcagaatatgtgaaccagccagatgttcggccccagcccccttcgccccgagagggccctctgcctgctgcccgacctgctggtgccactctggaaaggcccaagactctctccccagggaagaatggggtcgtcaaagacgtttttgcctttgggggtgccgtggagaaccccgagtacttgacaccccagggaggagctgcccctcagccccaccctcctcctgccttcagcccagccttcgacaacctctattactgggaccaggacccaccagagcggggggctccacccagcaccttcaaagggacacctacggcagagaacccagagtacctgggtctggacgtgccagtgtgaaccagaaggccaagtccgcagaagccctgatgtgtcctcagggagcagggaaggcctgacttctgctggcatcaagaggtgggagggccctccgaccacttccaggggaacctgccatgccaggaacctgtcctaaggaaccttccttcctgcttgagttcccagatggctggaaggggtccagcctcgttggaagaggaacagcactggggagtctttgtggattctgaggccctgcccaatgagactctagggtccagtggatgccacagcccagcttggccctttccttccagatcctgggtactgaaagccttagggaagctggcctgagaggggaagcggccctaagggagtgtctaagaacaaaagcgacccattcagagactgtccctgaaacctagtactgccccccatgaggaaggaacagcaatggtgtcagtatccaggctttgtacagagtgcttttctgtttagtttttactttttttgttttgtttttttaaagatgaaataaagacccagggggagaatgggtgttgtatggggaggcaagtgtggggggtccttctccacacccactttgtccatttgcaaatatattttggaaaacagctaggcaccggcctatgtctgggggtggctctgtgccatcccttcctgctcaccttacactcaattcctcttttcctggagggagtggctgggaatcttcagaaagcttggatgaggagccagacatccagttctccagcttcagggttgggggagatcgggaagctggattcagatctgagagccctttgacgaccagatcattcttatttagaacgaactaattcctaaggccactcaccagaatggggttatttcctccttgtgagtgaggagagtggtgggtagggtgggggaaagacgaggcagggtctactgtgggactcattttccttgccttggctatgccagaggagctcactgacctaaggagtagctgtccagaaagcccacccagccagcacagccaccctggcggtacaaaggctgggctgaccggacttctgtgccccccacattcccagactggacgtataaaaacacacactagttagcattagtgtttgtagcgccactttactgccaatagctgacattgccctgggttaggggagaataaataaaatctgtggcatcagacaggtattaccgaggcgaagagtggactgggctttcgtgggcacttaccctgggaagggggtatgaggtggctggagaagtgttcatggagagtgtctctctcctgcccccaaggccacggaatcttctattccttctttgtacccaaagggcaaagtggaggccagggtctctttgctaaggagctaagtaggggaaagaggcagggggagctcccagcaggaccaaagggagaccaaggtttggaccccagaacagagcaggaacccagagtcctgtgcagtcacaggatgacgcagggaggacggctgttggtgatcttttctagggtttctccattactggctcttcggatggcctcaatgagctagaggagtggaatgacaggatgatgcactgttggggtagggtgaccaagaggtcctcccaacgctgtaaatactcacatctttctcatagggaaagcccccattctccagcttggagaacaccagctgtccatttatctctatctcaaaggcacctggtaagaaatcaacagataaatggtacactgagaacataggcagaagtcaggagttcctccaaaggggtcccccgccttcaagtcccccatcaatcccactggagacccatttgtagctccttaagcaattccccaaccctgggtcaactccagggaacctgagggaggcctcgcctgtgtgcccctcgcaacactcaataaaggactccctcccctccaaccctacacgattgcagtctaataggtttttccccacaggcctctgtgacaccccctgacctatggaagggaactcatgttggccggacattttaccatgtgccaggcactgcgggcactttacataaagcagccaatgtcagaactagaaagcgggagagctgggattcagagcacagactgacccagcaggtgttctgcgagcctcacctgtgcccccgaggcgcgactcgatctcgatgcccggatactgctccttcacagcactggccagctccaggtaggtcgcctcgaagccgcagggttcactggggagtcaagagatggggctgggctggggattcgggggtggggcctcccgtggacccacctccgtccggcccgcgggaccagggtgcgggtcctccagccggggccgctcaccagtactccaccacgatgcggaccccactgcccggctcgacctcctcgggagggggcgctacggacgtctgccccggctccccgctcatcgcggccggctccgctcgggcccctgcttccgggtgtgacgcgaaccgcgggcacgtgacggggcggggcctctggagcggggaggggccgagggtggcgttcgggcgccccctgcgggtctccgccactgctacgttttgacctcgtagggcagctccggagctcgctccccgggcaggggctgggtccggtccagaccctccttccctggcccggtctcccggagtgccgggcttccccactccccactcccggtgtccgctggacttcatggcttcatttactctaatggactatcttagactgcaaagcgcttttcagtttacaaaagaaagagaaagtggtggggcaagcatcctggggatgggggtgggtgtggctgatgcatgaaatagttgacattttctcgctaacatgccgatggcattttttttttttttttttttgagacggagtttcgctcttgttgcccaggctggagtgcaatggcgcgatctcggttcactgcaacctctgcctcccgggttcaagcgattcttctgcctcagcttcccgagtagctgggactacaggcgcgtgccaccgcacccggttaattttgtattcttagtagagacagggtttcatcatgttggtcaggctggtctcgaactcttgacctcaggtgatccaccagcctcggcctcctaaagtgctggaattacagacatgagccaccgcgcctggcccagttttttgtttgtttgtttgtttgttttagtagagacagggtttcaccatgttcgccagactggtctcgaactcctgacctcaaatgatctgcctgccttggcctcccaaagtgctgggattacaggcgtgagccaccacgcccggtgctgatggcatttggaaccaccctgtagttacatacacaagtgtttctgatcccaaagctctaaactgctttttccagtcttttgcagctgcttcttgcctgcactggaaaacagtagatgctcttcaggctctgtgcccccaacagtttctgcgcatcccttctcatccagcctctcactggggggctggcgtcattattcccattttgcagctctggaaatggagtctgcacaagtcctcgctgccttttccctgcctacagtaccactatggtatcctaacacgccacccactctagtgtccctttaggctatttatttatttatttatttattttgagatggagtctcactctgtcacccaagcttgagtgcagtggcgcgatcttggctcactgcaacctccacctcctgggttcaggcgattctcctgcctcagtctccctagtagctgagatcataggtgccagccaccacgcccagctaacttttgtattactattattattatttttttgagacagagtcttgctctgttggccaggctggagtgcaatggtgcgatctcggcttactgcaacctctgccttccggcctcaagtgagtctcctgtctcagcctcctgagcagctgggattacaggtgcccaccaccaagccagctaatttttctatttttagtacagatggggtttcaccatgttggccaggctggtctcgaactcctgaagttgtgatctgnnnnnnnnnnnnnnnnnnnnnnnnnnnnnnnnnnnnnnnnnnnnnnnnnnnnnnnnnnnnnnnnnnnnnnnnnnnnnnnnnnnnnnnnnnnnnnnnnnnnnnnncacctgtaatcccacgttttgggaggccaagtgggcggatcacttgacgccaggagttcaagaccagcctggccaactcgacaaaaccctgtctctactaaaaatacaaaaattagctgggtgtggtggcgcaccagctactccagaggctgaggcaggagaatcgcttgaacctgggaggtggaggttgcagtgagctgagatctcaccactgcactccagcctgggtgacagagtgagactgtgttccaaaaaaaaaagaaaagaaaagaaaagaaagaaaatgcagtgatttgtactgttgcctaaccatcactacaatccagttacagaatgtttccgtcaacctgataagtccttcccacctgtttctggtcaatccagctcccaattccagtcctgtgcaaccactgatctgctttctgtctctaactttgccttttctggatgtttcatataaacagaataatacactatgtggccttttgcttctggttctttcattcaatatgttttttgaaatgcgttcatcctgtagcgtctagagtagtttgttccttttcattgctgagtcgtattccactgtgtggttatgccacatttttttcttaattcaccagctgatggatatttagggttccagttttttttgtcttttttgaataatgctgctacaaatgtttaggtgtctttgtataggtgtgtgttttcatttctcttgggtagattcctaagggtagaactgctgggtcctgtgtttaatttatgattatcttttttttttttgagacagggtctcgctctgttgcccacgctggaatgcagcagtgcaaacatggctcactgcagcctcgacctgctaaactcaagctatcctcttgcctcagcctcctgaatagctgggacgacagacacgcaccaccatgcccagctaatttttttttgtattttttgtagagacaaggttttgccattttgcccaggctagcatttaacattttaagaaatggccagactgtttttcaaagttttcccaccagcaatatatgaggatttgtctctccatatcctcaccaatacttgttttctgtctctttgattataaccatcctagtggacatgacatggtatgtaactgtggttttaattctcatttatctaatgactatgtcgtgtatcttttcatgtagttattagccattcatatacatattatttgaagaaacatctattcaagtcttttgcccatttttatttgtctctttattattgatttgtaaaagttctttatatattttggataccaaccaaaatatatacaaccatatatacaaccatatatagttgtatatgatttgcaactattttctcccagtcttcggctagttttttttcttttttctttctttctttctttttttgagacaggggtctcactgtgtcacccaggctggagtgcagtggcacaatcttggctcacttcaacctccacttcctgggttcaagagattcttgtgcctcagcctcccaagcagctgaaattacaggcgtgcaccaccatagcccagataattttttgtgtttttagtagcaatggccaggctgttttcgctatgttggcaaggctggtctggaactctggcctcaagtgatctggctacctcagcctcccaaagtgctgggatcacaggcatgagccacttcatctggcttcattttttctttcttttctttgagacagtgtctttctctgtcacccagactggagcgcagtagcacaatcacagctcactgcagccccaaattttcagggtcaagtgattgtcacacctcagcccccccaagtaggtaggactataggcccgcccccccatgcctggatagattttatattttttgtagagatgaggtcttgccaggttgcctaggctggtttcaaactcctggggtcaagcgattcacctgcctcagcctcccaaaatgctgggattacaggtatgagcccccatgcctgaccccttctttttttttttttttttttttttttttttcgtatggagttttgctcttcttgcccaggctggagtgcaatggcaccatcttggctcactgcaacttccgcctcctgggtttaagcgattctcctgcctcagactcccgagtagctgggattacaggcatgcaccaccatgtctggctaattttgtatttttttttttttttttttttttttttagtagagatggggtttctccatgttggccaggctggtcttgaactcccgacctcaggtgacccatccgcctcggcctcccaaagtgctgggattacaggtgtgagccactgcgcgcggcctcctggcctcttattaatggtggcttttgaagtgcaaaaattttaaattttgacaaagtctaacatcaatttttttctcttgtcagttgtctttttgctgttatattcaagttctctgcctaacccaaggtcatgaagactatctcccatggtttcttctagaagttttatggttttagctcttacattcaggtatctgatctatttcaagttttttttttcttatgcatcctgtgagcaaaagatctaaattcaccttttggcatgtggctatccaattgatcacagcagcatttattgaatgcctatcctttcctccatgaaattgtcttggcaccttgtaaaatcaattgaccagaaatgtaagggtttctacttggactctggattctgttccattgacctataaacgcattcttatttattattattattattttcccccgagacggagtcttgctctgtcaccctggctggagtgcagtggcacgatctcagctcactgcaacccccgcctcctgggttcaagcaattctcctgcctcagcctcctgtgtagctggaattataggtgcacaccaccatgcccagctaatttttgcatttttagcagaggcggggtttcaccatgttggccaggctggtctcgaactcctgacctcatgatccacctgcctcggcctctcaaagtgttgggattacaggtgttagccaccgtacctggccttatagttgttgttgtttttaaattcagatacaacttatacacagtaaaattcatcctcttgagtgtacctttcttttttttttcttttcttgagatggagtctcgctcttgtctcccaggctggagtgcaatggctcgaactcagcacactgaaacctccgtctcgtgggttcaagagattctcctgcttcagcctcctgagtagctgagattacaggcgtacgccaccacgcccggctaatttttgtatttttagtagagacggggttttgccatgttggtcaggctggtcttgaactcctgacctcgtgatccacctgcctcagcctcccaaagtcctggaattacaggggtgaaccacgcacccagccttgagtgtgcctttctatgagtcctaagaaacacacacatttgtgcatccaaccccaaaaccaagatacagtatggtcccatcacctctcacaagtccctgtgccccctactgtggacccctctccctcctccccaaccccagacctggtttttgttcacacagttccacccgctccagaaagccatataagttgattcctacagcactccgccctctgactgtggctttgtttccatcccatccttcaatatccaggatgatctttccaaaatgtaaatgtgccctctcctctgtgcttctacttaagtctaaatacaacttgcagggtctggtctttgaccgctactcctgcccatctggacaaacaggatggatggctctcaaacctggtttgcagaacagccacctgagggcttgtcaataccacaccttcctgggtcttagccccagagactgagattcagttgctggagaggagcccaagaatctattttccacacaaggttagggaggtctagaggccacatttgcagaagcacagcttcctctctccacaccttccacacctgtccaggttcacccacgtggcctctgcttcctcccttctcctccaaccccactctctgtctccgcatgctgcatctcctcctgcccagagctctggcattgatttcctcactggggaaagtggcctccttccccaattcccatccaccgattccaacccccttcccatgtcagccagcttctcctctgctcagctgtcacctccactgagaagtctttcctgactccctatgtgagtcattttcccagcatagttgtctcctgtcatttcttatttgtgtgattctttggttaacatcaatcttcctgattggctgtgtgaggatgggcggggtctgtttttgttgtttacgcctgtatccccagcacaaaacatggggctggcatatggtaggtactaaacagatagttgaataaatgaatgagtgaattgtctactctgcctttgcacaagctgctccatcaccaaagagaccttgcctcctcccccacttctttgctgggcccactcataccggttttcctaggaaaactctggagaaaattgaggcaggagccactcattcgtgccccttccagggtggacctcttatcaccctaaggattgtttgttttcctgtcacccacatcaagctgggtggtggccgcagcctttgatctccacctcctaacccctctcccaagtaccctgtgtttgcccagcactgaatgagacagctaaagtgatccctgagagaactaaagtgttccctcaggccgggcgtggtggcttatgcctgtaatcctaacactttgggaggccgaggtgggcagatcacctgaggtcaggagttcaagaccaacttggttaacatggagaaaccccatctttactaaaaatacaaaaattagctgggtgtggtggcaggcgcctgtaatcccagctactccggaggctgaggtaggagaattgcttgaacctgggaggcagagtttgcagtgcgccaagatggcatcactacactccagcctgggtgacagagcgggactctggctcaaaaaaaaataaaataaagtgatccctctaagaggaatccccaggggcccaggccagagctttctccaggtcaccatggctcctcccactgtgccaccctgcctaaccccctcgattttaaaggagaagccaagactctggactttgctcagaaggtggggggcgggggagggagggcttaccctgggtacctctgaggggccagggcgcagccaccacggtaagggtgactgcagatcgaggggcaggccatgttgctggacaccaccctggctggcgtccctctcggcagggtgctctttgccccatggggtgggatccagagctgcagacaggcccccaggcttggccaatgaacagaccaggttcggggagggtgttggaaaagagtggatggggtggttccccttaccttgcagcccccaggccctcccccctccctcccaggtggtcgggactcttgatcttcgctcgtggtactgtctgttcggctgtcttccccgcctctccccaggcacctgcatcctcccttggcacctgctgccaggctaggaagggcaaaaacaatcccagttggcgtagtcagggagtctccgccctcctcccaggtttcctcctcccaggcgcctcccctggacccgcccccatctgcccaagataattttagtttccttgggcctggaatctggacacacagggctcccccccgcctctgacttctctgtccgaagtcgggacaccctcctaccacctgtagagaagcgggagtggatctgaaataaaatccaggaatctgggggttcctagannnnnnnnnnnnnnnnnnnnnnnnnnnnnnnnnnnnnnnnnnnnnnnnnnnnnnnnnnnnnnnnnnnnnnnnnnnnnnnnnnnnnnnnnnnnnnnnnnnnnnnnnnnnnnnnnnnnnnnnnnnnnnnnnnnnnnnnnnnnnnnnnnnnnnnnnnnnnnnnnnnnnnnnnnnnnnnnnnnnnnnnnnnnnnnnnnnnnnnnnnnnnnnnnnnnnnnnnnnnnnnnnnnnnnnnnnnnnnnnnnnnnnnnnnnnnnnnnnnnnnnnnnnnnnnnnnnnnnnnnnnnnnnnnnnnnnnnnnnnnnnnnnnnnnnnnnnnnnnnnnnnnnnnnnnnnnnnnnnnnnnnnnnnnnnnnnnnnnnnnnnnnnnnnnnnnnnnnnnnnnnnnnnnnnnnnnnnnnnnnnnnnnnnnnnnnnnnnnnnnnnnnnnnnnnnnnnnnnnnnnnnnnnnnnnnnnnnnnnnnnnnnnnnnnnnnnnnnnnnnnnnnnnnnnnnnnnnnnnnnnnnnnnnnnnnnnnnnnnnnnnnnnnnnnnnnnnnnnnnnnnnnnnnnnnnnnnnnnnnnnnnnnnnnnnnnnnnnnnnnnnnnnnnnnnnnnnnnnnnnnnnnnnnnnnnnnnnnnnnnnnnnnnnnnnnnnnnnnnnnnnnnnnnnnnnnnnnnnnnnnnnnnnnnnnnnnnnnnnnnnnnnnnnnnnnnnnnnnnnnnnnnnnnnnnnnnnnnnnnnnnnnnnnnnnnnnnnnnnnnnnnnnnnnnnnnnnnnnnnnnnnnnnnnnnnnnnnnnnnnnnnnnnnnnnnnnnnnnnnnnnnnnnnnnnnnnnnnnnnnnnnnnnnnnnnnnnnnnnnnnnnnnnnnnnnnnnnnnnnnnnnnnnnnnnnnnnnnnnnnnnnnnnnnnnnnnnnnnnnnnnnnnnnnnnnnnnnnnnnnnnnnnnnnnnnnnnnnnnnnnnnnnnnnnnnnnnnnnnnnnnnnnnnnnnnnnnnnnnnnnnnnnnnnnnnnnnnnnnnnnnnnnnnnnnnnnnnnnnnnnnnnnnnnnnnnnnnnnnnnnnnnnnnnnnnnnnnnnnnnnnnnnnnnnnnnnnnnnnnnnnnnnnnnnnnnnnnnnnnnnnnnnnnnnnnnnnnnnnnnnnnnnnnnnnnnnnnnnnnnnnnnnnnnnnnnnnnnnnnnnnnnnnnnnnnnnnnnnnnnnnnnnnnnnnnnnnnnnnnnnnnnnnnnnnnnnnnnnnnnnnnnnnnnnnnnnnnnnnnnnnnnnnnnnnnnnnnnnnnnnnnnnnnnnnnnnnnnnnnnnnnnnnnnnnnnnnnnnnnnnnnnnnnnnnnnnnnnnnnnnnnnnnnnnnnnnnnnnnnnnnnnnnnnnnnnnnnnnnnnnnnnnnnnnnnnnnnnnnnnnnnnnnnnnnnnnnnnnnnnnnnnnnnnnnnnnnnnnnnnnnnnnnnnnnnnnnnnnnnnnnnnnnnnnnnnnnnnnnnnnnnnnnnnnnnnnnnnnnnnnnnnnnnnnnnnnnnnnnnnnnnnnnnnnnnnnnnnnnnnnnnnnnnnnnnnnnnnnnnnnnnnnnnnnnnnnnnnnnnnnnnnnnnnnnnnnnnnnnnnnnnnnnnnnnnnnnnnnnnnnnnnnnnnnnnnnnnnnnnnnnnnnnnnnnnnnnnnnnnnnnnnnnnnnnnnnnnnnnnnnnnnnnnnnnnnnnnnnnnnnnnnnnnnnnnnnnnnnnnnnnnnnnnnnnnnnnnnnnnnnnnnnnnnnnnnnnnnnnnnnnnnnnnnnnnnnnnnnnnnnnnnnnnnnnnnnnnnnnnnnnnnnnnnnnnnnnnnnnnnnnnnnnnnnnnnnnnnnnnnnnnnnnnnnnnnnnnnnnnnnnnnnnnnnnnnnnnnnnnnnnnnnnnnnnnnnnnnnnnnnnnnnnnnnnnnnnnnnnnnnnnnnnnnnnnnnnnnnnnnnnnnnnnnnnnnnnnnnnnnnnnnnnnnnnnnnnnnnnnnnnnnnnnnnnnnnnnnnnnnnnnnnnnnnnnnnnnnnnnnnnnnnnnnnnnnnnnnnnnnnnnnnnnnnnnnnnnnnnnnnnnnnnnnnnnnnnnnnnnnnnnnnnnnnnnnnnnnnnnnnnnnnnnnnnnnnnnnnnnnnnnnnnnnnnnnnnnnnnnnnnnnnnnnnnnnnnnnnnnnnnnnnnnnnnnnnnnnnnnnnnnnnnnnnnnnnnnnnnnnnnnnnnnnnnnnnnnnnnnnnnnnnnnnnnnnnnnnnnnnnnnnnnnnnnnnnnnnnnnnnnnnnnnnnnnnnnnnnnnnnnnnnnnnnnnnnnnnnnnnnnnnnnnnnnnnnnnnnnnnnnnnnnnnnnnnnnnnnnnnnnnnnnnnnnnnnnnnnnnnnnnnnnnnnnnnnnnnnnnnnnnnnnnnnnnnnnnnnnnnnnnnnnnnnnnnnnnnnnnnnnnnnnnnnnnnnnnnnnnnnnnnnnnnnnnnnnnnnnnnnnnnnnnnnnnnnnnnnnnnnnnnnnnnnnnnnnnnnnnnnnnnnnnnnnnnnnnnnnnnnnnnnnnnnnnnnnnnnnnnnnnnnnnnnnnnnnnnnnnnnnnnnnnnnnnnnnnnnnnnnnnnnnnnnnnnnnnnnnnnnnnnnnnnnnnnnnnnnnnnnnnnnnnnnnnnnnnnnnnnnnnnnnnnnnnnnnnnnnnnnnnnnnnnnnnnnnnnnnnnnnnnnnnnnnnnnnnnnnnnnnnnnnnnnnnnnnnnnnnnnnnnnnnnnnnnnnnnnnnnnnnnnnnnnnnnnnnnnnnnnnnnnnnnnnnnnnnnnnnnnnnnnnnnnnnnnnnnnnnnnnnnnnnnnnnnnnnnnnnnnnnnnnnnnnnnnnnnnnnnnnnnnnnnnnnnnnnnnnnnnnnnnnnnnnnnnnnnnnnnnnnnnnnnnnnnnnnnnnnnnnnnnnnnnnnnnnnnnnnnnnnnnnnnnnncccccatcctgttcccagccccgtgcctcccccattccgctctggctagcagtgggttggggagttgggggaagggtggaggcagggctgtttttgtttctcctaagccaggaagttgtgtggatgagtcaaggttgaatggagagccctaggcagtgttgtcccgcccgccctgactcacctgtcccccaaatcccctgatgccctcactgaagggtcaggtgcctgctccctcctgaggggtcaatcccaggtgccccaggtggcctcatagtactggcccagtgtttggagaacaggctgggggctgggattgcaggttctcccaggtctcagcccggccaaaggggtctgctgggttcctgcggagaaggtgccagccccacctccacctctagtgctcgtctttgcctgctgtcctgtctttacttgtcttgagtgtctgtgcagcccctataagtgataagacatgggtgagattggccttgcctgggggtaccaggtgccctcagacaaatgggtggataggacaggtgcacagtaatggatgatgcggcccccgcacagtgctgagagagagtcattcagtctgaatgtggaaggccaggaaggcttctcagaggaggtggctctagcactggggcttcaggaaagagttgggcaggaggatggcctggggagggtacgcaaggtttgggggctgctggggccaggacccctaccccaggccctgctctcccccttgcactgcagcggagcccgctctcctgcctttctgactcccatccttccccacctccttctcccctctgcatcactcatcacttgggcaggccaaacctcgccaagtatgaacaggctctggcaactgggtctggcaacaaagtgctggaaaaacccggggcacagcccagcgcagtgagtgccccacacgtggaggcaaaggagtgggcctttgccctgaccctgagggctgagcctgagagtctgtgggttgtgaaatctgttgtgaccaccaggcttgtggtgggtggaccctcagctcttcctgtgagcaactttgtgctaaagaaagagcactggagccgggcgtggtggcttacgcctgtaatcccagcactttgggaggccaaggcgggcggatcaggagttcaagaccagcctggccaacatggtgaaaccctgtctctactaaaaatacaaaaattagacgggcgtggtggtgggcacctgtaatcccagttactcgggaggttaaggcacgagaattacttgaacccaggaggtggaggttgcagtgagtggagatgacgccgctgcaaaaaaaaaaaaaaaaaaaggagaaaaaaaacagaaagagcactggacttggagtctaaacacaggttctactcccgactcacctgtgactgagggcaagaatgctttcttctcagagactcggtgtccccttttgtaaaatgaggctcattctgtccttccccaagggcttcagggaaactccagttagagcagtgaggtgctaggtaaactctgaggggcaccctaaccgccgtgtgaggtcaggaggtctgaattctctcatcccctctccccaggacaagggcacacaactggttccgttaagcccctctctcgctcagacgccatggagctggatctgtctccacctcatcttagcagctctccggaagacctttgcccagcccctgggacccctcctgggactccccggccccctgatacccctctgcctgaggaggtaaagaggtcccagcctctcctcatcccaaccaccggcaggtacgatggggcgtggggcttgggggaggtcagtgctggataatacacagaggcttgcaggccactgctcccttccccacacctctctccctttttcttcttgccacaggaaacttcgagaggaggagaggcgtgccacctccctcccctctatccccaaccccttccctgagctctgcagtcctccctcacagagcccaattctcgggggcccctccagtgcaagggggctgctcccccgcgatgccagccgcccccatgtgagttgtccctcagaagggaagggagggatgcacgggttctgggtctgtgggagatacacagccgcttccatggaggcaggggatcttggttaggagtccctgagggtctagcaggtgcggaaagggaatgaatcaccctttgcctcccctcaagtcgtgtgcaattcctggggcgcaggtagtaaaggtgtacagtgaggatggggcctgcaggtctgtggaggtggcagcaggtgccacagctcgccacgtgtgtgaaatgctggtgcagcgagctcacgccttgagcgacgagacctgggggctggtggagtgccacccccacctagcactgggtaagtcaggtgcatggaactatccgggctgggagatgatgccttgcatcttgggctaggcatgtggctcatccaggagatctggttgatctccaataacccctgctttttgcccttgtccccagagcggggtttggaggaccacgagtccgtggtggaagtgcaggctgcctggcccgtgggcggagatagccgcttcgtcttccggaaaaacttcgccaagtacgaactgttcaagagctccccagtgagtgcatgagggctgtctgggcgctgggatgccctgatcctcaacctggatgctggagccctgatccctgacacttgtctacccacagcactccctgttcccagaaaaaatggtctccagctgtctcgatgcacacactggtatatcccatgaagacctcatccaggtggggggaccccccatttcactgcagattcacgactccccagcattggccagtgcttctccacccttaagtcctgtgcctcccctctatgttgtagaaagagccaaatcacagtcctgtgtgactggggacagtcactttccctgcctgagcatcagtttcttctattaaatgggggcgagaaatgcatgtggagcatttccttgtaaaaacctgagggtgggctgggcacggtggctcatgcctataatcccagcactttgggaggctgaggcgggaggattacttaagcctagaagtttgagagtttgagaccagcctgggcaacataatgagacctcgtctctccaaaaaaaaaaaaaaaaaaaaaaaaaggccaggaatggtggcatgagcctgtagtcccaggtgcttgggaggctgaggtgggaggatcacttgagctcgggaggtcgaggttgcagtgagctgtgatcgtgccaccgcactagcatgagaccctgtctcaaaaagaaaaagaaaaagagaaacatcctggtggtagaggggaagggaggaggtcagacctgtcactctcctctgctctcctctggctcagaacttcctgaatgctggcagctttcctgagatccagggctttctgcagctgcggggttcaggacggaagctttggaaacgctttttctgcttcttgcgccgatctggcctctattactccaccaagggcacctctaaggtaaggtcttgagggtaccagccccagcccctccagtccctggtccttttagaagttgccccttctctgctggaacctctgagcccttctccccctgggccccccaggccagccacctccagtttaccatctctccctacatccttgcctagctcacctgcccagggaggtagcaggagaaaagatgatcttagtttaagtcctggctctacttctatttgctgtgtgaccctgggtattcccctgcccctctctggtcctgaaatctccccacctggcttgtggggggaggtaatagtgggcgggatctacctgtaccaagtcctgctcactcatgctgcttaggatccgaggcacctgcagtacgtggcagatgtgaacgagtccaacgtgtacgtggtgacgcagggccgcaagctctacgggatgcccactgacttcggtttctgtgtcaaggtgaagacctggccaggcctggcccctggcctggggaagcaggaactgctcaggcccctggatcctgcccggggcttctgagccccaattcagacacctagactcctctccctgcaccctggcctgctggaaactcctggattcagctctgctatgtggagcaggggcagacatgtggtcctaaaggcagatatgggaccagtcaatttcctctctctgcagcccaacaagcttcgaaatggccacaaggggcttcggatcttctgcagtgaagatgagcagagccgcacctgctggctggctgccttccgcctcttcaaggtgagaccctgggagtggcatggggggctggcctggccagagggatccccagctctgccctcaggaagtctcaggaatgaggagggcatcacagccttgctctctgataacccccagtccaagcctgaagttataggaagtgcccatcgaaggcagaaacacagccctggtctgggcaagtcctggtctgaggggggcgtcacagccacgcccccaggacctctcgacctcaagctctctttctctccccacccccagtacggggtgcagctgtacaagaattaccagcaggcacagtctcgccatctgcatccatcttgtttgggctccccacccttggtgagtgtgcccaaggggatgggagggtgggtatgcaggccctgtcttacgggtacctgggccctgttctgacctctctcctctccttccatctccagagaagtgcctcagataataccctggtggccatggacttctctggccatgctgggcgtgtcattgagaacccccgggaggctctgagtgtggccctggaggaggcccaggcctggagggtgaggcctgctgtgtgtgtgtgtgtttgtgctggggacccactctctgggtgggatccctgaaataggagggaggaagagagggcggggggaggcccctggctgggaagaagtgctctaccttcctgaggtgctgggtaatgcccccaagcacgccccgactctcccgtatctcccactgctccacagaagaagacaaaccaccgcctcagcctgcccatgccagcctccggcacgagcctcagtgcaggtgggtgacggccccgagtcctggggcgggggctgcctcaacttctctttgtattcccagtggggagtagatggtataggggtcccctccccaaagtgaccgcccatgtccttccccaccacagccatccaccgcacccaactctggttccacgggcgcatttcccgtgaggagagccagcggcttattggacagcagggcttggtagacgggtaaggggcagggccgggcaacagacccagggataagagagactggggtccaggtggcagccatggtccttgggtagtaatgctgccccatctcctgtcttctggcagcctgttcctggtccgggagagtcagcggaacccccagggctttgtcctctctttgtgccacctgcagaaagtgaagcattatctcatcctgccggtgagcttccctgcgtccccggagtcctgcaatgagacacaggactcccagcaacctgtcctcctcaccaggcccctccagaggctccctggcccccagtgcgtctcccttttccctgcacaagaagtgggaggctgagtgcggtggctcacacctgtaatcccagcacttaggacggccaaggtgggagaatggcttgagcccaggagttcgagaccagcctgggcaacacagggagaccccatctctacaaataatttaaaaatgagccaggcatggtggtgcacacctgtagtccagctactcaggaggctgaggtgggagcattgcttgagcccagagggtcaaggctgcagtgagccatggtggcaccaccacactccagcctggatgacacagtgagaaaactgtctcaaaaaaaaaaaaagaaagaaaaagaaaaagaaaaaagaaaagaataaaaggaaatggtggggccctggcccaggagggagcttcccaagcctcgggcccctccctgaacttccaccccctttactgtaccccagagcgaggaggagggccgcctgtacttcagcatggatgatggccagacccgcttcactgacctgctgcagctcgtggagttccaccagctgaaccgcggcatcctgccgtgcttgctgcgccattgctgcacgcgggtggccctctgaccaggccgtggactggctcatgcctcagcccgccttcaggctgcccgccgcccctccacccatccagtggactctggggcgcggccacaggggacgggatgaggagcgggagggttccgccactccagttttctcctctgcttctttgcctccctcagatagaaaacagcccccactccagtccactcctgacccctctcctcaagggaaggccttgggtggccccctctccttctcctagctctggaggtgctgctctagggcagggaattatgggagaagtgggggcagcccaggcggtttcacgccccacactttgtacagaccgagaggccagttgatctgctctgttttatactagtgacaataaagattattttttgatacacctatgagttctgtctggcaaggcctggctggctgaatcaagaagggaaccagagctggacgtggtggctcatgcctgtaatcccagcactttgggaggccaaggtaggagaattgcttgagtccaggagtttgagaccagcctgggcaacatggcaagaccctgtccctacaaaaaataaaaaaatgagccgggcatggtggtgtgcacctgtagtcccagcttctcaggaggctgaggtgggaggatcccttgttccttgagcctgggatgtcaaggttgcagtgaactgagattgtgccgctgcactcagcctgagtgacagagtgagaccctgtctggaaaaaaaaagaggggagacctggagaggtgggcacctgtggaggccttggtggaagtgtcaaatggatcgaggccatgtctcagcctgcctggatgttcctcaagggcaggagtggttatctgagagtctccagtgcccaccatgcagcttgacacatagtaggcgcccagtcattgctaattaagtaagtgaatagacaagagaccatcatcccagagagattttctgacagtctaagtctagagaggtaattaacagggcctgggagttggagatgagtccgacagcatgcttgtcctccgctagtcctggactagctgacggatagttggccccagcatgcacacagttatgcatccagccccaccaccaagacacagaatggcctcatcacccccaacaagtccctgtgccccctactatcagccatgctccctcctacccaaactgaaacctcctttctgtcctagttctgccccttccagaaagccatataaatggagcctgctagcattcagccctctgcatctggcttccatctccaacacatccttcagcacccagagtgatcttttctcaaatataaattcaccactcccggcagggcactgtggctcacacctgtaatcccagcactttgggaggccgaggcgggcggatcacgaggtcaggagtttgagaccagcctggccaacatggcaaaaccccatctctactaaaaatacaaaaattagctgggcatggtggcgggcacctgtaatcccagctactagggaggctgaggcaggagaatagcttgaaccggggaggcagaggttgcagtgagccaagatcatgccattgcactccagcctgggcaacaagagcaagactcagtcttaaaaaaaaagacagatgtctggcctctgcccactgctcatgccagtctatgtttttgtcttagaggtttttttgttttgttttttgagatggagtctcactctgttgcgcaagctggaatgcagtggcacgatctcagctcactacaacctccttctcctgggttcaagcgattctcttgcctcatcctcccaagtaactgggattacaggcgcttgccaccacgcctggctaattttttgtatttgtggtagagacggggtttcaccatgttggccagcctggccttgaactcctgacctcaagtgatccactcaccttggcctcccaaagtgctgggattacacacccaagccactgcgcctggccttgtctaagagttttttagtttgagctcttacctgatgggagctctttaataaatatgtcagatcgactgcatctgaacttgctgcttaactcaggagacagaccctcctgcagacctgtgaaccccaactagtcattgtttttgtcaaaacaccaaacctgaatctgattccttggattcaacaactagtttacgggaaatacaagggaaacaatgacaaaaatccagattgggaaattctacagaacagataacccagtttcttcttcaacagcaacaaaattaccagaaaagatgggcaatctctagatttcaagaaatttagacatatatcaaccaaatgatgtgttgacctttgattcaaatgcaaactaactgtaaaaagcatttatgagcaattgggggaaatttgaattctgatcagatattcgatgatattaagggattatggctaactttctaaggtgtaataatggtattgcagttacggttttttctaaatctttatctttaagaaattcattatgaagtatttaaaggtgaaatcacatgatgtctcagctttgtttttattccttttcttttttttttttccaacttttattttagattcagggagtacatgtgcaggtttattacctgggtatattgagtaatgctgaagctttgtttttaaaataacccagaggtggccaggcacagtgggtcatgcctgtaatcccagtactttgggagctgaggtgggaggagtttgagaccagcctgggcaacatagtgaggccctctctacaaaaataaaaaataaaaaattagccaggtgtggtgacatgcatctgtggtcccagctacctgggaggctggggtgaaaggatcgtttgagcccaggaagtcaaggctggtgtgagccatgattgcatctctgcactccagcctgggccacagaacatgaccttgtctcaaaaaataaaaagaaaaaaatgaaatccagaggttaaaggagagggtgtgggcatagtcatggtgtggccatgagttgacactggctgttgatattggttgaagcttggtgacaggtactggctatgtggggatttgttaaattatcctctccacctttgtatatgcttggatattctattatatattgatatattttaatggagagccccttctcaaatctttgggactgactgggcaggaggtggtgagacgctgttttgtaggtgaggaaactgacggcccagtgggcagcctggccccagatcacagtgggagagccaagattccaacccaggtctgaggaccaggtctgggcatgttctgcttcccctgtctggctgacgtccaggtggcattcctcagccacagtgacagcaatagtggcctactggggtcctcccttagagagcccctcccttccctgcagccttggtctctggcctggagggttgtcctgaggtgaccttgagactgtgcagcctctgcaatcagcccctgggctgggtctggcagccctggcagccactcccgaccaaggcacccccatccttggctaactccaggctgggaagctgggaccaggtccagcagacagaggtgggcagagaggtctcatgcacaccccagcctgggacctcctgggaatctgctggaagaacttactgcagcccaagggcaggaagggtggcagattttgcttctttttagcaggactggaggcaggacccagtgcaacctgctgcctgccacctgccacggttcccagagccatccccaccacaggctgtggctcgagcaccgaacagggcagtgtcagctgtgtggctggccatgggtgcccagggccacctccgaggtgtgggtgccagagttccaggctggagtgagagtaaaggggtcaagatgagtcacctcttcagcatgtccaggggttcagactgtaaaaaaagaggacccagtgtcccttcacagcctgaggcactgggcagagacaaagcctctctgtcaatcagctaattggagactgtgagacagatgtccttcccactttacaaatgggaaactgaggctcagggaaagacagggactcacctgcgacaggggtcgcagagggagttcgggacagaggccagactcagcccactggacaggtggtgaaatgcagccctgccctgctctagcctttgttctctgccccctcccttctcagtgctggccacagtgagggacctaggctgccgagagcccttagagggggcagcatttggccctgatctggccacctgagaccagcagcagcccattcttggtgagtgtctgagatttctggctttttggagacgtagctgctaagagtttgggggcacagggaccctctcagggccagctcacagtggaacccctgggtaagatcccccagctctgaggatgtgggaaggatgctgctctacctcagagactgcagcatgacctacagtggtcagacagcagaaaggactgccaaggacggctgcagtgctagatcggggaggcttgtggttctgagaaaatctgggctggtgggaggggaagcaggggcttctctgggggagagggtgggggctgggacctcagatactgtcttttcaaaattgatttattgggtttcattctaaaattatacgtacttattaaaaacatttcagaaaaaaacttgagggcaaaggggaaattcctcatcatctttccatgcagaggaggacccagtactgagagagggtgacagggcccacatctggggagctgacgcgaagtgctgcctgccatgcatcacacgttccagcttcccgggaccagcgtggccggtgggagccgggtgccagggcacattgctatccttggcagcaccatgggcctttagggtaggggttctgtggagggtgtggctacaatgttggcctccctgcctgctcaagtgtggaggggagggaggactgctgccaacgctctggactctgggatgggggtgggcatgattccaggggagcccacctccctgggcggggcatccagacaaagccctggccagttctgcaacatccaagttcacgggtggtggacaggcccaagggttcaacatcaggtcagggaccctgcctggctccttccttgggccccagtgccaggcaccctgatgagggatgaagagaggaaggacaggacacagacaggggagcccaaagccacttggaaggattctttcttccaaactatccacataagcagttttctaactccttcccagagcccaagggttctggcaggggcttgaggggcaggttggggtggtgatgggggatgcattgcctttctatctggaacttgagccttatggtatattcaggaaaaaggcttgaaccagtgaagtactgatctggtccaacagatagaaagagggcccagagaggtcagggcttggtccaactcgcacagtggtggggcgtctgcagactgctttcctgtcctgtgctgttggcagaacctcagctttgggacttgagggggagtatgcagtggcaattaggacaaacgactctgagctctcagttgagttgggggaggagagaaaagaaggagttagatcctgggggagttggatgttgcagactggactccagagcctgggggtgtgggcgatcctggggtgtggggagggcgggctgaggctgctccacaagcgttctcgaagttcaccatacaagaaggggcggtgtggggaaatggggatgaggcctgaaattcaatcccatgtgggttgagttatgatgtcatctgacaccctctcacacggctgcatctaccccaaggaaggggcaagtttttctttgatgggcacctgggggggctgtttagctggagttttttttgtttcgctttttttgtttttgtgttttttttgagacaagtttcgctctgtggcccaggctggagtgcaatggtgtgatctcggtttaccgcaacctccacctcctgggttcaagcaattctcctgcctcagcctcccaagtagctgggattacagacatgcaccaccacgcccagcaattttgtatttttagtagagatggggtttatccacgttggtgaagctcgtctcgaactcccgacttcatgtgatccgcccgcctcagcctcccaaagtgctgggattacaggtgtgagccaccgcgccgggcctggagctgcatttttgttgtaagcactttgttcttacttggattaggtttattttagggtggtttggggcagactgagggagattggaaggcagaaaccaccccctcaggacaaccacgtggatctccttagggtctgggtagtggaactgggccctgtgaccttggagttggaggggaagctgtaagcagggatggaacgggccacccgcaccctcacacagctgtgaccaacaggcacggtcatccgcattcacctgcccaactcccatgccctgagtcctgtcctccagggcattcctactggcactaccccaatttcccaaaagattccagggatctctctctcgctctctctttttttttttttacagtctcactctgttgcccaggctggagtgcagtggctgatctcagctcactgcaacctccaccccctgggttcaagcgattttcctgcctcagcctcttgagtagtttgggattacaggcgtgcgccaccacgcccagctaatttttgtatttttagtagacggggttttgccatgttggccagactgatctcaaactcctgacctcaagtgatcctcccgctttggcctcccaagggagggttccttcctcccaggctgaggcaccctgccccacacatctactggaggaacttagtgttggggccagggggtggctgggtaaggctggatcccacacttgtcaggccaggttggggtaggggaggatacacgggggacccgtctctcagccgttctgggccggtgcctgaggcgatctgccccgccgcccgcccttccgccaccacccaagtcgcatgcgcgcgccggggccgacgggcgccaggctccaccgagccaccctccgtcgtggcggcccctcgtgcctctgcggagggaaggccgccggcttcgccagggggcgcgcgtcggggtcgcggctctttgaactcggccccacgaggggacgcgccatcggtttcgtggcttgcgtggcgccgcagcaacgagccggtcgccccggggcgttgcttagtccgggcctcgctgcgagtctgtgggcgaggcgggaggtgcttccttggccaggcgggtggaggaaggtgtgggcgccgcatcccagcgtcgcggagcctccaggcgcgggcaggcgagactggcgtgcagcgcgacggcctagtcccggcgtcccaccgtcccccactcccgcaggcgccgagccgattcagccgcgcggctgcagtgacacccagcggccgtcgcgggaagtgcggtcgccgcggccaggcctccggggctcctgtctctcgaggttcccaccccggttacgcgcgggcaccccggaggagagcggccgcgcgctgcagatgcccgcgggggcacttcccctgcccctcccccgtttcctccccgcaggcgcccgagcgccgggagatcctgcgcagcggcagtgcccggaagggcggggcggggtgcagcagcggcgctgggctgtgacccgggcagtttcacttctggatcctgctcgggctgtgataggacagcgcgggggcagcgggggaacacgcgggcacgccgagatccggcgctcgggaccccgatgaggggaggcctttcactcctggggtgtcacgcgacccacgctttcctccatgtccactcccaccccccatgggttccactttgctgtcccccgagctgccgctcctccccagcagacaccgtctccgccggggctgccgacccccggagaggccccgagcggcgtgggcggcgggaggagggagctgtgaagccgcaggcagggggttaggctgcgggctgctgagacgccgagctgtttctcagaagtgcagctgcccctcccctcacacccccctcactcccaccgcgcgccgcacccctgccccctctccgccggcctccctttcctctcccaggcaccctagccgggaatctggggtctgggtccacgcagaattaagaggagaacctgagaaagggcgggggccgggggttcagacccagcctcagcgcgcgttattccgagcctcctataattccacaggtgaggggatcctgtcccctacccctggggtccaggattggaatttgatagaacagttaggaaaatgacatcttgagagagtcagggcccggccactattactctagctccagcgtccagtgaggagaggagagagagggaagacctggagcccggctggtgcagtgaggttgaggcctgtcttaggagtaccagctggaaggcccttcagagatccctgactctggggaaaatcaacgcccagaaggggaagtcaagtgtctgggctcatcccgagagggagagggctgggattggaaccaggactccaaatagttgcgggagtctgcgactgtcttttgcttgggacttcagagctttgctggattcactgactcagcctgctttccctcaacacacacaaacacacacacacgagacacgtgcacgcgcgcacacacacagatacacagacacacacagacagacatgcaaggagagagacaggcacacatggagacagacacgcacacgcaaagagacacacagctccccaggagtctagcggggcagctgaggtctgtgagtgagacattctcagtgagacactgagaatgcaattccagtgggggtgggatggggattgggcggtggaaggacaagcccgggggaggaggtggcatcgcccccctagttcccatccaccaccacccccagtgctgtggtttatttgcctaggcagctcttctgggccagggggccagggtactggggtggagaggcgaggtgatgggaaaggctgttctggggcttcctgccccctcactcctggggaaggggggtagctgccatcacccgcaggcctttccactgcagccctttccttgggtatgtgtgttattctgggggaagatctgttatttgcggagaagggaggcagctgcctacttcacaggtcaagacagagttaaaaacaaaaccacagcaaattcaacaccccgtgtccttcagggactttccatgacaccttccttcccccctctcccctaagccagggagcacctccccagagggcctccccaccccaggtgcagtggcttttggcttttatgcaaacaactgtctgatcccggaatgctccacagcccgaactgtggcctgggccgaatgtgcccctccaccatcccttgggccagtgtttctggtcttcctggagttgtgacctccactcttcctcagaccctggattctgagggacaggagatgagggcaggaagctaggtcctttccccctgcctgccctcgggtggcagttgcctgcaggtggagggtttgggcacagcaacctaagtgaatggtccggggttttgagtgatgggggaggggaagaaggagggtgcaggtgtggggtggcctccactgccaggcccaccaccctctagggcattgaattagctcccaagatcaggaaggaaaactcttctcaggctgggagtccattcaaccccaacgccagtgtggacctccggtcctgctcactggcaaagggggtcaggatctccctgtctccctctcttctgcctgagctgcttctgctttggggagggatttggggatggggaaggccatataatcttctctccagggctgaaaaccagctactgaggggccgtttttgaatgtattcagtgctaaaatgcaaaggcagggtgccatgccattcctttctcctcctcagcttgagcaagactgggaaacctgtaggagaccctcagccagtttgaacattttggagtgctgatgggagggagatgatgctgatcatggagccagaggacgctggtgccagcctagccccacatttgttagtcttaaaacttcagacaatctttctcatgcctcttccacagaagacggaaaatggagggtgctttagatgaggctgagcagaaggccagactctctctctactttctctaacgttttctaagagagaacacaatgatgatggaaagaaagcagcctcatccctatgccattctcctaggacttttccccctaacaccttcggtttgggtctccaagtatctaaaaactgtatttaaatatggtcgagtttaaggactgcaactcaa

SEQ ID NO: 605 - DNA, 2579 bp, Homo sapiens
ctggctggcgtccctctcggcagggtgctctttgccccatggggtgggatccagagctgcagacaggcccccaggcttggccaatgaacagaccaggttcggggagggtgttggaaaagagtggatggggtggttccccttaccttgcagcccccaggccctcccccctccctcccaggtggtcgggactcttgatcttcgctcgtggtactgtctgttcggctgtcttccccgcctctccccaggcacctgcatcctcccttggcacctgctgccaggctaggaagggcaaaaacaatcccagttggcgtagtcagggagtctccgccctcctcccaggtttcctcctcccaggcgcctcccctggacccgcccccatctgcccaagataattttagtttccttgggcctggaatctggacacacagggctcccccccgcctctgacttctctgtccgaagtcgggacaccctcctaccacctgtagagaagcgggagtggatctgaaataaaatccaggaatctgggggttcctagaccaggacaagggcacacaactggttccgttaagcccctctctcgctcagacgccatggagctggatctgtctccacctcatcttagcagctctccggaagacctttgcccagcccctgggacccctcctgggactccccggccccctgatacccctctgcctgaggaggtaaagaggtcccagcctctcctcatcccaaccaccggcaggaaacttcgagaggaggagaggcgtgccacctccctcccctctatccccaaccccttccctgagctctgcagtcctccctcacagagcccaattctcgggggcccctccagtgcaagggggctgctcccccgcgatgccagccgcccccatgtagtaaaggtgtacagtgaggatggggcctgcaggtctgtggaggtggcagcaggtgccacagctcgccacgtgtgtgaaatgctggtgcagcgagctcacgccttgagcgacgagacctgggggctggtggagtgccacccccacctagcactggagcggggtttggaggaccacgagtccgtggtggaagtgcaggctgcctggcccgtgggcggagatagccgcttcgtcttccggaaaaacttcgccaagtacgaactgttcaagagctccccacactccctgttcccagaaaaaatggtctccagctgtctcgatgcacacactggtatatcccatgaagacctcatccagaacttcctgaatgctggcagctttcctgagatccagggctttctgcagctgcggggttcaggacggaagctttggaaacgctttttctgcttcttgcgccgatctggcctctattactccaccaagggcacctctaaggatccgaggcacctgcagtacgtggcagatgtgaacgagtccaacgtgtacgtggtgacgcagggccgcaagctctacgggatgcccactgacttcggtttctgtgtcaagcccaacaagcttcgaaatggccacaaggggcttcggatcttctgcagtgaagatgagcagagccgcacctgctggctggctgccttccgcctcttcaagtacggggtgcagctgtacaagaattaccagcaggcacagtctcgccatctgcatccatcttgtttgggctccccacccttgagaagtgcctcagataataccctggtggccatggacttctctggccatgctgggcgtgtcattgagaacccccgggaggctctgagtgtggccctggaggaggcccaggcctggaggaagaagacaaaccaccgcctcagcctgcccatgccagcctccggcacgagcctcagtgcagccatccaccgcacccaactctggttccacgggcgcatttcccgtgaggagagccagcggcttattggacagcagggcttggtagacggcctgttcctggtccgggagagtcagcggaacccccagggctttgtcctctctttgtgccacctgcagaaagtgaagcattatctcatcctgccgagcgaggaggagggccgcctgtacttcagcatggatgatggccagacccgcttcactgacctgctgcagctcgtggagttccaccagctgaaccgcggcatcctgccgtgcttgctgcgccattgctgcacgcgggtggccctctgaccaggccgtggactggctcatgcctcagcccgccttcaggctgcccgccgcccctccacccatccagtggactctggggcgcggccacaggggacgggatgaggagcgggagggttccgccactccagttttctcctctgcttctttgcctccctcagatagaaaacagcccccactccagtccactcctgacccctctcctcaagggaaggccttgggtggccccctctccttctcctagctctggaggtgctgctctagggcagggaattatgggagaagtgggggcagcccaggcggtttcacgccccacactttgtacagaccgagaggccagttgatctgctctgttttatactagtgacaataaagattattttttgatac

SEQ ID NO: 606 - protein, 524 aa, Homo sapiens
MELDLSPPHLSSSPEDLCPAPGTPPGTPRPPDTPLPEEVKRSQPLLIPTTGRKLREEERRATSLPSIPNPFPELCSPPSQSPILGGPSSRLLPRDASRPHVVKVYSEDGACRSVEVAAGATARHVCEMLVQRAHALSDETWGLVECHPHLALERGLEDHESVVEVQAAWPVGGDSRFVFRKNFAKYELFKSSPHSLFPEKMVSSCLDAHTGISHEDLIQNFLNAGSFPEIQGFLQLRGSGRKLWKRFFCFLRRSGYSTKGTSKDPRHLQYVADVNESNVYVVTQGRKLYGMPTDFGFCVKPNKLRNGHKGLRIFCSEDEQSRTCWLAAFRLFKYGVQLYKNYQQAQSRHLHPSCLGSPPLRSASDNTLVAMDFSGHAGRVIENPREALSVEEAQAWRKKTNHRLSLPMPASGTSLSAAIHRTQLWFHGRISREESQRLIGQQGLVDGLFLVRESQRNPQGFVLSLCHLQKVKHYLILPSEEEGRLYFSMDDGQTRFTDLLQLVEFHQLNRGILPCLLRHCCTRV

SEQ ID NO: 607 - DNA, 2491 bp, Homo sapiens
ctggctggcgtccctctcggcagggtgctctttgccccatggggtgggatccagagctgcagacaggcccccaggcttggccaatgaacagaccaggttcggggagggtgttggaaaagagtggatggggtggttccccttaccttgcagcccccaggccctcccccctccctcccaggtggtcgggactcttgatcttcgctcgtggtactgtctgttcggctgtcttccccgcctctccccaggcacctgcatcctcccttggcacctgctgccaggctaggaagggcaaaaacaatcccagttggcgtagtcagggagtctccgccctcctcccaggtttcctcctcccaggcgcctcccctggacccgcccccatctgcccaagataattttagtttccttgggcctggaatctggacacacagggctcccccccgcctctgacttctctgtccgaagtcgggacaccctcctaccacctgtagagaagcgggagtggatctgaaataaaatccaggaatctgggggttcctagaccaggacaagggcacacaactggttccgttaagcccctctctcgctcagacgccatggagctggatctgtctccacctcatcttagcagctctccggaagacctttgcccagcccctgggacccctcctgggactccccggccccctgatacccctctgcctgaggaggtaaagaggtcccagcctctcctcatcccaaccaccggcaggaaacttcgagaggaggagaggcgtgccacctccctcccctctatccccaaccccttccctgagctctgcagtcctccctcacagagcccaattctcgggggcccctccagtgcaagggggctgctcccccgcgatgccagccgcccccatgtagtaaaggtgtacagtgaggatggggcctgcaggtctgtggaggtggcagcaggtgccacagctcgccacgtgtgtgaaatgctggtgcagcgagctcacgccttgagcgacgagacctgggggctggtggagtgccacccccacctagcactggagcggggtttggaggaccacgagtccgtggtggaagtgcaggctgcctggcccgtgggcggagatagccgcttcgtcttccggaaaaacttcgccaagtacgaactgttcaagagctccccacactccctgttcccagaaaaaatggtctccagctgtctcgatgcacacactggtatatcccatgaagacctcatccagaacttcctgaatgctggcagctttcctgagatccagggctttctgcagctgcggggttcaggacggaagctttggaaacgctttttctgcttcttgcgccgatctggcctctattactccaccaagggcacctctaaggatccgaggcacctgcagtacgtggcagatgtgaacgagtccaacgtgtacgtggtgacgcagggccgcaagctctacgggatgcccactgacttcggtttctgtgtcaagcccaacaagcttcgaaatggccacaaggggcttcggatcttctgcagtgaagatgagcagagccgcacctgctggctggctgccttccgcctcttcaagtacggggtgcagctgtacaagaattaccagcaggcacagtctcgccatctgcatccatcttgtttgggctccccacccttgagaagtgcctcagataataccctggtggccatggacttctctggccatgctgggcgtgtcattgagaacccccgggaggctctgagtgtggccctggaggaggcccaggcctggaggaagaagacaaaccaccgcctcagcctgcccatgccagcctccggcacgagcctcagtgcagcctgttcctggtccgggagagtcagcggaacccccagggctttgtcctctctttgtgccacctgcagaaagtgaagcattatctcatcctgccgagcgaggaggagggccgcctgtacttcagcatggatgatggccagacccgcttcactgacctgctgcagctcgtggagttccaccagctgaaccgcggcatcctgccgtgcttgctgcgccattgctgcacgcgggtggccctctgaccaggccgtggactggctcatgcctcagcccgccttcaggctgcccgccgcccctccacccatccagtggactctggggcgcggccacaggggacgggatgaggagcgggagggttccgccactccagttttctcctctgcttctttgcctccctcagatagaaaacagcccccactccagtccactcctgacccctctcctcaagggaaggccttgggtggccccctctccttctcctagctctggaggtgctgctctagggcagggaattatgggagaagtgggggcagcccaggcggtttcacgccccacactttgtacagaccgagaggccagttgatctgctctgttttatactagtgacaataaagattattttttgatac

SEQ ID NO: 608 - protein, 441 aa, Homo sapiens
MELDLSPPHLSSSPEDLCPAPGTPPGTPRPPDTPLPEEVKRSQPLLIPTTGRKLREEERRATSLPSIPNPFPELCSPPSQSPILGGPSSRLLPRDASRPHVVKVYSEDGACRSVEVAAGATARHVCEMLVQRAHALSDETWGLVECHPHLALERGLEDHESVVEVQAAWPVGGDSRFVFRKNFAKYELFKSSPHSLFPEKMVSSCLDAHTGISHEDLIQNFLNAGSFPEIQGFLQLRGSGRKLWKRFFCFLRRSGYSTKGTSKDPRHLQYVADVNESNVYVVTQGRKLYGMPTDFGFCVKPNKLRNGHKGLRIFCSEDEQSRTCWLAAFRLFKYGVQLYKNYQQAQSRHLHPSCLGSPPLRSASDNTLVAMDFSGHAGRVIENPREALSVEEAQAWRKKTNHRLSLPMPASGTSLSAACSWSGRVSGTPRALSSLCATCRK

SEQ ID NO: 609 - DNA, 103203 bp, Mus musculus
  misc_feature (1)...(103203): n = A, C, G or T/U
cccaagacctggttgatcaggactcttagttaaatacatatttacttcttgtattcactcaaccacgccagatttgtagacataaagtgtttctaactcctgtagaagtagcatgacttctttattggataagaaggaaaataaaaaatgatgaggtggtcatgatgtttatggtgcaattaacatagatttcgatcacatacatttatcacaataataacaacggtaacaacatttgatttcctgggaacaaagcaaaccctgatgaaaattttaaaattcaaaagaaaatgcactgagatatattgtcaataattcagttttgcaaatagggggtgcctatcaggtgcccaggtttggtttgagcaagccttctcctgagagccacggttgaatcccaatgcagtttcctcaaagaattattgtttagtggagagactatgacaaggttacagataattgtcacgtaagccaaagaaaaatgtatgactgacgaggcatcccaacagtgttctgaggggatttatgagctgtgaatgtctctcctctttgcaggaggaaatataggtttagataagagaccctactgttatttactttcttccagtgcaagggatcaaatccaggccaccactcatggcaggcaagaagctctaccgctacaagtccccagccttgttttcaccttaaagaaatatttaagtcaggcagtggtggcacacgcctttaatcccagcacttgggaggcagaggcaggtagatttctgagtttgaggccagcctggtctacaaagtgagttccaggacagccagggctagctatacagagaaaccctgtctcaaaaaaacaaaaactaaaaaaccaaccaaacaaacaaaaattaagacagcattttactaaattgttcagactataagacagactggccttaattttgtggtcatcctgtctcagctgcctaagtagctggaatcctaggcccactctaccaggtctagctttttaaagaaagaaacaaataaacaactttctgagcagtatgtgggattcagtgctgggtccctttaatctcagcactagggaggcagaggcaggcagacctgtgtgagttcaaggtcaatgttgtcttcagagggagttctaggtcagccagggtcacacagtaaggcctcatctcaaaaacaaataagtaaatagtaagaaacaaatataggcagctctcaggaataatcaactgcacattatcatgacagtgtgtgtgtgtgtgtgtgtgtgtgtgtgtgactctattttccagagacaagctttctgatattagatgtctggtgggagttaacgctaaagatggaagttagggccttgcttgtgctagattcttgggcttccctttttagttttgccctagagcacaatcccttgtggtaaaaattctgtctccacaagctcagtatggcatgtgagggcaggcatgtatattcaccccaaaccttcacattgggctgggatgttacaagggtagtagagtaattgtctagcatgcatgaagtcttggggggttgatcccactcagcagggcataaaactaggtaccactgctcatacccactaaatgagcaccgagaagttgaggcaagagactcagaagttgttaacagccccccccccaactcccctaccccgccacaccagcctgtttgcccaggattagagtaatagagcacaaggctatgaagttggtctctccagcggtccaattctgtctcaaatttctgcaagttgttaggttacctcatgccttggttttcctcttctgcaacatgaggtgaacaagagaacctacctcggaagtttaaatgagttaatgcataagataagtttagaaataatgtcagggactgtcaagttttctgtttttgtcttgtttgacctctctaaggggtacaatacagttgacaccctatgttccccgggggtcaccttctggtacctacagctcctttgtctttctgaccctctcctgcttacagggctacttgtcgcagtctccttttcttccttgttaaaggatagaattacaatgttttatttttcagagttatttttattttagtatgtttgcatgtgggagggtgtatgatgtatgtgtgcgagtgtatgatgaaaggacagagggggagagagggagagggagagggagagggagagggagagggagagggatgagggagagggaagggaagggaagggagagggagagggaagggagagggagagggagagggagagggagagggagagggagagagaattacaggcatgcataagccataaagcacacggggaggtcagaggacaactgtaggaagtcagttctctctgcatctttgaggcgaggtctctgtttttgctgaggttcatctttccagatatctggtccacaggcattctcctggcttcagctttcttttcactttaagagtcctgggattgcaaaggcttttaatttttcccactttttgatggcggggctggggattgaggtctgcttgccagggtggtgcaaaaaagccttccccccctaaggggtgccggtgccgcgagattgtatatctcatttgggggtggggttgctggacagaataaagaagggagagnnnnnnnnnnnnnnnnnnnnagggagagggagagggagagggagagggagagagaatatacaggcatgcataagccataaagcacacggggaggtcagaggacaactttaggaagtcagttctctctgcatctttgaggcgaggtctctgtttttgctgaggttcatcttccaggatatctggtccacaggcattctcctgcctccagctttcttctcactttaggagtcctgggattgcagatgctctcactttttccagctttttgatgtggggtctggggattgaagtctgcttgccagggtggtgcagaaatgcttcgcccactaaggcatcttgctagccttattttttatttcttatttgtggctgggtttctgtgaagatatatagattttgattggctctctttttgatgccagaacgggggcaacacagaagtccataaaatcaaaaaagtgtcccaaagagctaagacaaagaggtttgttttatagacagaaaaagactaaagaaagttaaaaataagaaccaggcttgtcatatctatgttactgtccttgcaaggtaaggacaggaagtcagtccaggagaaaacctggtgaacagtaggttgcttcaggttatctttgtgtgatcggagcagaggggactctcttatgtgttatctgcgtctggctgacacaaccggtaagggaaaccagactgcagtcactccaagcttttttggagaagggtcaccacacagcctagcttcagtctggtaatgtcggattttagctccagtggctctatattgatttttttagtcttgtctgtcagatctggtccgaaacaatggcttcctgtaattttcatttaccatgccggtcctttccatgtgggcaactcccttaggagaccacatctgccctctgcgttccttgtcacacacttgcaatggactaagctcagccagatccaggctgcaacggcctctctgtgactgctctagtgtggagctccaggccttcgtgtttggctagatgcgtgactcttcccaccctgctcttcctaccgagcttcctcatcttttaactcatccttcctcactgttttcaagatcttaccccatctggctactttagagtccattagctgtcgctcttgttcttcacattctgaaagccagtttcttgtctcaagctctctgaggggggttgggggtaggtacttctcgtcgtttgcccagtcagtctccttcctctctttccccttgtcatcttcttggtcctgcagaatctaatggccacctctctgaggacgcctcttggggtcgccgcgtgtatgatttaggtgctccttgggcttcatcacgcagtgagtaacttttagaaaacactatcaatgtggtccttgccacgcccacgtggttctcttctttcactgggagttccatgagggcttcagcctccaagtttccttgggcttcgttttctacggacctcatacagtacatctggcacaccgaagagacaccgaatggaagccgcagacgagactggtctcacaagccatgaggtgcccttgtgagcctggtgtctcagtgtgcgtcatatatgcacgtccttaacttcacggatagaagattttcagatgaccgttgataaagcaaggactacttaacaacaaagttgaatgggcttacactggcgctgtaagtggcgcggcagcattaaaggtccgttaggaacacttccggtctggaagaccaaaacaaacaaacaaacaaacaaacaaaaaaccctctctggcttctccgttgagcagggttaatgatcgagctaaggggccagcacacaggaaggtgggaccgcccctaggaagatgcgtttgccttaagccatgctacagagataggcagactaattatcctttagtaaagtaatggacttttccttcccaggattctctgactcagtctgtagaggatcactgatatgtgacttcataagtaggccagaaaagcaccacgttttctttttcttatttctacctctgtcctaagaatgctttccccagcactttgggcttcatgctctctcaagacccactccctaccctgcggccatgtgctgatctctccacgttgacttttttcttctgcttttcatttttacagctgccgagatttaccgctggtctctctcagggctgggggtgggtggttgtgtggagcaagaggagtggggtcgggggttcttttaaactctaataatagtgtctaaaagcttccctttgagcctgctcttaaattcttttatcaacggaaactaagaaccgttagaagagatcccagtttccctggtatcatcaggtgactacaaggggattctcccaaagtttctggaaacgtaacttcttcacttcacttctaggaactaacctagataaatactcagaggcaagcaatcctcaccaggatgttcatgagcaagtatttcatggtggctaaaaacactgaaaaagaaatgcacgaacgaggactgtagagatagctcactaaggagagcatagatcagctgctcttccagagccgctagcagttcccaacagtctgtaactctagtttcagaggattccccccacccctgcccgccccccccccgcccacctccaggtgcgctatgcacacaagcattgcacagacatagaaacaggcaaagcacccataggcataaagtaaaatctatttaaaacattcagagatatttaaagtgctcagaattatggtacagccatagaacagagtcctaagtgatgtggagcaacattcatattacttacaaaaaacatgggttaaaaataaactaatgtagtacaatcttaaatcatacaaagagaaaaacctcacccatgttcagagaaaagatggggggttgggagggacattaaaatgagctatttgatgttgacaacttgattgattttcattttgttccttttgattgttggtatttcctaaatcatctacaataaatgtccttacttttagaatccaaacgattaaaagcaaaaagctggccgtggcacatcgcctgtagcgccagcacttgtgaggcagaggcagaaggatcaggagttcaaagccatcctcagctgcatagtgaagtcaacttagaaattttggttgtgtgagactatagttaacaacaacaatgcaataacaacaaaagtttcttgctatgtagccttggctggcctataattcctatgtagaccaggctggactcgaactcacagattggtctgcctctgccttctgtggtctgggattaaagatgtgtgccaccatgctgggttcaaatgtcttttgatctttctgtgcagcattatttatctttctagtgaaaaacttacatcttcctttggacacatatccttcactattttggattatagaatataggtgaagttgacctccgaccccaactcctttggaggatgggtatatgaaacacatctagccaatcactgctttctttttttgacatagggtcttcctatatctccctagctgacatgaaactcactacacagaccaggctggccttgaactcacagaaatctgcaagcctctgtctcccaagtactgccaccacatccagcttcaatggatgtcttttactgatgagcaagtgacctaagaccagtaagtgaagctctatcactgcttttatagaagaggctgatgggacagaagagctgtgctctgttggcagtaggatgctggaagcctagctgcttgagcacacaacaccaacagagcaacacaaagcaggtgtccatgaaggctggagatggagggggaaacctattcacatccaacacacacacacacacacacacacacacacacacacacacaccccactgtcgtcaccaccattcccattcaaatcctgacagctttgagttctcggatgcaggagaatgtgcaatgaaagcatccttgagccattcaggggtaagcaccccaaaacgctgctttctttttttgcttgtttaagtcagtttgcaatatattgctacaatttggcactcaacagcccctcactaaaataatgacaaaggacagaaaaacacataaaacacaatcacgacagcatctagggttatcacaaaatatagtacagaactggcccatccgttctccctgagagagaaaacagttccatctttgaaaatgttcagttggacagtgcttatctgtaacgtggttcattcccatagccctgcactaatagcaccttgcacatgtcttcttgcagtacaaagcaggcagggggtcctattgaaaatagctaacaaccctaaaagcacaggtcctggaggctctctgctgtgcgcagcgttcaacctgtaattgctggctctaaggagatgtgaggtgggtgtctcaggagtgggttggaacacggggccacttaggaatgtgcttagggggtggcttttaaaaacaaatcagtgcaataagatttcaatattctactagccaatatggcctgtggagtgtcctggctcaacatgagttctattctcagatgttattgcctcttatcagaacggctgttttccccatcacatggtgaattcctacaggcggggatcttgtcttattaatttgtgtgtaggccttggtgcctactggcaagtcctgggcattcaataatgtttgttgagtggtaaacgctgatgacaatttagaacagtataattccctactctgcttttattttttttccgaacagaaatttcttgcctggaattaaattgcaatatggtttccttttcaacacacttctggagatgctatcttctccaatgtcagttgattgaacaagaaaaaatgtaatttttcctctctcaggcataatgttaatcttttaactcatagtctcatagtagcttttttttttttcttaacacaagatggatttagaagtaagtcaagatcctagaagtttaggagtattgagtgctatcacttacgtctgtcaacccaagaggaaagtgtagctcgatgcccctctgcaactgcatgaccagaactggttacaaggatgctgggcagggctcccatctcagatcccacggatggtgagcacggggccacatctactaacagtgcctcgctcctccttgctggcctgaaggtgctccaaagtgcactttttaaggaagggacacattaagtggtgtcaggagaggcagttatatacctgggtcatttgatcattctctagtactgacacattttaagtgaatagtttggaaaatgaattttcttaagcctgtcaatatccgaaaggatggcttcaatattaaatgatgtcagaaagctgggaagtgatatattattcttgatgatactcaatgaggccatgtgtatttaaattgttattttccccagtgattatctcccttttatttttccattcttaaaaatattatttgtattatctatccatccatctatctatttatctactcatccatctatccatccatccacccacctatctacctaccttccaatttattacatttttgtggtggtgtgtgtctgccctagtttacacttttaagcattctgtagggctgtttaatccatttgtcaggatgccagtgagaccactcatttggaccgtctagggctcttgctaccaagctggaaggtgcctgagtcccaggacctatacagtggagagaaagaacacactcttcaaagttgttctctgacacccacatgaagcaccttcaataaacaaataataaataagtaaacaaattataaaaaaatatgtggggaaacgataccagaaaaaatattggtttgaggtctcacacttaaacactattaagtgtacaatcttgggacttaaagaacccccaaaacaaacgtttatcttctctacttcataacgttaactgtagacccggatactataaaaacccagattgttactgtccacccccggatagccacagtgactgtgaaatgtccctaggtagaaattgtcttaagagaattactttaggagttggagagttgggtcaattagttaagaacaagaaagttggcgcatgactttaatcccagcacttgggaggcagaggcaggcgaatttctgagttcgaggcagcctggtctacaaagtgagttccaggacagccagtaaccctgtctcgaaacaaacaaacaaacaaacaaagaaacaaacaaagaacaagagtagttgggctccaggcacccacaagatgatacacaagcatccgtaactctagtttcaggagatctgacatccttctgacctccctgggcactagtcacacacgtggcacacacacatattcatgtaagtaaaacactcatacacattaaaaaaaaactttaaaaggaaattattttgcttttatcttgctcctaaggcagaccacagtcggatcgagttggggaaagggggactcagaggggatggggcgggggggggggtgttgagggtgagattaaaaaaataattaacacaagagaaaaggcacccaaatgcaaataggttttaaaaaccgagtttcaaagctaactccttcacaggatgcctctgtagtccactggcccagtttccacaagtctcagcaggagcttggctgggtggaggtccacgctggccaatagaaatcagctgtattcttacaggtttcgcagcaggtggagaaactgagcatgaaaaattacttaaacgtgggctcggtcttttactgaggtcaggggtgccacgatccgtcctcctctaccaacaggaacagaaataaatgttggggacccagtttcctaatcccttcgcccggcaatcccgactagtaacacctccaccataagccgaatatattctccccgctccggagcttgctggagggaccggtggttgtcctttattgtctagggagcacctgccaggtggctggcccgtacctaatgcgctcgtggcgctgggcttcacaaagcgcgggcagcacctgcgtggccagccagccgcctggactgaaggaccaccgatggagggagagtgctaggaggaagaggatccagggtggagggcctgtgggggctcctggtcttagagggcacagcgcccccgggatcagcttattgcagcccgagagccccgggcactaggcagcgggagggagtgcgacccgggcgggagaagggaggggcgtggccacgagctgggaggagggctggaggaggggctgtcgcgcgccgctagtggctctgggggctcggctttgccgcgctcggtgcacttgggcgagagctgtagcagagagaggagctcagagtctagcgcagccaccgcgatgagaggcgctcgcggcgcctgggatctgctctgcgtcctgttggtcctgctccgtggccagacaggtgggaaagagcggcagacaagaggactgcaccctctgtgggcgcagcccgggtccgggaggggtgccacctgggtgcgtccggagtggtagctgttggcttttcccatgcctaccacctcgaaggtggtaggcggccgcgggactctggtggcccgcctcgctcacctgagctgagagacctcagcccgggtggtggagacccggggccgagggtcttctgggaacccaggcagcgagctgcaggctgcgggcgagtttggtgatgcttttgtgccgactgcgcgcgggtggcaggggcgggcggcctcgggcttcgcaccgagagcgtcctctctccgagcgaggtgcggccacggcttcctttttgttaaaagttgcgcgtgggtgaccgacgcctgggacaaccagcccacgggtcccggacacacgccgggcaaagttggagagccttttcttgcggccgctgcttccccacctcgggcgctctttgtgcacagtgctggggacgcaactgcagccgctctcatcgtgcgcggcgccacccgaggagacgaatctcgggcttgcttgcccccacccaactccgttttttgcacggggagcacgcggcgtgaggctctggggcgggaccccacgagcctgtaggtggcggctatggggacaacttgagccgggcgtgtggcgagcagccgctaggttgcagactttttccttttgtaaatctcgtgctaggggctcgcccctctctgcagccgcacggtgttcgttgctgccacgcgccagggagctgctgtagcctacgttggtcgccagcttctgggaatcagggactgcgtgcggggacgcagctgttcttgccacctcgtgcgcgctggaccaggaccgagtcagttctccccagctttggaaacctctggtttcagtgtatgcgacttgtaatcgcaggtggccgttttttttttttttttttttttttggaggggaatcccgagatccagaaaccctctcccacgtgatagccatactcagggctgcctggggaggctagggggtgggggagaaggggtaagctttctgcaaatagcatttgtttcttcaagctgttgggaaaatcttgttaccttttgcagggtaacttgggtctcaagatcttaaggttccggagctcctcagccctgcccctttttttgccaggtgtcgctggtgcactgcccgtgcaggttgcctgcttagtcctgaagccctgctccctcctaggtcattttcaaaacaaaaaccagaaacccttttaggttaccttgatgctataggctagagacaatctgcacgctgcaataaggcgtcagatggccagcatctctgtgacctgttttgagcccaccgctgactgcgttttccagatctcactccctagatgcttttgaaaggctgggagagggcttttttttgtgggggaagtcttgcatctggacctctgcgcgcacagaagaggggtcaccaagggtcacaaatgagtgttcagattcctaggcatatttgaccacttagctgaaaatgaccccagtgatcttttacgttttccaccttgttctgctttagagcaaggtggaacgccacaaagatcacagttcccttttgaaaacagaaacgagtcaatggtttgcattttccccctgattagtctgctctggccaataactttttggcagagggaatttgaaggtctgattcctggcacagggtgtgttgtaattcctttctctgtctctcccgtttcaggcctccttttcagccattctgcctccttggttttgtgcccttgggcggtcatttaaattgggagtgggtgtgtgttgggggggactttggtttccacggaaggtacttgaagacatttgcatcacgaaggatctgaggagttcacaatttcagaaagcagctttcttgtctaagggccttttggggtgtgtgtgtgtgtgtgtgtgtgtgtgtgtgtgtgttacggttttgctccaggctttgcaggaagcagttttgtgtttttgtttatgctgtaacctttggagggctaaccagtgcctgctctgcagtaacccctccttccggggcattcacagtgggtttacagctcaacaggatggtcctagaacagtgaatcagacctcctccccctccccacaccccctgttcctgcaggtgcaagtccctagtcattcatggtcattcacgcacctggcattctggcttacgatcctgctggagataatctgatagttccttgaagagatcctcaataattccacgtctcccccattctgggctctccccatccatccacacattcgtatgacgttataaatcatgtatgccatgcttttgcaacactcttcctactgtgctttaaatatcatatcatggatgtgttttgtgcatacttggggcttcacaatcagtaaatgtctgcaaggctccccatactgagggctttgcctgccatttctgtactcaggggcccaggaggttagaccactacagtgtctattcctattccaccattgttttccaattggagaataagtcacttgcccaaaacagccagtgaaggaaccggagctcagctccgtgtgcccaactgtgcatccattatacaactcaccagaatctgatgtaaagtaagacaaaagtatttaatgagtggttactataagtccatcctgttagaggttctgggggcccaggactgctgctttggctaagaggacttcaggtgacctgtcttagcacattttggtcttttcaatttgagtgggttaatttgctatgaggatccactactgtatagtttgggtaggggtgtttaagactatcatgaaggttttggtggggaaaagggaagataagttatctctaaaatgaagttgaaaaccattcccagcccccctcaaatagcaaggactacagcattatatatgtgtccctgataactggctggtgatctcagtggctgtttaccgtgtgaccaagtacggtgaaatacagtgaccactcaccgcagtcccagaggagactctcatcaggagtgttttgtgggcttccctgtcgctcactgaagttgcagatgttgttttggtcatgggtttttgccactgttgttgacagtccttagaagttactcttaggagtcttgagtcatttcctccaggatcctccagccgattaaagaaagggcgcgaggaaatgagccaaaccagccatgctgctgtccagagcaattcttagctggatctaggtggcaagagcacagtctcctttctccagaatgaattaggttcaagagttggcaggctggggtgtggaaagtgctgtagtcatgtgtggtaacttttccaaaagtgggattaaaagacatttatcgggatccaagtatgcaaaatttcatatgcagcttcaacagcaccagtcggtattttcacggggcaagcagagcttggaaggaagttgccagtgggagggagacattggaatggagggctaattaatccagcaaggctcttgttgaaaaaaaaaaaaaaaacgtaggagagagagagagagacctgggagcaagactggccccctggctcagattgctggctgtttggggggatggatgtgtgagccatcatccgacttcagtctctgagaaagaaagttgtttgaagtcagtagccagctcgtgggcatgcttgttcgactgactggatgcttctagaaaacacgggagacggtgcctactgagtgttccgacctgatcatttctccacctatcccatgcttccggttccctcttggctgtggcacgtgctcccgtgtacaacttgacggctaggcttccagccggtctacagaatgtaactaagtttgattactatttagggcaggtggcatcggagttaagagcttggtttctggaattaacatctgtgagttctaatcccagaatcccacttactgactatgtgatcagggaccagatgtttaaccctcctgagggtcgctttccacatctgtataagggggaagggggtcagggtgcagaagctggggggtgattgctggaggttctgtgtgaggtgcgcttagtgcgggagcccctcagaggaagtgggtggtctccagcgcacttggattttatcaccctctttcagcttagtctcttagagaaaaaaaccacaagtggtctaaaagaagattacacagcttgtactttttggcttttttgtttttggtattaagatgaaatttatgcctcgatgactaggtttttaaaaaaaaatctgctgatgcgtgctgccttccctacctctgtagttagcatccccttatttgacttcccaccaaagggcagagtttgggataaaagtttggggatcaagaatccaggcaaacccctcctctggtcccaggggccttttattagacataagtggcttcgcagacacagaattggaggggttttcctggactacttccccaggagtacaggaccctcacgaacttgcccttggctgggttctgacccacagcaggctggaaaccactgccttaacggctctgccactctctggaccaagctttaagcacaggcaaggctagcaaacactgtatatcagtttaacgaagtttatcaatcccctgctggggcctcacagggacagcagataggagggtgggagggacactgggggggtgcatatgcacgggggtgagggatggtagcatttttaaagagaggagcctcaagtctagttgggcggtattagcagagactaggggacagtagacacccgcacaggaggtcttactttgagataagacagcacgcacctcacagaaggggagcgaacatctgccgctgtgatagttggaagagttaagggagactgcgtgagatgtgcagatcttgaggaacatctagtctttggtctggtcagatggctgaaggttaaggaaatggaggataagaaggtagaaatgtggccccagattagattagcctcaaggaatggggagggagggcgtttacttagggttgagcttggtccagattgtgaagaaggccttgaaggccaggccaaggtggacttgactgggaacaaggtcaccagttggagccacctgctttgccttctgtccaattaagcgcagtgtggagcaaagccatgacctgctccaaaacgtgggctatctttatgataggaggtcaagatgaaggcagagggttttgttgctgttgttgttagttcgttttttgatttttaactaaaatgtgtttatcctaaaatcggcccctttaactttttggaatgcacagttcagggtagttagtacactcacattgttatgaaactagcattatcacttcatcttgcaaaactgaaatgttgtgcctattagagaactcctcacccaccccctggctggactgttctgtgtgtctggtctaagtagaccccacaatggttgccttcttctggttggcttattttagtaccgtagcgttttcgggggtcttctgtgggtgtaaggccagaatgtcatgtttatttgtagtttttgagacaggttttgccatgttgaccaaaccaacttaactcctaatagtcctgcctgtctctctagtgccaggaggacatgcatgtgccaccagacctggccagggttccctcctttcaaggctgaatagttttccttctgttgtatgtcggttgtttctctgtccacagctggtgggcacttgggctagctctaacttctggagactgtgattgatctttcaaggggatgctttggagggctattatagaacgggtgtctcacctcagaatgtgaggcgcgtgctcgtgggaaagagcacagaaggacaactcatttgtactcttagtggtaccggacaaaggatgggaagccctgtccgttagctgtactctggaaatgagagagaaagcccgagagacccaagggcatgcagtttgcacgacctgccatgcacctagaagggaaggagaactggggttcagctggtgtaggtccctgggagtagtggtggatggtggcgggtaggggtcacagggcaggctgagagtgagacgaggctctttgagggaaagagcaaggtactactgggccccactgggcttgggttacatttaactcagactcaatttcacagacacaaagcttgctgtcaatgaaattcttttttgggtcaggtccatgtaagaaataaatgaaaccccaaagtcccaagctctgactcaacgctattatgagaggatttgggggattatagagaactcttgtgttaagtgtgtcccggtcgtatgagagaaagagagatgtcacgaaaggaactgtccagtggaggcaggaataaaacgggtgttttgggcgtagacactgacacagagctgatgagcagtttgggaaagcaagtcctttgaaggcaatgtaaagaaattggatttattagtcctggcgatgataaggggaggaaggttggtttagtggccgttagtcttcaagtatttatagtctctgacaagaatggtactagttgccagtggcttcattgcttcagaagaaaactgggattttttttttttgaaaaaaaatttttttaattgtgggctgaaaaagactaccatggttggttaatctctgcaggagataggaggaaagccagatgtcattttgatatggtcctatcccgcctaattcagtttggcttgatgtcccttttatggtctgcaatccttgtaatgtagtttggaaatgggaaaatagctggctatgtttgtttcctcccttggttggctgtgtggtgtttctcagatgtagtgtgaagactcataggtctttggctccatggaaaacagccagtgaggaagccacagcctaaaaataggttattgatctgttgggggtcggtcatctaaccacggagcaaaccgtgcctcgaagtgagtggagtgccaagataagggaacggaggaagtctgaggtctagagagatccatcctcacctatgggtggaggtgtgctgttggggtctcccttgtggtggaatcaccctgcactgtggtcaggcagaaaaacgctcagctggatgcaggatgcttggcagggatgtaggacctgaatgcaggatgctcagccgtgatgtaggattcaggatgcagaaccacccttcttttctgtttttttgttttgttttgttttgttttggttttggttttggtttttggtttttcgagacagggtttctctgtgtagccctggctgtcctggaactcactttgtagaccaggctggcctcgaactcagaaatccacctgcctctgccttccaagtgctgggattaaaggcgtgcgctaccaccacccggctctccttttctgttgatggcttggggtgccttgctccttctgtggcttgcccatgactcttcgtcccatcctcccttccctttgggcattccacagtcatgattcaaagtcacagagtagatcaaccagggatctggagtaaggtgggagagaccccagtcctgcttgttcactagcttctggtcaataacattgtgtaagaatgaatgatgatatgtgtaaggtgggggggtctaaggggcatcagggatgggcagacccactggaatgccaggtgtcggcacatttagttgacagtctggtcatatgccttacagctgggttagaaggcaaggcttcactccttgagtagaacggtgggttcagaggcattctggggacctgaaataaatcttgaagagggggcctgccattcagtcagtgtctgaacagcaaaagtgttgagtgagccaagaggctcccgtagaaagacactctggaagatgagggtgcaaggtgatagggctaagctttagggtacctggatttttcagactccttcagagatggaagcgcttcccacaatgccatatgcgatgctttttttttttttttttttttttggtaaatgaaatctggtcgagtaattgcctattcagagaaataacttttaaaaaatggaaaagtatgcatcgtgcttgtgcgtgtggttatgtctgtgtatgtatcatgcaaatccagttcgggtttgaactgagttgtttttgagtccgtggctaattacacggctcctcgttgctactcccagccatgattacagatatctgaacacctgacagtggcaaagagctgacttcccatccttcgattattgacaaaactctagtgagatgagaaatagggtatgcaacaggttttaaaagaagcctttttaaaattttgaattcttttgaacttgcaaaccaaaggatgggcaagaccttttgtaaggtctttgctggggctggcatgcaccaggtcttacctgattccatggccactcctgtcttaggctcttaggtatactgcgggggcctctctctaaaacagtattggggagaatggtaggtcataggcagtccatatatccaggaatgagcgcatttctgggtgtatggactgtactttgtttggagtttactggcagagatgggcagaatactgtcacctaggagaagatgtaggtccttgacccttacctgggaataatacctcacccttgacctagagggtcactaggaaatgaaacagaggggatcctcttgtctctaccttcgcctgtgtcttcagtctgcgaggcagaacatccagcttgcctcagatgacttgaggtgtttcaaaggcttaggagggggcactcccaaacgttctgacactacctgtaatttgtatataatagtctacccttaagtggagagattgctctgtgcctgagaacaaatgacagggtggccacagtggacttccgcagcagtgactgtgtctctattgggtggaagaattcaaagaatggaatcccagtgcagatttggggagagaggatgtactgtggatattagaagtgttcaggctagtggctgtcatcctacaaggctagtgtatgcttaaaagggagaatagaattatattttaaaagccaagactcttctctgagaaactagacaggtattttaaaggtaattgttaggtggtagaattattctaaatgtgtttccacttccatcctaattgtcatggtgtggatatcctccattgttgttggaaagatttttttttttatttaataagtgggtgatatttgatcgactgataaataccatgtggactggtttttgttttttgtttttgtttttaatctacaaattctcactaagtagctcaggctagcctggtacacattatgctgcccgggtgggcctcagtcccctgatctttctgttcctcgtccccagtgctgacactgtaagcccatgccgcacaaccagctttggttttcttaatatgaaggcattagagtagctagtagcaaatttgtccttgaatggttttgtatttattttcatataatatgtatgcttaatgcagggaaatagtagggatgttctgggctgtaccagaaccagaaagcatcactttgatagaagaggacccaccgccccagtttttaaaataagcttagcatatgtagaaggggttgtgagtttcttcttcagatctgaatgtgttgcctaatttacatttccagcatttttcaagggacattaacttaaaattatcatccagtttagaaccgctgtctccataaggggctgggagagcgagtgccagcgggcagggagcatctcctgacacaggaagtgacaagggacagcagcagtgtcagatgctggccagcacagcgccttctgtggtgctgctcttgaacagagccggtatgagtagctattaaacttgggtggggggatagcagtgaataacccagacctggggcttatgttctagtgaattctttcttctcaagagcccagaaaaaatccgggcatggtggcgcacgcctttaatcccagcactttggaggcaggcggatttctgagttcgaggccagcctggtctacaaagtgagttctaggacagccagggctatacaggaaaaccctgtctcgaacccccccccccccccccccgaaaaagagcccaaaaaagcagggagggaaagagagtaaagaaagaaatgtgaaggctcgtcttacaaaaatctgctgaatttagacttaatgaccagtggtgtctgtggttagtgaagggacaagcagaggaaggcctgagagggcaaactaagagggcagggacaggagctggacttgcaaggatggagtggaggtcagtgggaattttggggtgatttggggccactgccttcccaggaaggactgaaccaggacaaatcagattgtcatttgagtctttgattgtcatataggccagggaccaagtcagaattgaaacactggggcattccccaccttcaggattttggggcatctttagagtgcgccagggagtcttgtcagtctgaagatttggaaccctttgttctagaacataccagaatgttcttcttccatagctgagggggatgtttcagatgttcttttttttttttaatctttatttaatgtatatgaattttatatctgcatgcatacctacatgccagaatcccattacagatggttgtgagccaccatgtggttgccaggaattgaactcaggacctctggaagaacaaccagtgcccttaaccgctgagccgactctccatcctgcttcagacattccttggatctataggagggtggggagaggggctcattctataccaaaattaaaacatcctttcattttttttttttttatgaagaagctgggcatgaccatattaaagcctacaagactgtacttagacaaagtgcagcttaagtcccaagcctgttaccatatctggtcaggatgaactaccagcatggagatgtcacagaatgggacatagtgaggtttatttatttattttttgcatctcagcctttagaatggcctttcggatacccagaacgcgttaagctctgagctcttcagttttaaaactgggatttactgaactgaggattgagacttggggaatcaggactagaagtttgatccgtctgtccttggatggtggacatctggtccttgaggaggatcatggtcccctcttggctggaactgggaaggacatccctaagttggttgactggcctagttgaaggttgtagggaggaagcctgaggtggttgccctgtggcttcaagcactgttgatgaattcactggcattggatatggatcgcacatgcggggttttactggcctacagaatcatttgtgtgaggtccttgctccgtttgatagcttgttctgattcagggtagtcttcattgttgggacctactggttgggttgagacttgcagggcctgtgtttaactagacctctgttcttggctttctatagctgtgatatgcaccatgaccaaagcaacttggggaggaaagggtttatttatctcactctacaggttaacagtctatcatctagggaagtcaaggcaggaacctggagacaggacctaaggcagaactgtggaggggagctgctacctggctttctcccgcctggcttgcctggcctgctttcttacacagctaaatggcaccactcatagtggccgggggccctcctacagcaatcagtaagtagaaaaaaagcattacagacatagccgcaggctagttggatcaagacaattcctctgtctaggtttcctctccccaggtcccctaggttgggtcaagttgataataaacacttgtcagtataaccgtatttaattaaattaactatcacttgactgagaaagagtaaacccattttgaaaaacatcaggtagcctctgatctctattgttccctgacccgtttggaaactttttggcagccatttttatttcaacatggaggaacgttgtctttgttttatgtagcccaggctggcttcaaactcagtatgtagctgaggatacttcaaactcctggtcttcctgccctcccctctcaaaagccgatactacaggtgtgtgtcaccacatttggccagcgtggtttttttcacagtggcatttcaaggacaacatagtttgagctctcagatccacgaggccagtcgtggagcctcgccccttcccagttcaccatctcattcctatgaagcttgatttccatctagaaatattttcagtatgtagctctaaaataccaatttcctttcgtaaacagtcacggtgtcacatctgatcactgcactgacaccccaacctcccaccccacccgagccttccaacccatgggggagggacactctattcaagcaggaaaacaaatcacacggctctaccctgctgtggaatattcagtactcacctttcccctggtgaacataagtactataaaaatgtagacaagttttacacatgtttggctgacgctgagagcaagcctcggtttggaggtctccccgacgttgcttcttggtgggcttcattctgccttcgctcctgtggaagaggctgcgtgtttgctgattgcattcctctaacaattagcgtgcttcagtgtctgcatttcctgtaagctgtcgattgagtggtggatcgtgatcaccttttgtttttaaaggtagacattgtgttctctctagtggacctttgagtatttgcggtgacaatgatgttcttctaataggtgcctttagacctttagaagcactcctgtctgcctcttcccagagctgttttctattggttccctaccatgagtgacatttaaatcggccactagtgtgctctctgttccttttgtgccaggagctgggggtttgaaggaagaagtatccacccccccacctccccacccccccagctaattatctgtttgcagaacttgctctctcaggtttccaagacagggactcacctattctccactatcactttcttttagtgccaaaagtcagcctgcatccagtgttgggggcgatgactggtcttgcgcctctttctgaagggatgctctgggaggcatctcaatgatgtactcacagcagcttgtctgtagtctttgctggaaaggtcacatgtctcatagaaagcctcagccatcctgtccttgctcaggtatctttgtatctttatttttttcctgtattgtctttttgccatcaagtgctgtcaaagtcagatacactaatatggtttttctctgcctctgatttggccacacatttacctagatacccacaggaatgctttctttactcttcccaggacagtcacttttgagagttcatcttttcagagaagagaccacagccttgacataaaatcccaagcatggctttcattttccctcactaaagagttgttgaagatcagaagtttttattattctccaatggcttcagagccaacagcagcatatgttggactttctttgtcttctagacctaccatgttcttggaaatccttttagttccattatcatttatctagagtcacatttttcctcacactctgatcttctggcctcagcctcgcaaattctgggattacagcaagggccattgcactctgagatacattcttgtatttgttcttgtgctctgtactttggtggtttgggttggttttgcttcctgagacagggtcttaccaagtatccctacctggcctggaactcactatgcagaccagaactcacagagatccagctgcctgtacctgctgagtgctaggtttaaagccgtgatccactatgccagtctttgattttttttttttgaagtaggtttcatgtatgccagcctggcttcgaacccacgatgtaattgtgggtggctttcaactctttattttccttcctggatactggaagttcaagggtgtgccaccagctgaaagactttactttctacattagagatgtcccccagctttctcatttttcttaacaactctttggaatgcagtagcagatcttttggggagggcaggtcaatactgtctcgtaagtatggcagaccggagctctctgctcttgttttaactaagcgataatcttactctttcggcctctcctcagtccctctctccagaccttccttctccttgcccctcttctgtccttgaatcccatccccagctctgtctatctccctttgtggggcttcatctggggttgtgacttcttagggatcaacctctctcattccagaatactccagcacactgaatacacatgcgtcaccatctcctctgcacttccggtctgtgtggttctcctcagaataaactgtgtgacaagctgccatgtttgctgctggtagtttgtcctgaccctcttggaggcacacagtagatcacacagggctgtgttgtcatattttgggctcccagcactcaatcacattgggttgtgatgtcagaccctgggcgccccacacatagaggcactcagtgctgtgatgtcatactctgggctctctgctcattggttcacacagtctgtgtgatgtcatactctgggctctcggctcattggcttacacgggctgtgatgtcatactctgggcggcgcccacatgcacgctgaatcatatgcagatcaatgagtcatctgaagtatcgaattctgcctgtttgctcagttttgagactgaggttcatcagttacattgccggtaactcctgaagccagaacagcccccaaactctttaaagttaccttttggttttgttaatttatggctttgccaagcttggaccaaagtgaaatatgaaatgactggctgacgcctttgaaaacacaatcttccttaaaaatataatttaaaaacgtttgtcgccggggacaagagttgtgtttgtaaacgatctgaaaacagatcagtgtgaaagcaaatacttcctgcccctctgacatcagctgtctgcgctattgtttacaacagagcattatggtggaagtcagtcaggagagcaggaagctcgttagggagttgtctttgaggaacacttggtaagaaccagtgttctttgccattggctgtctggtaaaggattcttgagttctgaaggagacagtctttttttttttttttttttttttagttttgaaagtgttaacaccgcgtctacatggttaataccatataataaaggtatcactgctgcctaattgggtacatttccactccctcctgccccccgtggaaaagtttgcatatttctaattataatcatttgaaaaaaaatgttaccaggggttgacatattcatttaaatttccagaaatctcaaattttcttcgtccgatttgagtctcttccacttggtcttgatttcaaatatgctaacaggttcctagccaggcgtggaggtgagcaccttacatgcctttaaccccagcacctgggaggtagagacagggggatccctgagctagaggccaacctggtctacataggaatgccaggaccacataggctctgtcccaaacaaacaaacaaacaaacaagcttacaattctagaatgggcttcctttccctgtcgtcagggatggtcatattctaaagctatgagaaagaactagagttttctcagtggacatactggatgggttgttgttgtttattgttgtatttctcagttctagaaaacagttcagtttcaggcatttttctcttgttccttacaggcactcagatcagtttccacaagggagaattccttgaaaagggatgcaggcttaatgtgtggttctgagtaaatatcaccccagaaaaattaagagaaaagtgaacactcattaagcaaattgaccaccagcaagcgttctgatgagtgttgaatcaaatctgaatgcacccatcttgtccattagtgtgcttttacaccagggcaattgtttggctctaattattttctattttgcgtgtttgaatgtagaatggctacagaattaactgttgccgggcaattatctgattagcaattgaggaaaacggtcactggtatccgaccattcaccaagaaaagctgctttggtgtagggctctgaggggaccctgaaacagactgttgggagccagacgtttattggaagggttattcatgctacatacatacagacagacaagagcatggcgagagctcacaggagagttcaggccccagtgtcgcagacagcaagatagggttctgaaagagagagcagcctggtcccttttcagagttctctgagggaagctgcagcaaggctctgcctccctcgaaggcaaagtttattgctatttgagggaggcaaccctcctgttcaaccatgtaaggggacccctgcataaggggacccccgtgcttcatattgcaccagagtgggctaggaggcccccagcccagggggagcatggcaagatgggggagtgccaggccctccgagtcactgagccagattgaggtctgatgcgctgcagaagttgtctttgccaccagtgtcactgttctggagtcctgtagctgtgactggtgcattctgtaacatttcccacttgaaagctcggggatttgagaaatctgtgcgcgcacgactggctgccaaggcttgtcagggggacccagcgcgaggccgatttctaggtgtaaaagccaggcagatttgctcactcaagaaaatctgtctctgcaggttttccctgagttccaagatagagatcctggtacggcttcttgctacactaatggctggtgtcctgagtctcaggggttttgggttttgtttttgactgactactgtgtaggtcagggggctaccataccagttcttcaacggtcaggaccagccacaccaggcacgcctgggaccaggtaaagacgccagcccgctctctcccccaaacctgctgcactggaaataatagcagcatgggtttccagtccttgatttaataaggccgtcagaggaagctgctgcaggctgaaggctgagaacccccagctatgagggggtcagaatgcctgggcttcatcccagcacaaggcccagggcctcttaagtcccccgatgctcagacagggtgcagttctcggttctccttctgacaacctaagaatggtagacgggagtttcagttagtccagacaggaaagcagacagctacagtactgaggggctgtgcagaggtttccagaagcatgcgtgtgcgatgagggaggcgaagccaaggccttgctgcaggtggtattttcaaaggataaatagggttagtacctaccttgattccaaccttccagagactacacacccagtgttgctcacctatgtgggggtatgaagatagccccttgcggggcctggttcctactgccacacacacttgcctcccgctctgcacttacagctgccctggcttccgtaaagatatgtggcttcctggcctctgcttactacctggggtacagagcacggtgcttcccctgacactccttggtgcatgccagtttctagctcctgtgtctcccttcacgatcctcgtccacctctagggtgggtcaggtcagctcccttgtgcttctcggctcttcacacttctcacacagtaattatagaactgtgtaattgttggtttatggcccagccaggagctaaatataaacagcgcgggtgggcatggggaggtcttgtacactgttgctctaagggcccagcacacagccagacttcagtgtggtatttttgagtaatggggatggaggtaaggtctagcctttacccttatttcaagaacacctgagcttaaggctacatgatagcgctctgattttgctgagttttaggaagggctaactggaagctggtgctgctgcagtagcgtcttcttgcttgcttgcttctaagctcagttctggctctgggatgcaggagagagcaggttctcgagggctagacttccaggagagatggcagaaggagagaacctgtacttggagatcttggagatgctgtgatgcagggtcagaggacagcagcctgcactggaaagatcctgggaaggttgtcatggaaaggagtgctgccttactctcccagggcttctgagaacggctacccactttgtgcccagaagcagtgatgaggtatcctgttcttcccacacagtaacagaagagagatgcagggactagagagatggcttaatggttaaaagtgctttttgcttttccagaggagtcagttaggttccagcaaccagcaactcacaaccaccttagcttcaggggcccaatgccctcttctggcttctgagggtgtctgcacacagacaacagacatatggacagagacacagacatacatacacacatagacacacacacacacacacacacacacactgaggtagacagacagacagacacacacacactgaggtagacagacagacagacacagacacacaccaataaaaatgtaaagaaagaagcaccattggcctgttaactggttttgctctggctaaagctttgtatttactttctagaaggtgacagcttggggactccatctcagcagcagcagctgcagccgtagatgggggcatttgtttaaaataagactcagtctcattggtctttatgagaggcattagcagtaacattcacgcatgtcacttataaaaacagcgtagccttaagaaacttttttttttttgaagatggtatttcaagacccagggagttaaaatgctcacatgattatggaaatcttgctttgagtaaagaaactagtaatctattgactatttgaaattattgggtgtctgtacacatactctgtttttccaatgctaaggtttgaaccaggggtcttgcttgtgcctgctctctaagcactctgccactgagctacacaccgcatgccccgcaacatactttcttatagctgttgtaaaattctgctttggttcaataaattagtagaacagtcaatttaggaacaaaagctgtaagattttaggaggcatgtacggagctgactagggcggttggtgccctcgagggatgtgatttttgtttcccatgtctgtagttttaacgtcttcatcaagtaccattttcctcctaacttaagggaattctgtatcccctttccctccccctgccttcctgcttcctccgggctccaggagtgttttctttggtactttctctggtacttcaggtgccactaggtccttatcttctcgctgtgacatcaccagcagcattacctaggttctgaagggaattagagatggtgcgaggatcccaaacaactctactcatggctttccgtcatctcctctgaggcctggggaggccagttggcttccccaaagcttcactgctttggctccggatccctgtgtggctctgaaacctacactgagtgtccctgtattcctgtgctgtcacctgcttacccaagctcagggcagcacctggcacttataccctctggtcaggctttaataagtgctgtataaagttacaaagttggacaactccccacccctacccttctaccaccaccacccactcccaagaacttcaggccacaactgctaactttttttgatccttgctttttttctggggatgagcgcatgcaggccacccaggctgtgcctctgcccttgaccagagactattttcctgccttctgagaaggccttccaccaagaagggtgcttggagttcctcagggagcccctttaagccctgcgagttcgacacaggcttgctgtcttcctagaaatctccagcgcctacacaacagattctcctctttggcagggtaacgggaaggcgagtagagatggctcagtagggattcgccccccggcctgttacccagggctgcaatgcactgtcgccccggaatagaagtcctgtggtagaacagttaacaactgcctctgccctttgctccagcaactgcctgagatacaatttctagtgggaaacatgactgctttagtccccacttctgtaagatgacatcttgacagtagaaacagaaggaaattttcctgtttgcaagttgtgtgggaaaagggaaggtacaatttcccttacttgacaggttcctttaaaagtaggttttagagtatatttctgagtaaaatgtattgacttgcccattatgaggaaaattagcatattcatctagtttagtcgagtataattaatgcgcagcatctctcaaagctagaaagtcagagaggcccctctccagagtgttgatcgcagttgaaaatgcctcagggaaaccatccaaatgtcaggatggggagaaaaaaagagaagtgtggcccaagcgcacactggagcattagtcagccttgaatagggatgcggttctggcacgctacagcataaacggggctctgtgactctccgagggaaacacggaagtcacccaaggactaatagtgcatgcgaactcttattccaggcacctaggaggacagattcatagagatagaaagtggattgggaagactcagggagaaaggagcatagagttaccagctggcgggtggggaagacaggaaacgagtggaagtgacctgtgacggtcactgcccagcctcgtgaatgtccttactattacctctcagctgcatacttacaaatggttaaagtggtaattaaatattacgcatattttatctaatacatttctgaaatgccccgattgccatatgcgtgtacatatgtatgcgtctgtgtgcatacacacacatggatgtgtgaaaatgttaatcatttcttacctaatgtctcattcgacaccattagaacttgatgctggaggactggaaacagagcctaaggtcccccaagctttatttgcagtcatttattttattttattttattttatattttggcttgccaccattactaccttacattctctccggggcctgcaggattggcatgtggcagaattctaagactcctgagagaacatggcaagccgagagggcaccaccttatccacacgcacaggccacgcctctccctcctgacctggatctgtggccaactccttcgtagatccctgcaggccccgtgtgcgccgtgcagccagggaggcagctgggagtctggacatgctgaactgtctgtggcctggagtctgactgtcctgctgtagcgcgtggctgagctgacccttgcctcccttcttgacctgtctcctgctttgttctcggtgttctggaagttaaggaagtcggtgttgaaagatgtggacagacaacccccgacaccatccccagccaatggccgcacagatgatggccgggttcttgttctggtgtttattagagagaccactccttagtgctgcttatctggttcacattacagtaagtgctttccagaaatcaaaacacggaaacctacatatttacagcaggggctgtgctgggcgatggggaaaaacccagtggaaatgagaaagttcctccgctgagatctgcgatggagccacatagactgtccatgtcaaacccagggcttgcctcattcccccaaggccaggttcataatggctggggagagcttcctctctttgggcgtctttgagccagggtcagggggggcgtcctgtttcctcagacactcatagttggatttttcttaggataagcaagcagggactcttttaaaggaaatatttttcttgggaaaacctgaacttctagaaaccgtatctggaagaagttctgaaaaacaattagttaagaagactcctcctcattggtgtgtgttggaccgggaatcactgacctggtggcacctggttatgccacagggatttgagtaccttccatgtccagccccaaatctttaaggagaaccctttatctttaccccttgtgttctaagtatttgattctgggtcccgggtttttcaaaataatgtttatattatatcctaattatctttaagttttatctatttttactttgtgtgtatgtgtaagggcatgtgtatgccatgacacacgtgcatggaggtcacacgctaactttaaggagtcggttctttccttctctcttgtggatcccagaattgaattcagatcaggctttccagaaaatgccttatctgctgggcagacttgctagctctggaattttaagcagacaccctagagccatcacctaagtttcctgtagtggtagaagaagcttagagacaggtctcagctagcccagctgggccaggagttgatggatgtcagggatgaccttgaactcctgagactcctggaggggctgggattgcaggcccaggggccccaccgcagtataggaagtgctccggagttgaaggcagggcctttggtggctgagatggactctaaccactgggctacaccatcagcaggtcctggactggcatagctcttgagacttttggactttaattcttgggtgaagagacttctgtcagtagaattcagaccgtctgtgtatctgtctccacctggggcagcccttcctttgctagttgcttgaaaacaaacgcaggtcgttatgggttttatttaaaatgtacaactattaaatcatagtcgaaccaagcatttcacattttcaccctgtccctcaatcagcgcgtagctctgcttgaaagctggtgtgtaaagccctcagagtccttttcagtcccttagcagcggcagaacatgacatctctttgatcttgggtatgcttttcaaaaggcacaggcagcctggggcgtcttctttgccaccagatagatagtgtttaagattttggggtggggttagagcacaccccactaagatgagagctcagagaattggagaatcgagttgttcttaacagcagagtgagattggcgaggggttggaggtggggtggggtacaaaagccaggagctgggtgcagctgggcccgcagctggtggccctccagagacagagatgggagatcacctcagctcaggcattggagaccagcctgaacaacatagcaaaattttactgataagattaaaacagtagtaacaatcaaacccccaaagctgagaagcagaagcgcaggctacaggaaaggtgatctggggaggtgattttctagccccgggcctgcccagtggttagggcagaaactgccgaagcgaggcagaggcaggaagggttcacatgcagcagagcagttgggtaggaggggatggagaaggtagcctcccacccctggcttgcttgggcacccctgtttgcttggggcttccttctctggcgctggaggactacgcttcttccaagacccctgagattgccctcaccccagcctcttaggcaatgcgactgcaggctgcccctgttacttttgtgaaacctggccaaatccgccaggcctcactccaccggtatttctccctttggactcctctctcggtcggtcccagcggagagcctccgtcaactttgtgctacagctaaattttcctcaaaggactcgttccaaaatatgagcggcttaatgtgtgtcttaccctaacttgggtgtccttgagccagtatgggctcctgtaccactaggccacatgcagcattccccgagctacttctagcttgtcggagctcttcaatccccttcctccttcagggaccttgggccttgccgtctatagctctggtctttgtaatctaccccaagccccaaccccagtaatttcacagacactccaggtaccaccactttggactagacggatccaaatatccctaagtctatttttcttctaatcacttgacatccacaatgttccatcacagaggcctctgacacgagtgtcatcttgtctcctcactgtccagggccagcttgcctggagtccccttaagcacttagaaatacggtcctccagccatcttgctcttccttgtttctcaactgactttgttctagtctcattttctcagggcagactccctcctgtggaaaagcaggtcctgggctggtctccccaccctaactaacccccagctcgctgctctttttctggggggggggggggttgtacttgcgctctctctcatcccacccgcagcctggccgtacactttgttcaacttgaactctgaactcccggaacccctttctgatctctgctgacactccatcccttttcactttaatcagttcactttaatgcagatattccttacgttacaatagtaggaatgttgatttaaaaaaaaaacttagaagttataaatgtatttaattaatacactcaatctgtcagatatcctagcttagctgagcctgagactcacaactgttagcccacagttgggccaactaagttgagcccttgttaaaaaaaaaaaaaaaaaaaggcacccaaacactccatgcccagtttccagtgaggatggcttcttaatgttcctaaggtgaagagccaaggatggatagcccttttgccagcactggcttcattggtctctggctgggagcgtccctcctccagctgggtgtgtggtaggcgggtgtgctcttagccctcagcactccctaagttaaatagcggggctgagttcctgctggtcctcggagacccagctcacacctgttgtagcaattgcaggcatgcccactttattaggtttactttctcctcctctcttctgccagctagctcgcttttaagccaatcttgacagatacctctctgcaggagctgcttttaaaaacaccctgcaaagataccttgtcctttgttttgggagttttgaaactgacttaagcggctgcattgctagtgcttgaaacatcaagttggctcataaatccaacagactccgcaccaactcaaaacgtatcacgtctctgaacgctagacagaaatttgcattagacaaggggttgtttcctggggcctgtggcctaggagacaggagagtttgtttattgtctacacctctatgaccttggtgatgaattccgtcagtactgttatctttgtactactgatttaaatatgacccagaaagctctttggagacctcagagtcttgtgtctgtgtgtgagtgtggtcacaactgaccaggaagatactttgaaaggcaggtagtcttagtagtttgagcataaagtgatttgatttatttcaaagcacatgctaccctaagtacatttgattttttttttccttttagtgtacaatatataaaacaacaggaaaggatgacggtctttgacactacatgtagcaaacatacccgctgtggtgtggtgtaggatggtgttctcggttactggcccatctcttagacacaccttctcattccctacgcctacttgtttattgggcaccatctgcattcctggactctaagaaacttgactctacagagactggtgctgactgtcctggaggctgagcactcactgcaggcccagcccctcataggcgtagcttaccctgattccctgacaccatctactttgaagatgctctcttcctcaaacatctgtgtagattccccagacttgggtatcatggttgcttcccctggaacctttcttggtccttctgggaagcccaatagctgctcccctctttgatggaacacattgctccttccctccccctctctctatttcattcatgttatctgtcttctgtgcagggctctgggttgcccaccagcaccgtcttttagttatgtgatagattcttgctgaaggcattggcttctgcagagcagcgtgcagacagacagtgacctctgtgacctggcttcccttagtgtgcgggtgacccagagtctccctatccctaggattggcttgagggcccatgtgacattcactgagcccttccttactgtccccagcttagttctattcccagtatcctctttgtaaggactccagggtgttgtaggtaattaccaggattctttcatcttggttcttacccactctattcctatggggctaggctgtaaaagtctgtcaaaaacaaagtgacactccggccgtcagactttctttttactataaatgtaactaagcacagaaactgaggaacatttgagctacaaggtctagaggctctgtcttctcctggcctacttctccaaaactagacttcgtaggtttccttcccaaccatttctttatctggttccttatatttacctacaaagaaggaaagactttaaaatgacttcctcacttttaaccccatctagaactccaggcgttgcagggaattttttttttcttttttttttttttttttttttttttttttttttaaaagaataaggccctgggagtcaaagctaacaaacaggagccaaccactactgcaggggctggccagagactggctcagccagccaggaggattcctggccgggcctctgttttgttaattgctacattgtaacaaacacaggtattacctttgttttgttttgtttataaagaaaaaaaatgccacacaacatactgtatcttcagtagggagccaaattcttttctttgagatttggttgcttttgagtttcagaggagttctcagaggtgttctgagcagccgtccttgctgtgcatgctccgtacaccaaatgcaagctctgtggattgtaattcggtttcctcccaagaagttctcctcaggcgtgctgaatacaggctgcaaattggaggccccctctaatcttaatctaatctaaacgtttcacccacattaaatccaacagtagatctcccccagtgaggcaccccttacgtgtgtgtgtgtgtgtgtgtgtgtgtgtgtgtacagcaaatacttcatacatgtaactgatccataatatactatctgtatgcatcctggacaggtttgggaataaagtcagatgactcaggcagtgtgagacttagttggtcaccctggggcacaagtgtcttgggctcccacttctgtggagtcagcatgagcttctagatccttcagctcagagttaaaaggcctctttcaacacttcagcactggctgcttcggacagtgaggaattcagggtgttttgtttttgtttttgtttttgttttgttttgtttgttgtttttccaattgtttttaatgacacaatttaagccacccctggagccacacctagttttagctaagagtgagccagggccagctggagaaggctaatgtggttctggtccacgatttttgtttgttttattttaacttcaggtttttttgtttgtttgtatgtttgtttgttggcttctttgaaacagatttttttttcttctgtatagccctggctagcctcacactctgagatctgtctgcctttgcctcctgagcactgggataaaagacatgcaccaccacgcctggcttaattttagtttagttttttttttttttttcttttttctttttaaatgatggtgcaatatactcaacatggaatgtgctatcctaaagtatctagttcagcagcgatgagaggtacacagtgtgggacagtcgccatcccttctcgtttccagggcctctttctcctcctgccagagtggccagtgataaattgagctgctctccccgcccctccagcctctagtaactgccactctgctttctgattctgattttcccaaacccaggtatttcatgtaaggaaggacatgtatatttatttatctgtgtcttttcgtgttgtagctcaacagtacttcattctttttttatggcttactaatatttcattgcattaacacccaacatcgtgtgcttcatctgtctgtagacagttgtgctctttctgcctctgggctccatcgaataatacaaaaatgctgtcggggttgtgtctgagtccctgccttgagctgaccggattttggataaattttacacagtttctagggaagccactgtgggtgcggaggatgccttgatgtttctttggcaccagtgcctaaagcttttcatagttgtctacttatgtgccccctctgtcaagggactgtcattgtttgtttgcttgtttgttgttttggtgagcaagagcccgcactcagcaaggacttgtaagttcttcctggagagcagctgtgtttgccatctgaccctcctttttcgttagattccaatctctagggtgctgagttttatcatatgtcgttttcttttggttcattaattaacatgttcagggacaagagaagaaatctcactactgtccatagccacacatgatgaaggatgcgtgttcattcagtggtacaaaaatcttggtgggagacaaaaggcagcccaataaactcatggctgaaagcttgcggaattgaatatcaggtatgcacatcaaaatgtgtgcttcaaagtggcctcatggctcagctgaaatactgagattgtgtgggtgggggttgggggtggggaggtgggggatggggtgtgcatgggcacacacagccctgtgcacagaggtcagaggagggcctcaggtgtttcctttgctgtttatcgcccttctcccctgagaagtgatcttttactgacctggggcctgctctctgggctaggccagccagccagagctcgagggcctgggacctgcctgtctctgcttgccagcctggagttatagcggcacactttcgtgcctggctttttctgtggtaatactaaggacacaagtttaggatctcaggcttgtcccacaagccctcccatccctgagcatcccaataatcctggagtatctttctgggggatagtcctttaatgtgaatctctatttttctaaaccggaatctctgtcgtcgtcttcatcatcatttgggaggctgtgatataacaacactgaagatagtttagaaacaaaacaataaacataaccttcgcttgtatcccaataaaactttttattttatagtgtgtatgaagattgagcccgtaagtcattgttgaaaataaaaaccctagatatatccagcggcaattatttctaaatttcaccaagtgacgcaaggcattgactaaattttttggattaagttttctaagaatattctgtattcactgtagctagttagtctgtcctcccatcggtccgtctctgacgttcggcgagggtttacatcattggcatataaggaactgaaacaatagcacccccactgttacttttaaatgcttccttcctaggcctctggaaacagtcctctttgctcctatgtccataaataggccgggccattgagatgtggagcctggtagcccgggctggctcttgtcatcttacagcatctcctggattactggtgcctagtgacccttgatggctatggtccctgtcattattgtcctgggtgacagcttttgctcgagagcaacccttcgcttgaccccatgggactgtggttgcagtccaggtgatctgttggttggatttaaacagagattgcagctggtcacgcatgcataagcctgcagaagacagtttgagggttcctttacagtgccttccgtctgtccctgtcttcgggccctcttcctcctgtctgtatgcttttcgagctccccccgcatgcctggctttgtggccatctttgcttgtatatctttttcctccatctcacactggaaggagagctctgcacttgatactgcctgccctggaacaaggagacattcccagaccagtgaaattgtgaccttgacatccaggagtgatgtgtgtgtgtgtgtgtgtgtgtgtgtatgtgtgtgtgtggagagagggaaggaggtaggactgaaacagcactcacctgagggttcatttttagccacatggagttcacggatgtagacacatcttttatggtgcacaccaccgcaaatgtgtccgatatnnnnnnnnnnnnnnnnnnnnnnnnnnnnnnnnnnnnnnnnnnnnnnnnnnnnnnnnnnnnnnnnnnnnnnnnnnnnnnnnnnnnnnnnnnnnnnnnnnnnnnnnnnnnnnnnnnnnnnnnnnnnnnnnnnnnnnnnnnnnnnnnnnnnnnnnnnnnnnnnnnnnnnnnnnnnnnnnnnnnnnnnnnnnnnnnnnnnnnnnnnnnnnnnnnnnntttcagtgatttaaaaacaacaaaatcaacttcttcgtggctttcttacctgcttttggctggtagaacccttgtttttttttggggggggggttccatcctgaagtcattcctgactggtgatcactctgcagattggcccatatgtatgctgaggtgtgggggctcttaatggtcttccttgttcatcaaccttagctaacatatatccccttgggccattttccagccaggtgcctcgcacagggctttctgggagggctgtttttcttgctgttcagtccttggcagccttgtcctccccctcatctgataggaccaaggtccagcccacctcttcttcctcagtctaaacttctagctgcatttcatttactctggtgcttgagtggtgccctttcaaaacattttttatttattatcagtgagtgcctgtgttcattcacgtaccttcagaagtcagagggtaacttttaagaattggttctatcccccggcttataactcagatggccaggtttgcctgacagtgcctttttccctggctcctggcactgcgttctttctttaactctgaaatgtatgtaaagagcatatgtcacactaatgtggactctctaggtgttagattgatcagattggaagccaacatatgtggtaaacaacccagagtctaatcttgatgatccaggcattttttttccccgtaacatttgggagatatgtagatattatttcagtgaggactgtcctgtaaggagtattgtttgaaaataggtgaattccaaagcctgaagaaaaaaagatgtcctctcatgtatattctttttaatgtacttttttagttatgtgcacacacacacacatatatatgtatatatatgtgtatatatatatatatagtatatatgtatatattatatatgtatatatatataatagtatatatacactatagtatatatgcatacacatatggtatataatttatatagtatatataaattattagtatatacagtgtattatagtatatatatttatataacatatgtatgtgtgcacgcatgtgtgtgtgtatcatacctgcctactgctatcctgcctcctcagtgcattcctgtcctcctcttctctagctctcctccttcaccgagtctttctgttttgcctttggtgaccaattgactctaataagtagggtttggggcttggttatttgagcaagggtggcttaccagtggctacaccactgaggaatacatcgtgcagctcatttttgtttctggtttccactgtgtaagacgtagctgtgattttttttttaaaagatgaatattcatgtaacaacagcctgaggacagaccatcctcgttgggcacggttgacccagagaaagctgtgtccagcccggcaacttgtacaccaagcgtgacccataggactaattgaaggctgcagaaaataactttatagatgaatttaaactttagacagaattccctttgcagccacaaatagcagggctatttttattgtagcatccacagtcgagatggaactcaatattagaagaaatggtttacttcgccaagacagctcacactcaacacagtccttgtttttcttggcagccacgtctcagccatctgcaagtccaggggagccgtctccgccatccatccatccagcacaatcagagttaatagttgaagctggcgacaccctcagcctgacgtgcattgatcccgactttgtcagatggactttcaagacctatttcaatgaaatggttgagaataaaaaaaatgaatggatccaggaaaaagccgaggccactcgcacgggcacatacacgtgcagcaacagcaatggcctcacgagttctatttacgtgtttgttagaggtaaatgctgggttttccgtggcgctgtggtggagggtagttgcttccctgttctcacccagaggtgaccaaaccacaggcaggatttggctggctggttcaaggaggcctaacatacatggttttcttcaccagcttcctcatggcttggagtgtgacccctgctgggggtctgcaggccggaactggattacagtctggttaacccatttgtcctggtgctcggagtcaaccccgggaataaattaggccctttgggaaaactgtattttaatgccttgaaatactaaatattcccacttaagtaaaaacacttcagggagcccaaggcctcaaaaggcccggacagactagtacttcaaaagacttggcccactcttagggactacattccagaaaacaactcggacagctaagcatttgttgtcagtcataagctccttcggggttggttcttttcagcaattacagcctctcagaaacagaagacaaagatgtggcagttggagcccctacacctcatttcctagacgcattcagcaatctgtggatgtgtgtttgctatcatgtcaagaactctcggggcggtatcctttgggtgatgtaaaaacaaagctaatgtcagtctaagagacaaatgagaaaggcagaagatggcagtcctggttgtagcaccagttggactgggactgggtctgtcattgatcgcatgcttgcagctctgtgagtctaggctggatgctttcctgtgcctgggaggtgctgcccggggcctccgtttctccctgtggtcctcagataagatgagcagtctcactcagggtattgttagggaaacacaattatacaaatcttagcacgctcaaagaggggttaataaagctgcctctgaagatggccgggaaattgactgtgcctctgccggcggcgttatcggttgtccttcctgaagtgggcagctgaggagacatgctcagtgataagccccagcttagcttcagaaatgttgggcccacccgcaagctgccggtgacactggggaagaaatttttgtaatttccaggcggtaatgagagtagccattgggctgcatggtgggctgcgtagacgcctgcttgcaggtggttgaattagccagagcagtcagctcacaccctttcttcacggctagacccttacctagtgtgtgcctctctctgagagggaaagaagtgactcctttgggaggctcctatgccctggtgattgggaaagtatagacagaaaaccaacggcagcttctgatggtttttcttgtcttttttttttttaaattaagtgataaaacaaatatatttcagtggccacagattctgtttgtgtgtgtgtttataacatttgatttccatgtagagaggatgatttgaaagcagaatttcagagggctgagatgatagcttgtcaggcaagtgagtgcttgcctacaggcaggaggacctgcatttgatccttaatatccacatagaatgctggtatgttggaggccagagagcaagctcagcctttaagagaaggtgctgcttttacagaggacccagtttggtccccagtacccacactgggcaggtcagttaggaccacataggactccagttccaggagatctgacgccccttcttccgctctttggtccgcgtgcatctggattagctagcagagtcatatatgtaaagtaaaatatcagactttgaaatccattgtgttattcaagcttgtaatcttttaaatcttttaaacttgttttcagagagcaggttgtggtggtgcacacccatgcctttaatcccagctgaggcgggtggatctctgagttagaagctaacattcaagttccagaccagccagggctacatctcgagaccctgtctaaacaaacaagctcacaaaatgttttcagtgtctccacatccagctttttgttcttctccacagatcctgccaaacttttcctggttggccttcccttgtttggcaaagaagacagcgacgcgctggtccgctgccctctgacagacccacaggtgtccaattattccctcatcgagtgtgatgggaaatctctccccacggacctgacgtttgtcccaaaccccaaggctggcatcaccatcaaaaacgtgaagcgcgcctaccaccggctctgtgtccgctgtgctgctcagcgtgacggtacatggctgcattctgacaaattcaccctcaaagtgcgggcaggtacggcctctttcttccatcctgtgggcgatggagaccctattcatggggctgatttctctccttccacttagcctagggcatcaggacacagctactagtaagatcaccaccttccagataatggtagacatttgtaaattcttccagagagacaggtccaccgctgttgctagctaagatggtcattaaacctcctggtttagggcatcccaaggtgacatccttgccgcaagtgttcctactcaatgcaaagatttaatttgaggacataagtctacaagtgatttatgcttgaatttgggtggacctgtttgtttgtttgttttttcctgtagctgattggttcccaagctactcaggctctgggaaagaaagtgctcacaacccatgaagctggtttccatggcatcacctcgaccattcagtggccaggagataaactaggctttatacttgaggttatctaattcagcatcactttgggattcaactgatgagaacttttaatctgcttttgaaaaaactgtactcattaaaatgaagggaattttaattatttaaaacctagagtttttttttagaagtaagcaaggtgtgattgtataatatctgggaaaggtacccatttggttgaaaggatattatcaactgtagtacgagagatcctcaaaaaatcatcaagggtagagattaagactgctttatcaggctaccctctgccacccgaggggggaggggggggaaagccaggagtgttcatgatctcttcctgggctctcctgtccttttcactcagcatgaatgagtttacttgtggatgaatgacttcataggtctatatttaggtatgcaaacaatacagattggttagtattgtgctttgtattttatttaatgatgtatggcacaagctgtgtgtagtcgagaaaaagcaacgttgggtctggagaagtagctcaggagctaggagtgcttgctgcttgctcttctaacagatcagctcagattccagctcccacctcgggtgacccgtgtcagccaacaactccagccccaggatagtctacaccctctgctttggctttctcagacaccctacatgcgtggcatacacatacaaagatacacactaatagataaagctaaaataaattttaaaaagaaaaaaaaaggtgtgttaaaaataagacaagttgaaattcccactgtgaaggaaggactgacgtcagggccgtattccttttctttgtagccatcaaggctatccctgttgtgtctgtgcctgaaacaagtcacctccttaagaaaggggacacatttacggtggtgtgcaccataaaagatgtgtctacatccgtgaactccatgtggctaaagatgaaccctcaggtgagtgctgtttaagtcctatcacgggctgtggtctctgtgtggctgattgtacaggttgtctccaaaactggcccaagggtggtgaccctgctggcagtcatagctgttagggactggcctagagtacgttcatgtgctgtctcaactacgtacactgcagcatgtgtgttcattatgagtgataaatagctgccacattgttactatcttttgagaaaagaaagggcacctgtctcaggttgttacttaacgctggctttgtttaaatggctttagtaaggaaatttaaaaaaagcaaacagaacaaagtaaatgaatagctgtatactatccagataatgtatacttaaggtctgcttaggccacgtgacagaaagagtcatcaacacctccccacccccttcttcttcttctgaggaaatgccagcatgtatgacccacaaagctcttctgatcccgcagaatggccacatcatctgggatatggggttctctttgtgcggcttggatttccccctttgaggctggttccctgagattaaattgctaatggatttccgttttttttgtttgtttgtttgtttgtttgtttgttttgtggctattaataaaatggctatctttcgtgtggaacatttggacgagtttttgttctcattcagttgacaagtatgtactgagtgcctattatatgtcagatactgtgctgaacatgtcttaaataaagcttagccaaatccttccttccccatctctttttcttccagggctaaggcttgaacccaaaggccttatgcctgcctgcgaggcaaggacactgtctaaccctgattttagacaatttcatttggattttttttttttgtctcaaatactcaacaacaaggttttgaaactcttaattgtccccaatattttccattaaaattcccgctgactgagtttctcttctacccgtagtgagacaatggcgtagctatcagcaggtcctctttcttttacatctaggaatgtgaaatgtaaaataaaggggtacacttatttttcctcctcctcctcttggccagtgttcaacgttggcaatttcatgcctgcatacagagttcggtgcgaaatgcatagccgtggtgatgtgcataatggtggcatttgtacagatcttgatggatgatagataacttgctttgtctacgaagcctgccgctggcctggagatcggattggactggagactcattctttcaaaccaatacctcagagaaacaagttttagtttccagaccatctaatgtaatacaaataatagcttctgtatggattttgggctaaccttacagagcacaatcccatattaattggctttctataatccttgatttcagatgagagaacaatttagactatgtgtgtgtgtgtgtgtgtgtgtgtgtatttgagcctgtgtatacttgaaaattagcccttttaagatgagaaattcaatttgccccaggtggttttgttctgaaccctgtttcccaggagcccccacatgccattcccaattaacccactggcaatgggagctaagtctttagtgttaggggctctttggggagatcccaatgtgtgcctccaagggttaaagaaaaaccaaatcatgtgcagacagcatgcaatgtgtgacttgcagatgggactcttggccctctgccagggttcaccgtgaatcttttattgatcctttggcataatttggaatgctgttagcactatcagattatttttaaaaaatccataatgtttgaacttgaccatttagaggaagcttcactcatgagaaatggaggctacaatgagatcttaggagttgttgcgattatttgttcaagcattttattcttggggtttagacagggctcgctcatcttggccagcttttctaatgcttccgaacgaacactgagctttctactggctttcagtgctgagcttggtggtatgctaagttaagatctttgactttgggtgtcagctagcacatcatttttgaccaagctattttgttcttcactaatcatctcagaccttgtgctcagcacccttttgggggactctctgatcctaggaagagtggcgttccatctgttcttggtcactgtggctttggcactgaaggcagaaacagcagcctaaaggccagcgggagcatggcgctcatttttggcttatcatataatagagcgatcctataccctgatatggcagatttctaccactggaaacacctagagggatggctcaagatctgctgaggaccatgtgagaatggcagggagagccctatttgttattcacacctttaggaacaaaggccaggtccaggtgtctttgacttgattaagtccttgcagccaaacagattctcttctttttaataaaccttgggtccaaaatttttatgtatgcttattttaatgtaacaggattccaagtactgtgacccggacatgatgttagctccattacagagcctttgctttgcctgtgtgaggccttcagttccagccctgaagaaaaattcttaacctataattatacgagaaaaaaaaaaaggcattgtctatgtttgtagctagcaatgctgtatatataatagaaatataatgtgagctgcacaggccatttaaaattttctgataggcacattccaaaaataagtgattttttaaaaagtcatatttggcccagtaatatgaactatcatcattttctgctaaaattaacataagagttattaataatgtattctgcctcttataattcaggatctaggatatattttatgtggagtcacaactacagtgtttgaagtactccatggtcgcaagtggctagtccttattagtgacaggtggcctgcacgttttccaggtttctcttgtcttttccccatatacgtcatgcattaccacgtggttgtagctttaagattgatgctttacctgttataggttcttactattgtagcccaagctggccttggacctgtagccatctttctgtctcagctcccaggtgctggcattatatgtgagctgtcttcagtgtttctcttacttcctacccaggcataatctttaatgtcacatttacccaacaggtatttgtgtcgctccaagcgtcactgcagtcggtgtcacggaacttttgtcctctgttatcatgagccttagacacgggtgatccgaggaccccggcatcctgccaagctcctattaccagcactggctgccgggcctacaccgccagggcagtatagccatagctggccatcgcccttggtctttatcggtatcagctcctgctcgcttgctttaattgatgatgttgttttctctattgtaatgggaatgtgtgcagaggccagcggatttggaagatgcagatttcagagttaagacttctttaaatcttttcagtggagttgccaatattaagggtttcccatggtaattcctgtgcaagcatctctccatgtctgatctgcagacagatcacaagagtggtgccctaaggccagaaccacagtcctttctggtcagcctgctggaacactttgcgatggggtcttagagacatcctttgccttatcccttgagtcattcagaaaattctgctgggttaatgactatggtgatgaatgtcaagtcagttgtacatattctggttctaatttcatgttttttaagatactaaatgctaatgaaaaggttgtatgttttctttcagttgttagattcacacatggaaaagggtaaaggggggtagcggggctggggatgtctcttggttgattgagtgcttgcctggcatgcatgaaaccctgggttcaactcagagcacaacataaaccaggctcgatcctccgtgccctcaggtggagggaggcaggtgggagttcaaggtcattcttgcctacatagggaattagaagcaatcctggtctacatggtctacatccgttctcaaagggcaaaaggaaacaaaatgggaatgttaatatgacatatgtatgctgactcattatgacatatccatattctataatatttcttgtgtggtgactccgaaaatctaatgctgcggagaacttggaatgaattttcccgtattttccaatcgttcataatgactatctttcaatataatcctgtgatatgaagggtcccagtgacaggcttgtcatgacgctttattatcccccctcagtagtgtataatgaatgctaatatggagaagttaattgctgctatttttaatttaggaaagatcctgaatataaattatatggtaatctttgatttttttttcttcttccccttctgaaagcctcagcacatagcccaggtaaagcacaatagctggcaccggggtgacttcaattatgaacgccaggagacgctgactatcagctcggcaagagttgacgattctggagtgttcatgtgttatgccaataatacttttggatcagcaaatgtcacaacaaccttgaaagtagtaggtaaatatctctatgggaatgtataaattacgggcaatagtgagaggagaaattactagatagtttcctttttatgcaaatgggattctaagaaccaattcttagaatttattatcactgaatgaatgaatgaatgaatattatccccagagcttcttggcagcagaacacaaaaccagatcttaccagtttacccaaaagacaggagagaactgtcactgaagttcagacctgtccttctgcaagcagaacatatactgactttcccttacgtcttggcccttgctacagtggttcgagttttgcaacggtttgagttttgcaatgaccagagatgttctttacaaggcctcagagatgtgtagagcatagagcctggggtacttctctgtcttctggaacgtgctgtgtgtcagttgttggctctagtccctttgtggtcagtgttgagttgggcttctccagcccgtttgctcttctctggctctgttctgtagctctcaagttcaccgatggctctcacggtcgggaaagctgtgctggtcctggagagcctcagagaagggtcttcgggtctcctctgccttgggttcatcacgtctgctctgtacagtaataggtgtggctttggtcttctggatgcaagaaagtccacaagtatttatatttgaggcaactacttaaaaagagaagccgagcgtagagtgttcctgttatttttgatttatccaaatcaataatagttttcccccaaaatatttcattcatagggtttgtttttgtttgttttgatttttatcttctgtatgttgtttgtttatacctaattttttttttttttgctttctgtctttattgtaatcaatatgaaagcctttttaatgaaaccattttcttgacgcttgcctttgataacacccatgtaaggggggggggtgaagctcatctctgtaagcggtaataaagcaaaacactgcttgcttgcgtccaatccctcaccccgccctgatttcagtaatttatggaacagagctctgtgatttttttttttctcctgtagtaacctcataaaaatctggtgcttctgcccaagttctaatggaaagtctctcaacagatgaacacagagaagacacttgcttgtaattacagagtcatcacacacaaagtgtgctcctctgtccccaactgtgatcgtgagccatttattaatttgaatagaaggctatgcttttaaaatattaaactccataagcactaatttgctaagttgattagggagcatgttgatataccctcttcagctccagaaagcaattaggaaggatgttttgagcatattgttgtatgtaatcggatttaaaaaaaatccattcatcagtttccaagaattagaaatgtgtgactggaaagctctgtggctatgaaatccgaatctggttttgtcgtgggtcaggactgggttgtggtgggacaggagcaggaagagacaaaaaggctgattccgtagggactaggattggagttcagatccaacatggcatgggtgagagaatgagactttctgaccatctgaatatatatgcacatacatacatatatacatacacacaaacacacagtgtacggtgaaggcattcaacgtattacgggaatacatataggctataaaaatgttactatagtgacacaaataagcatatccaccatctcccacagttatgttttggttttgtgtgtgtgtgtgtgtgtgtgtgtgtgtgtgtgtgtgtgtaagagcagacagaatctgacctgggtttaggttaggggcttttctgcttctctttctaatgtactccagttcttctctgtatttcttcagaggaaactgcctccagctcccaccacgttacagatgaaatgagacagattttatgggagtgtcaggcaacagcgtttaaacctgattaaaagttaatgtgccactagtgcagaagctcttgaaaaagaactttgttataatagttttgttagcattgcttttttttttatgttatggtatctaaggtagagtcttaatcctttttgcattgtagaagtctaaggctcagttccactatgtagcctacccctcctgtgttgccagccttctgttttatgacaaatacctgacatacttaaggtttaaagaagcgaagggtcactttggctcatgttctaagtctgtggacttgagacagctctggaacatcatggtaggaatggggggggtgcagaagagagatggtcacctatggcagccaagaaacagagcagccagaaatagccagacgcaagataggcattcccctagtgatccatgtccatcaaatagcaccccaacaatgtacatccattgatgaacttaggacctttatgatcaagtcccttcctacaagtccattcactagcaaccaagtctttaacacaggggattcttcatagtcaaatcagaacacctatattggcaaggaaaggttacagaaaacccaggactgctgaaaaaaatatatatatacatacatacacacacacatatatgtgtgtatatgtgtgtgtatgtatatatgtatgtatttattttaaattaattaattaatttattgtatgtgagtacattggcaatgtcttcagaaacaccagaagaggccattggatcttcattacagacagctgtgagccatcatgtggttgctggaattgctaggtatcaggaaatgctaggtatcaggacctatggaagggcagtcagtgctcttacctgctgagccatctctccagccctgatacacatatatacatatatatgtatatatgtatacatgtatatatattttaaatatacatagtttatttttatgtcatgctcattgatgctttgcctgcatgtatatctatatgagaagatcagaaaccctggaattggatttgcagacaggtgtgagctgccatgtgggtgctgggaattgaacctgtgtcctctggaagagcagaggatttattcactgagcatctctctagccgtgcttacacattttatctatggtaacctgacttcttttgtgtttgtgcagttatctgaatatatgaccttgtgaagcaatactgattcttttaacatagcaggatctaacaaacaaataaagcccttgttgtaaagaacggcatcatcatctgggagccccaactccagtttttagtttggatgattttttttcattccccactgaaaataataatcctttcagattggttcagtagagagaggaaggacacaggattgtggttttgaccttgaacctttaggcaaccaaacagcattaaaaaaaatacccaaaacaaacaaacaaaaaccctacaatgataaccttctatgtatacatagataactacaaagttagtaaaaatttgcaatacagtttaagcacttgaaagtgaaatggaacaaactctaacttggtgtggctgcttcttaaagagttgagtattttgcttatatttttacatatgagttttcattatacaattttattcatattcttattctcccccttaaaatgtatagagactctaaaaaaagcagccactcttggcttctcttagacccatgtttaaagctagactttgcctataatagctctggatctaaacataaatcatcaatttcatctataaattagagattacaagtattgcctataaattggagtaaccactaaatctctaacctggggctgggaggtggcttagtgggcaggaatgcttgttctacccacgaggagctgagttcaaatccgccgcacttatctaagagactgagcatggttgcctgtgactaattccaagactaggggacagagattgcagatcctgagagctccctggtcagccatccttcctgaaatggtgaatttctgattcagtggaagacccctggagttctgtcctagttccagggatagctctggctgtcctggaactcctcctgtagacaaggctggcctcaaactcagagatctgtctctggagtgctgggattaaaggtgtgtaccaccaccacccagctagtctccgtactctaattgtgcatgtactatagacattgacaacacgcacacacacacacacacacacacacacacacacacacacacacacacacacttgcagaaaacccataacctgcttttcatctataaattagaagctacagctctctgttccagaatgattgtaagcataaatgtcataattattaaatgaaatgtgtgctaacgtgcctgaggcagttcttggcacatagtaagcaccatcccctaaatggtagctataaaaataagatcggcaattaccttattgctctttttcaagctcgctcttggattattacataaccacgtccaaggctgtactatttacttcaccaatgttctgtcatgtcaagagttatcgaaacccgtgcaaatagtactttgtgcatctcttaacccattttaagaagagttctcaaatggaaattataggatttagacttaaaatagataatttaaaaaaagaaactctcgattgctaactggttctgagacgtagcatgccagtttgtcacgtgtggttccctgcgcttcttcgaaacacactcgagatccttgggtttattttaaattagttttgctatttttgataaatggagagtgccatccatattttaatgactggtttagctaaacagtccttctcccctagtttaatgtcctctttcccagtaccttaattcaaattcgccctttgcgatattttccttttctcacctcccaaaagcacccacccctctccccactaagcggtaaaagcccagttttcacattaaagcattgtctgacggatgacccacgatgcgctaacagacgacactcagtacggatgggcgggctagccattttcttcaatacaaaatgatattctatcactttttggagcttgttcttgccttgactcggtggtatccttttactacatctgtaattcttctgggcctaggcgggggctatttaataaagtatcctgaacatgaacctcacaattgtggaggcgagcgggtgtagagacacttacagggaaccgctagcaaggccgccgtatacatccggggctcagtgtgtgccctgcctcaccccggagatggcaaagagcaaaggcggctgacgcacatcttctcacgggtgccagtcaacactggaagccgtcatttgccaccatttctgtgactcttaagttgaccttgcatgctcttgtcagttgtggatactgactgctgtcttaactctgttccgattagaaaaaggattcatcaacatctcccctgtgaagaacactacagtatttgtaaccgatggagaaaacgtagatttggttgttgaatacgaggcctaccccaaacccgagcaccagcagtggatatatatgaacaggacctcggctaacaaagggaaggattatgtcaaatctgataacaaaagcaacatcaggtaagaaggggacctgtgcccggctctccccgcaaccttcccgggccatggtttggtgacccagcaatgagtgggaagatgccacattgaggaaggacatctggggcttcctctgtgtcctcggccaacaattccgttttgttgtgagtttagaatgttcccaccacatgtttggacgtgtgccgactccgcgtctcatttgggatgtggtgggttacttttctcttagttttaagggtaacccaaagcaatgactagcatatcttcaggacacaatagttctccttagaaagaaaggggagttagtattgttactactttaattaaatctctggggcaactatgcatcaccatgcttccggccgggtgattgattgtggttttttttttctttagatctcttattaaatcttcaaaacatcgtaattacaataatagcagtcatgataccttgtgtgctttcgtctgtttctgtcatctgtaccttacacacagctgcacacaccttagatgtagcatttgatttatttatttttttaaacttaacttatagttgtgtagatatgtaatggtgcagggacacagcgcacccctaagtgttcgtgaaggtcggaagacaacccttgggagtgaggtctctccttccacgcttacctgcagactcaggagctgtgctgaaggcacctttatcatctcactgacgccgtggcactctttgtgcccctatctttgtggaagaggaacccaaggcccaggcttggtgatgtgaccaagatcaaatgactcataaggggctggaaactgggcagagtctgttagtccattcaggagcttctgctgaccattggatgaacatgagagagagctgaggcgcccttagcttggggttttgcatgcatttgtctaaaaaggctcaggtccctagaagcctatcctgagacaggaggtcaggggttggggttgctaaaggaaagctatgaggagtcaggaaaccagctgagaaaggaccttggggaattctccattgagctttcctgtacctggccactcgggatcacccttggctgaaggtgatagaggtgaagcatccccaacaagggtctgtggggacatgggcataggccgtagaagacacgcaggacggaggagcttgcccgagaagctgagactagaacattcgatctgtctaccgatggggagaggagagtgagcaaggccacttgagtgtgggcagtcgggcatggcctgctcaggagatctatcatctagagctcacactagcttaaggattgcatagtgtccctccatcagccgtcctgtaggtccctgagtagaacagatacttgcataacaaatacacctggggactctgggacaagaagccagggagtaagaagaaaactaagagaacttgacaggaagaagcaaggcaggggacagtggatgaaggagttggtgtggatcccaaggtctaagtgtcagcgtgaaagtcgagggtgtgtgcaggctactgagctatgggttcccagaacagaggtcaaggcgctgctacaggtaggcagaggaggaagtggtcacgaaggtagcctgggactgtggcttggcttgcttatttctgtgtcttcctaggtaggcctttgttccccaaatagagtgctctgtgtgtggtgtgtgtgtgtggagtgtgtatggtgtatatgtgtatgtatgtgtgtgtggatatgaatgtgcatgaagtgtgggtgtgttgagtgtgtgtggagtatgtgtatgagtgtgtgtgtagagtgtgtatgagagtgtggagtgtgtgtgtgtgtgtaacactgaattaagtgattcatcgatatttctccctaaataggtatctctttccaagtagaaactgacagagacgtgcactccaggacagactctctacagggagttgatttattgtccttcctttgtagatatgtgaaccaacttcgcctgaccagattaaaaggcacagaaggaggcacttatacctttctggtgtccaactctgatgccagtgcttccgtgacattcaacgtttacgtgaacagtaagtaaatcgccgggctccttatctttttattttgtgttattgcacgctgcagcccgtgggtctaacagctgcagagctgcgttgcttgtgtactatgtaaataatgtttcatgataattttgaccttaacaaagacctcgtggtttggtggttggaagagaaaccaattccctgccctacatttcactggccacatgaccttgttgaagtgctgtggatttctgagggccgccttggaagtcaacagaggagccagagaggcccagcttagcgattgtttaagagaaagtgtattattattgattgttcaactggagagccagatgttgaatggtgctggcatttgccattggggagggggaggagagagagagagagagagagagagagagagagagagagagagagagagagagagagagagagactgttaagccctgacaagaattttctcttacttgagctttctctcttcagcctgtgatataccatttgtgtttaagattgttctcccactatgatggatgtgctattgacccagctcaatggatcacccctgagtattttagcaggacctggggagcaggcagcaggtggtttggtggagttgtctgtagtcatgggaacctcaaaacctcaataccaaagccttgcattgctatggttcttagcagcaaggcaagggtggggggtgaggatgggggaaagctatgcaagcaggagtcaatccttgctgcggcttctgccaagtacagggcttctccttggctctgttctgggtgcagccacactggcaaggagtggaggacaccattctatctcctagagtactcgggaagatggtccgataagtaaatgctagaattatccatcttgcgtgcgggtctggggaaagggaacgttcccgtgatagttgttgctgtgagagagtgcacaagcagcttgaggggggcggggttcggttcttgcttgcagggaatataggccatcttaacagcgagggcatggctttggggtttggtctgggcagtgggagcatacaaaactcgttcacctcatgactaatcaggaagtggagaactgaagctggaagccaggctacaacccacagtggcctggcctgccttgctaacctcttctgctagccacgcctcctgccctgaaggttccatgctccggatacttcagatcaaaccagaatggacgccctacaaaacgagcttaggaactggacagtacacgggactctaagcgggttgtagatggctggagtgggcggagtgggcgaggcagggggagtgtcttccctccctagagcagcatatctgcagtggtttcaggtatatctctcccatgagtccctgtcttgctgtgatagccgtttgggtgcggtcagatccatttgttaggtgaaaaagactcagctagtaaagccctactctggttggcttttttattgcagtctagggttgcttggccgtatcagtatttctagaaatgtgcttcctgattaagatatatcagtcagggttctctgaaggaacagacctgctaaagcgcacgtgcatgttcgtgtgcacacaggtacacacacagaggcacacacacacacacacacacacacacacacacacatagagaattattagattggcttacagaatgtcatcagtgtagcccagcaatagctgtctcattcggtccaccaggctgaatgtctcaggagtcccaatctgatgctagaagggttcctagagagccctggtcttgggtccgcattggaatcctgaagaaggcccagactgagggagggctttcctgctacaaataatccgatcaagaaaatccttcagaggagtgcccactgcttgggttctagttgattccagaagcagtcaggttgacaaccaagactagctacccaggacatcagtatgcgtttgagctgcgtgtcagggtacatgcctttgatcccagcattctggaaggtggagagaagtggatctctgtgagttcaaagccagcttggtctagtcagtgtcaagggagagaagtgtcacaggcccataattaagtactttagtgttgctaactctcccagagtcctttatctattgatgtatatcctatacttccttaaaagggtgtgtgtgtgtgtgtgtgtgtgtgtgtgtgtgtgtagtggtggtggtgccaatgatctcaggctctggaccacagagctcctcccttccaaaggaaatgttaattaatatttctgtccctgagaacagttttgattatttggtatctcattggccctcaattcaaatatttctagattaattcagatgttaatcaagggagcttaatatattacacatgggcaaaattacctacttctgaaaaccgtaataattcaactaatttaagagacgaccgtaggcaaatcaggatctttgcaagcataatgtgcaaaattgttcatgcaaaacttgattctgagtgtagtaggcccctcttacctaccttcgccaacaccctaatccatggtagaccagtactcccagaaaatacagtacgagccagttactacaaaggtaaaataaacaaacaggtggacactgtgtcaggttttgttgggcactcagattgctccatctgagtgccaccagtagcaagtgggtccatgggacccctgagaagctcgtcatgttactgttagcctggcctccgggccctcctttcccagggtgttgtctgccacttgggcatgagacactgatacttccaacttttctttctgggggcagaattgctgtcatttgaattttgaggttgtcttgtcacccagcagggtcagttctgatcaagtctgctagggacactgctaccttccaaagtgatccccacccccgccaggaggggcctcttctatagtcgagagttttgtgctctgacaagcacctagccattgatgggatgccttgttcgtcattctgggagggaggaggatggggcaatgggctctgccctccgagattaagcttttcagggaggcttttcatttctgtcagtttcttgcaaatgctaagttgacaaaagctgttcgtttcactcacagggcacattggatttacaaatggctttgacagtgagcatatttgttcaaactgtccgcctcttgtgaggcatgtcccagtctctgtactgttatagtccacagtattatgggtttatgtttctttcttttaatttatttattttgcattggacttaaagtcaaaggctggggatgtggctcagttggtaaaacgctggcctgtcaaagctccagcattgcacaaaggcaagcctaagcatggcggcctgtgcttagatccccaggcaggaaggtcagaagttcaaggtcattctaggccacgtggtgaggccggcctgctatgtttggccttgtttgaacctgtcgctaacaagccaccaaacaaaagtgttttaaaatcagaaccttgggactcatcgtgtccgtgttgccatcacggggtaacagtgacagttatgggtaattctatgcatggtttattctgtaaataagcttagcctccagggggaagggaattatgtattgcaaaaattagaattaataaaagtcaaggtaataaatgcaccgggttacacagaaattcaggctccttagtgacatgatgcataattgcttcccagattcagtgctaaagaaatgctaatgcacggcccttgatgtggagtggtctaaaggcgtcaagagtccatgtgttttgaaaatatctcgagtagatttcaatgtagtcagtgtgggggtagggggctaattcctcctgtaggagacttgaggatttcattaaaataaaaacaaagcctcgatttttttccccctccattgaatttgcattactgtaattcctcctgggagtgcttatccaaggtgtacatagaagttgaattcttagctctgaaaagtcggtgccctttgggaaaacagtgatgcatgtgaaaactgctgaaagcgtgtaattgtaaaactccaaactttgccccaaccatgcttcctccatgaggcatgtctctcccagattcctctcgatattgggggcaaaaatcccatctgccagccgtgtgacagcccgtagtgcttattgcgcccctctggtggtgcttgctatagtacccaggtcagacagttccgtgtcagccagatctaaaatcaaaggccatgtgcttcctcacttggcttttgggcttttcctctcatcccagtnnnnnnnnnnnnnnnnnnnnggggggggttatttctcctgttggagaccttaggttttttttaaaaaaaaaaaaaacctccgtttttttccccccccctgaaatttgcaaaaacggcattcctcctggggggggtttttcaaggggtgtataaaagatatattttttgcttttaaaaattggggcccttttggaaaacaattaaggtcttttaaaacttctgaaaaggggtaatttttaaaattccaaattttgccccaccaaggtttcttcctttgggaagttttttcccaaattcttttcaaattgggggggaaaattcccttttccaaccgtggggaaggccgtagtggtttttttgcccctttggtgggggcttcgtctagggccccagtcaatcaagtttcgggttaacccaattttaaattcaaaggcccagtggtttcttccttgggtttttggggtttcccctccacccaggttggtttttttttttttttttattttttttttttttttttttttttggttaaaggacagactttctaaagggcaaccaataaagtaaatctctttataaatctattgtgacttcttaatctcaaatatccatgtgacttgtggagttatttatataatcactggaggacatgatgcttgctctctaacactagtcatctttagacctctgaattgtcttaaatctttggacagcatctgatagcatttgcaaatcagctttaggaatttaaatatgtggtatagaagggtcatcaatagctcttcctccatccctaaagggactacttcagtgacagacctcagccactgaggagggctgctgaggtgcacggggatggggacaggaagggctcgccttcctcatggtgcttgcatagaactgacttgtcttcacttagacttgggcgcccactgatggcttggtccaccccgcattgactgtcagtatcaccagcttctctctatttatggaaggttgctaacagggcaccagaaacaacttaaggaaatgcccaataatggattatttctaaatcattgcatcaaataattaaatcctgctgtggtagtcactcgattatttatagaccctgcagtacaccaaaaatcagcccaagtaataaatcacccggaatgaaggttcttgatgagaaagttcccctttgaccgcatttgcaaagtccaggctgcttttgatgtattttgggggtcactgatagctaaatctggttacagatggctaatgcccggctaaggggaagtcactatatgccgggcagcctgcatgtgaatcacatggccagtccacttgccaacactgaaggtggacctgtcaagccagccgtgtagacagcttcagaccccctgccagccatctgggttgtccacctggctggaatcgcagggtcctttcccagtgtgaacgtgtaagaatggcttcctgccttcaagggctgctcggtttggggtctcggagggagtatgcccttgaagagccttattgagcaatgagagctctttgcagaaggagatattctccaaccacctagcttcttggtttctgcttctgtcgtcttcccttctcctcactgattgattactgatgggattgaactctcaggcctctgaatacctcctgcctctgagctgtgttctcagcatccatgtttattaaggattgggggtggggggagggttaagattttcctaacaagtgtgtgtccaaactgtcatgtttgaaaaaccccagtgcgtttctctgtggggttttgtttgaaaaggtttttgcctctctagtgctgctttgaggcttggtccaggagggcgtcgtttagattctgaaataatagagagttgggcttcgtggagccctgactattgacttgcttttcggacgcggtggggcttccacggatgctggaatgtagtctgtccttgtaacttggccatcctgttccatgaggatcttcaagggcagattcacgccaagcctcctgaagccgagttgtccctgaaggcaggcagccattcttctcacactggtcaaggaccctgagatgccagccaggtgggcgatccagatggctgggtgatcaggcctagatggtctgaagtagtctacatggccatcttgacaggttcaccttcactgttggcaaacgggccatacacaggctgccttgcaatgtagttggccgtatgtatgtatttctaaattcaaccctttcatacttcagaagttaggtttggtaaacccagaaaatgtcgaagcaaaaacgaaaagcaaaatttatgtttactgtccgaaagtttttttttcttttgacatttcattgcttcccattgctaatacccctcattttgtatctttccggcccactctcacaggcgcatgtgcatgtgcaggtgcacgtgcatgtgtgcgcggacacgcatgtttctaagaggccacgtttctctggggccatcagccggatgctcttatagagcacccaggcttggtttcctgcactcaaagggtggttcacaaccatccattgctcgaaatccaggggatcttatgcccacttctgacctgcacagagacacacttggtacacacacatacatgcaggccaaatggtcatatacatgaaatagagtagatacatattaacaaaagtgaggttgtattattttatatcccgactcgttagtgctgagtgcagatgtactgggaactcctttccagtcagcctccctttgctatctctttgagcagatctttcataatccctttaagcccacgccgcatacaattttgagacattaaggagcgagacggttctaacatgatgtgacagagttttaaaagaaacctgtcaggagtttatgatcatctatttaatcttgaatgtgtgaccttgcctaagtgcctggaagttacaaagtcgccatctgtcactgtatctggtgctctgtgtcttccgcacacagtcattcctcaggaccgttctgcattaagcatagctctcaggttgtctgagtatagtagatcatctgtgtgaagacagttgctggcctctggcattaatctgtttgtagactttgtacttatatctgagatcgggtaggacttgagtcttatcaatctcttagattgagtattgttttttttgtgtgtgacacttttttcaacagttgttttatgttgtgtgtgtgtgtgtgtgtatacactcacatgtccatacacaccatagtgtgactacaaagtcagtcacgagttcatccacgccgcagttgtgaatggaaaggttgtaggacaatttaaggaagtgagctctctccttctaccgtgtgggtcctaggatcgaattcaggttggcaggcgtaggggcagtgcctccccccatggagccatctctctggacccttgatgtgtgcagcattacatctctatcgaaatagaatctctagatactagaatggttatagacattgaaataggaggggacagatacagaaaccagctgttagcatagaacccaagtctctttcactctgaggggaaaaaaagacagcagtaaacacctgtaaacatctttctctgctccagtgttgtcaccattactgtcctttatgtctcataagatgataattcatcctgtgtggcatgccattaatttagtgtatctatttgaatgccagacatcttagagaattcagtcacctgcctcggtccttgggccctttgttgcctatgttgcttgtatggttagacattattattattattattattatttattattattattatttctaattaaatggtagaaaagcaaaggaatgggttcagtgtgcaactgtaaatgttgatgaagttgccccccgacttttccagacaacagcacgaggagccattttatatcgtggaccttctgctgtgtggaaatttcctttgtatttgagccaggtgtgtttgtacatcaaattagccccattcatttataaatgtatgcagggtcgcctctaattcagcaggaatttaaattaatccaagaataggtacataattttttttctgtgggcattatgtcaatatcctctgaattacgtggcaaaatgaatgacctactttacagagtagaaaaataacatttcaacctgtgcctgtgcaccttggcagcccacttagctgcttcgtgatgggcgttcgggtcccctgctcacatctgggacgcacacagcactgaggatcttataaatggagtttaacgagtctgagtagagaaggctttctccaagtagagacattattttgggattctatcctgaaactaggaggttggttggttggttgttgttagatagtgtatgttgtagcatgcgtgtgtgtttgtatgttcccatgtgtatgtacatggacatgctgctgtgcaagtgtgtatagaggccagaggttgatattttatgtctttatgtattaaagcagtagttctcaacctgagggtcgcaacccctttcggaggagttatcatatcagataccctgcatatcagatatttatgttacaattcacaatggtagcagggagtagcaatgaaattaattttttgatgggggaggggtcaccacaacatgaagaacggtattaaaggctcacagcattaggaaggttgagagccactgtgtcaaagcaaggtctcttacttgaaccttgagcttgctgattcagcaagcctgggcagccagttgggtcttagcttccaagcactgagattagaggtgggccaccatccccccaccttgtgtttgtatagtaggtgttggggatcccaactctggtcacatgttccttactcctggatggcaagcattcccactgagctgtctcctcagctcagaggagctaggggctctttctcatggtgttttagaacagggatttggaaaactatataggtggttgctgggtttgaacagtcaacaaattaagaaaaaccatttttttaaagtaggtataaaggtcagagattgggactgaagagatgacacagcggttaagagcactggctgctcttctagaggccctgagttcaattcccagcaaccacatggtggctcacaaccatctatctgtaatgggatccgatgccttcttctagtattcatgaagacagggcactcatggatataagataaataaataagtcttttaaaaaattaaaggtcagagatttttgagacacaatattaaactcataatccagttgggcatatcactgcgttaaagtaacgtttttattgttaaaatgggtttggtgtttagcatatatagttgaagtttttaatttttttcatttattggacaaatttctgttttaagatgcgtattttaggtctgatggtgtgtgtagatcagtttgtagagtttacttaacaggcaaggaggtgccttgggtttcatccccgagagcagtgtgcttggtaggggacatttcagcactctgattttggaggcaggaggattcgaagttcaaggtcattcttggctatttgtggagtctgaagtcagcccaggctacgtgagactctggcagaaatacccatttgtcatttttagataactgtaagttgggatacaatgcaatatatttcctcactgtctatagcggggatttttgtgacacatgcctataatatatcttttagcagtttttttttttttttttaaagtcagctacagttagtttatagtcttgtctgagctggtttatattccctctcattataacaatattgtggcagaaatgtagcttccatccagactcaacccaggatggcgacgaattgtgagtgcccactgtgtcccagcaaacccaagagttatgaaaaccagaaagtcatccttccaaccactctccatttggtcttttattatttggagccccgagtctacgttccctctcccgctgctgatagagtgcaggcaaattgttttcagcatgggacctggttagggtgggcagggccagagaaaaccccgactcagagccactggcctgcaggacatgaatggaagggtgagtccccccgcttctgtggcccagagccacccagggtttgctgccagctcttgttctgtgtaccgagatcttaaaattcattttgttctcgctttccacatggacctgatggtggagagaagggtggttttcaaaacctccaatctgccgggtaaatcggtgtttcggattttaattacatgagcagtaacattctcacagttattgcctacaagccaatcagtgatattggaggacactggggtggcttaaatctatggtggtttttcaaatggcaagggctattttaagaaaaaaacaaacaaacctgcccaggaaacatgaaacttagacatttcttaggcttatcaaaaaccccaacgtgggaggagttagggaatatgtcgatagatatcctacttacttcaggacgtctaagaaaccacggctctgactcaacctggagaactgcggttgtgtatctcttgcggtgaaatgcatatttaatgccttacaccgtgcattgagccacttataaaatgcagataagctttgggtttcattttggggatcagttctacctagctcattctttatgcattaaacagtttcctagtgcagcctgacacagacagccaacgctgggccagagtgacttagccttctcagagtgaggtatcacaccaccagtgtcgaggacagggctgggactaagatgaagtaagagaacagatctgtaggcgggaggcatgccctcgtaggtagccacatgtcccttaagggttggtgatcctgaactatcacccctgggctgcttctctgtcatacttctagtcctggtttttattgggtttctttaaggtgctttgttttaaaaaccaccaccactaccaccaccaacaacaacagaaccagcaaaacccaagctctggctggctccgatctttagcttttagaagctggaggttggggcaggaaccttcatttagcttccctcatagctaaggtttaggaccgtctgaggctcaacaggacagaagccattcagctagcctcaggttatatcctacctgggatagcagctttaaaaaaaaaacaaaacccacctaattagccaacacacaggaacaagtaggccagccagaccacatctctggtttcagctgaccgttatgtaaccgctcccaggtgtcgcgctcgaaggcttggatcttagagagcccttgtcacgaaagcaaagtataactgatggcccaagtttgagctgttccaatttttttaattagaaatgttttatatgttcatttttggttccacgtttactgtatgatagggaaaaacggttagaagaataaaatagatgccatctctaagcctgttaggcagaagtcagcattattaatgccccacaaggcagcaactctctgatgctgcaaccctttggtacagttcctcatgttacagtgacgaccccctccccccagctatgagattattttgatgttactttataactttaatgaatcataatgcaaatacctgatacgtaggatatcatatatgtaactcccaaagaggtcatggcccacaggctgagaaccactgccataaggtatcctttgaacatttaggaattacttttctatcgtattaacccaagaaaagcccatcttaggacatgatggacctacacaaggctgaatgccaagaatataagcagatacagctaatgaccttgccatctctgctgcctctatgtagactcccctgttcaatttttgttttgtttttgtttgtttgagacagggtttctctgtgtagccctggctgtcctagaactcattctgtagaccaggctggccttgaactcacagagctctgcctgcctctacttcctgagtgctgggattaaaggcatgcgccaccaccgcctggcccctaatcatcgttactgtcagtatacacaaactccccatgtctaggcgtacgtgtagatttcctctctcttgtttctctgttgcaagaataaagcaactaggcctcccgcccaggaaagccacctttagacttttcttatcgttacttcccagtgacatcgagcacttgttcccttggtggtcctgtattcattcaccagctcttgctacatgtctgctgccgccaaaccatcagtctaacatgctgctcctgtcattgaaagtccgaaggaggaggcagaaaagcaagagttatgtaacaaaatcaagtgttcccgaaggctccagggatagagagagaccaaccaacttggctttggagaagtggggttgcttagaaaaggaggtgactctggggctgagtccagagaggcccagcgtatggctcccacagtccccggcacaatagcatgctcctacgagtccactgttcttttgtgtcctacttttcagcctgatgccacagttgcccatgataattaaatgaaacttgccagatggatgctttctcgagacgatggctcgtcttcttgctctatttgtgaaagctggcgtaagatccaagtcctcaaggatactcctaccttgagatagctttggagagcagtggctcttttgtgtgtgtctgccacacggcctgccatcagcaggaccaggttgagtggcaggtgggtgtgtcacgcatgcggacaccgatccctgccaactcatcgtgcctcggagggagggggtgagatgctgagtggctcttctgctgagatgctgttgatcatcgttaccttcctctggggaaatgggttccgtaagcttctgatctgtcagcctttctgtctcacatctattgctcttattagtccgtgtataatagatgttgaagtcccagcactccaggctaacacacacacacacacacacacacacacacacacacacacacagtcacactgtcctaaagaagcaattttcagagcattaaagggagactgaaaggtgataaatgttaccaacatgtgcagctaactcccttaactggtattctaataggaaataaccaaaccagttgtagtagtagtagtagtagtagtagtagtagtagtaataataataataattattattattattaatagtaattattattattataatgggtgtatcatctgtgagtcattcttcattctttttgaaaactttgtattgcatttatttatttgtgtgtctggggagcagtgtgtaccacaacatgtacatagggcggggttagaggacaactagtgggggtcagttctctctcctcccaccctgtgggtttcaggaatcaaactttgacagtcaggttggtggcaattgtctttaccagccggggcatctcaacagcctctcctcctttagttctttgcatgttccatcacctttccttaaccaacatcctatgagatggaagccatgttccctctccatagatgaagatcgtcatcagttggattgcccactacacacctgccttgctggttcttacagcccaggcttttgtgcagtgatgtgcttggccttgcttcccatctctgcccgcacgatgccggccgactggactgctaagcacactcatccacagaggaccagaagccttccaggattagtctgcccctagatccatgccctagaagttcaccttgctttcactttagaaataatttccagaatttgaaattgtcgaatatcaattgattattgtagttacatagggctgtcaaattagagtcttcctgctggcacaatttatgtttgtgctgattatacccaggctgtagataaatgcataaatgaaactccggggctggtttcttcctccttctctgtcatcctctcacactgccattcacggttgtggtctaagctttcctgtaagtacagcaatccagctcttaccagcaccacctcttgtatcccctgagagtatagcttctatttttctacaacaacttctaatttcatctatttcagtccctatagtaacatgaagtgtctgagcaggtaggctgacttgaaggcctattggcaagaagtccaagttaagacagctgattttgacctgaagcagaagctagccaggctggtcttgcaggctctggtctacagagttccttgggatcctgataccttcaggccgatggggagggtctgggcagcgctggacaacatacccactgcacccttatgccacctctgggtgtctccttagctttctcagttgcctccagaaggttctagggatgagatgagaaagagaatggacaaaaatcacgccgtggttgttcagccaactgatgaggctatttctcttcctgcagcaaaaccagaaatcctgacgtacgacaggctcataaatggcatgctccagtgtgtggcagagggattcccggagcccacaatagattggtatttttgtacaggagcagagcaaaggtgagaggtttatttttggcactgcttaaaatgcagaagggaagggctataattcacttgaatttcaaatgtgttttcggacttgcgatttatttttttttagaataaaaggctgtcttctgattactcttttcccccctcctatatctgtgtggcttcttaagaagggataatggctatattttttctggtcgacattaattttgtttgctgaaaaatgattgctgagtgacttctctatttgggtggttatctttttgggtttatcgtgcaatttctagcctgcaggtagataaagcaatttcccaggacagagtaattagatttccattctatacacaggaggtaatgtgtgtgggaaatgtggctgcagttaccatgaaaaaaattacctcagaagttaattgccaagtagccaaaaaagtaatgatcgcacaattacacatacatacagcgtttgtgagcagtgggtttgcaaaagtgtctctccttggtgaggtgcccagcccccaaacaaggagcatctgcctctgcgtggctcagagtccctcagaggccacacttaagccttaaattgtcctctcgaattacctgaagatgaaaatggggtcaatgttgccgggtttttttttttacccataaaacactgtgttagactccagctttaaaggcctagtttggcctcgtgaacagaatggtagtggaagttttgtttatcgtggaagatgttttaggacaacatatcaggattgattgtatcgaattattattttagtgtgggtttttagcagaatgttttgtttgggggaacaataaagaggtcataaaaactctggacgctgtgagctctgtgccatggcctgagtatgtatcccctgctcagcagagtgtgtaaatggaagctaactgtgtgctcagtgctagtgtggtgtacaccgtccaaggctgtgcccttgtctctgccttgcctgtatccgtattttatgggtggaaagagaccgcatacagggcgaacagctgacatgtgtaggtgtttagaagacacctagaagatggccagagtggccatcaccacatgatgggacctgcttccaactctggatctcgggcacctccctcctgcaccttttgagtctctcttgtcttcattcttccaatttcctcttctgatcttcgaccatcacacatcctttccgagagtctggcatggcaggatctgatgctggcagccattgagtcaatttttgagtcttttgagttggtacagccatagaaacctaaccctggagaattcatagaacctggtggaagtcacaaggttgggcactaagagtcaggatggaagtccacatccaaccttgaaaccatcacttcctcttcccgctcttctgcagtgccttgctcgctcacagggccccagggattcccttctcctcgggccatcctaggaaagggagtctgagttccccgatttgccatacaagcatgccagctctaggtgctgcaggcttctatttggcttaccagcgtaagcccacactgttctcttgttgtaggtgtaccactcctgtctcaccagtggacgtacaggtccagaatgtatctgtgtcaccatttggaaaactggtggttcagagttccatagactccagcgtcttccggcacaacggcacggtggagtgtaaggcctccaacgatgtgggcaagagttccgccttctttaactttgcatttaaaggtaacaacaaaggtatatttccttttaatccaatttaaggggtgtttaggctctgtctaccataccataatcttacatccattccagtattggtcatatcatttccagtaataccgacagtacagcagtacaccatgctaccatcaaacgtcacaaactcatcccatactagtctgctgatgaaggttttgcagttactgatggaatcttaactatttttctttcgctggtctttgtgtgtttttatgaacttcttgacaatgagtaatatacgtacagtcatagttgggtatacaccagtataattaggacacgttggaaatgttaaattcaatttaaaatttcagttaaaatgagttacattttgctaaacatctgtatcgaaatgttaacagtatcttttatgtgatcttgtcagcaaatgttttcttttcctgttctatatgtatgtgtatgtatgtatgtatgtatgtaagtgcttacccatctgcactgtcagaatggtacagagcccactgcaggctgtgtagatagcctctatgtctagctgtgactaggcttcttgtctagcgactgagtgactagcagacctttgaaggcattgtggtacacctgagataaggaaacagggcacttgaggttttttagtgcccagtttctgtggtgtttagcattggccataggactcatgccaaaaagctgtatatcctcagtttctggatgaggaaggggacgcatcataactctgctctctgttgttaatttccccagccagagcaatgaaaaggatgcttccaaaatgtctttcttctctgtggaagacacttacgttcattgtagaaactttagaaaacgtaagagagcagaaagaagcaaatgtaaatcacccagagaggcagtccattcagatgtagcttttcattaaaagcagcataacgttaagtgtgttacttcaggaatgtcagtttctctgtactctggtttcaacttacatctttaaagatgcctgtgcagccagtaaggatgtgtttgtgggtattgtgctctgccagaacacatgaccaggttctagtcctagcaccaagaataaatgtaggtaggtaggcaggtagctaggtaggttaggaaggaaggggnnnnnnnnnnnnnnnnnnnnnnnnnnnnnnnnnnnnnnnnnnnnnnnnnnnnnnnnnnnnnnnnnnnnnnnnnnnnnnnnnnnnnnnnnnnnnnnnnnnnnnnnnnnnnnnnnnnnnnnnnnnnnnnnnnnnnnnnnnnnnnnnnnnnnnnnnnnnnnnnnnnnnnnnnnnnnnnnnnnnnnnnnnnnnnnnnnnnnnnnnnnnnnnnnnnnnnnnnnnnnnnnnnnnnnnnnnnnnnnnnnnnnnnnnnnnnnnnnnnnnnnnnnnnnnnnnnnnnnnnnnnnnnnnnnnnnnnnnnnnnnnnnnnnnnnnnnnnnnnnnnnnnnnnnnnnnnnnnnnnnnnntgctcattggctttgtggtcgcagctggcgcgatggggatcattgtgatggtgctcacctacaaatatttgcaggtgagcattgaattgttctcttcctggggacgccaaggcggcagggcaggcactgattgttcagcgggtgacacatctttcttttcctttctcctccagaaacccatgtatgaagtacaatggaaggttgtcgaggagataaatggaaacaattatgtttacatagacccgacgcaacttccttatgatcacaaatgggagtttcccagaaacaggctgagttttggtcagtgtgaggcaggggctttccacgaagaagcccttttgtgtacgcgtaaccgtgattttttttttttaaggaacccgcagtggcttcctttgtcttgtttcacctaaaacaagaagtgctttctgtcaaactgcacaggagttggcagggttagcagaaagagccccgtagagaagtggctccagacacacatgtcttccattgccttgttgatttgggaacctcacaaactgttggttggtcttcccactgacatgaccctgccttcttccttcctaaaggaaagacattgggagctggtgccttcgggaaggtcgttgaggccactgcatatggcttgattaagtcggatgctgccatgacagttgccgtgaagatgctcaaacgtaagtgtttcgggggcactcaccccctgtacccaccaccagtttatctaataggttcttcccccctgcccccacgctttgttttgctaaaatacatcactttcccttttagcaagtgcccatttaacagaaagagaggccctaatgtcggaactgaaggtcctgagctacctgggcaatcacatgaatattgtgaacctgcttggcgcatgcacggtgggaggtgagtctcgagttgccatctctctggttatcaaagtatgatttaggcagtgcctagctataagctacttgagagattttttttttttaaccaagcattttgttctattttgctaggtttcgttttccacagtgttcctcagaatgtagatttttataatttctatgctgggagccttcagactcatgtcttgtcatgattttgcaatgtaggttgtagttgttccgctgtgtggtcgagtgttggaactactcatcacagttgtgtttggtacccattactcagattcttatttctcccctccctctccacagtcctaaggacctctattctgccctcagtggatcaacattttaaactcccacaagcttttgggaacacacaaggtttctctttatgcagagccacttacaccccgcctttcctcattaggcattatatgtgtgtattgaattataatactctcccccttaaatggcataagcagtggggggcaggtagctttatataatgcggggggccgtaatcagtcatttgagagttaatgttgattttccttctataactgagagtggccccagcctcccagttctcaactgtacaccaagtagatccagcttttcactcccacaaaagcaagctggcggctctagcccctaagtcagagtgccaccaagggtgcgcaggcacactgttctacagaacaaagctgtgtagggtgagctggtgctgtctgtcctgagagagccatgggatggtaggcagcttagacaacgtctccggacagcccacagacccggcactctgcacaccatgaattgttcatgcgacagtatctacccatggcaattagttgcctgttaagttcggaactgcgcttttaaacatcctgaggaaccactcgtgttttcaagtagtcatgctcagaaaaacgggccggccgtttcaggggtttttttttttttttttttttttttttgccactttccagtatgggcttagctggctgttccctggttacttccctaccaggcttgcagctagggttcttcattttcatcataacattatggcgaggacccagaaccctgcctaccgtacacagcagtgaatcaaaggcttcctgtagggagcttgatcatagttgagcctttgaaagtattcacttgtggctaccgagccagccatctcgcctgtcccccaatgtcacttagacatccaggtagaaaggggcttgcttgttctacttcactcagtacaatgctgccttttttgatgagcggtgttaacagatagaattatgttgggactaagaaggcttagccactaaatctgaatgttaatagccgcggtcacccatgggtgtttctacaggaggcgggattatctatctaaggtatatcatcttgcctatacctaacattgtcttctatcctcatagggcccaccctggtcattacagaatattgttgctatggtgatcttttgaattttttgagaaggaagcgtgactcgtttattttctcaaagcaagaagagcaggcagaagcggcactttataagaaccttctgcactcaacggagccttcctggtaaggctgatttgcataaacagtcagctgttgacaggcagttcatggggtcataagggtttgcaatcaaggctgattcttttaaaaaatgagcagaggtgctcctaggtgtgaaatcagaattattaaattgtttaagcgtgattaactattccggaagttcagatagtagtacccttgaagattcaaattgagatttgtcactgatttctcttaaatgtgtnnnnnnnnnnnnnnnnnnnntttttttttttgttgtttgtttttgttttttttttttttttttttttttttttgccactttccagtatgggcttagctggctgttccctggttacttccctactaggcttgcatctagggttcttcattttcatcataacattatggcgaggacccagaactgttgcgcgcgctcacgaccggccaggaagaacgacgctgctacaggatccttctgcacacgtttattcagtcctgtttcttctttctctatatctcccttgtttatatctcccttgtttatatctcccttgtttttatatctctcttgtttttatatctcccttgtttatatatcgccctcgtttttatatctcccttgtttttatatctcccctgtttttatatctcccctgtttttatatctcccccgaaccctgggcctctcactccttttatactctctcatccacgcaccgcaggccacgccccctcgccagtcacgaggcttcagctaatcagggcagcaggggcaaatctccaccaaattggattcacctgtatcctggtacacctgcgcagcactcaagatgtttgtgtcttatatgaggaagtcaggtgcaagtcatatgacttagctgcagtccctggcgcctttgggactgccgccacacccgctccccacaattcccccttttttcttttttggcagagagaatgtctgtagatagcccctcgcagccatgccccttacccgtccttgggtgacaaacagcattggtttgatccctgtcttaggttggtgacatgcccagggagtcttatcactgactacctctctatcatgccaagccactcctggggagattgtgttttgcttgcggcaggtgcatcaaaaggccaggatgttgattaatctatggccagatcttaatcgctgcaagcaagcctcatgggtgaaggtagaggtctgatccccagtgtgcaagcataggggccctacacaaaaccatcccttaggctcatcacccagagaggtcttggccagctcccctgtcgtttttcctgggaaaagggaactaggacactgaaccttcatgcaatcagacgtgccttccacaggatgccaacagcaagctatcctctgtgcagtgcttagccttgcaccccacggcataacgcagcataatttcttttagagcggcaaaccgaatctgaggagattgtcccgcctccactgcagcaaaagcctatgctaccatggcgaaagtgcgggccgcacactctgcacctaacacatgtgccaaacacaaaacacacacacactataacaagcatacatcccagggctctcatccccgctcatcttccctgaagcaagggatagatggccagaggggctatatctttaaggggaattcagggatcaaaaagcgtggaaaaatgtgaacgtcatgtcgagctggtatcggcttctggaataccgaaaggatctcccatctcggctccatcctttatgcttgtgggatcatccaccacatccacaggggcaactggatcaggagcctcattcttgcagcgtctcaccaatctctccggcacccaaagaggttccatctggtcctgtggaaacacacaaacagaccctctcgcccacgtcaacaccagatctggtcgatcctctccaaatctccggacagaaggtccacctacaggtggctgctgaggaggcatagggaggcggcacaaaagctaattcgccttcctcctccgcctcagctcttttattttgtcctttctgtccacctgataacactgtgtctcctttctttttcctttttctttttaagcccttctcctcttccgacatactttcttgttgttctataaggattttctgacctgtcttgactgcctctacacacagtttcaaacagtaacagagtccatatatcagaacaaacaagaccaaaactatcagacctacccacaaagggtcaatgggagaaaaaagcataactacacagcgaggatctattgatcactacactgaggttatcatagttccttaacttgtccccaaactgcgaaccttaacttgtcccaaagccgggaacctttcgttaccttgtgcctgcttcctggcaactttatgcttgcctctattttatccgaggtccttcccaaactcctgggttactttgtgcctacttcctggcaactttatgctcacctctattttatcgaggtccttcccaaactcctggggtcgcaagtttcactcaccatgaacttaccctgccagcaaccactgactgctgaaagttctgaactcggtgggggagtcggttccccgtacgggccaccaattgttgcgtccgctctcgaccagcaagaacgacacgaccaccagtccttctaacagcagtttattcagtcttcatctttcttctttctcttcatcagtaccgttccccagctgaagagttctgaatccacgccggatccttctcaacagtctgtttcacgggaaccttcattaaccactccttccccgtgatgcagttctgaatcctccctgtagcagggggtcttcgctcatgcctgaagatgtttcttgtcccgggtttcggcaccacttgttgcgtgcgcccaactggccaggaagaacgacgctgctacaggatccttctgcacacgtttattnnnnnnnnnnnnnnnnnnnnatctcccttgtttatatctcccttgtttttatatctctcttgttgttatatctcccttgtttatatatcgccctcgtttttatatctcccttgtttttatatctcccctgtttttatatctcccctgtttttatatctcccccgaaccctgggcctctcactccttttatactctttcatccacgcaccgcaggccacgccccctcgccagtcacgaggcttcagctaatcagggcagcaggggcaaatctccaccaaattggattcacctgtatcctggtacacctgcgcagcactcaagatgtttgtgtcttatatgaggaagtcaggtgcaagtcatatgacttagctgcagtccctggcgcctttgggactgccgccacacccgctccccacacagaaccctgcctaccgtacacagcagtgaatcaaaggcttcctgtagggagcttgatcatagttgagcctttgaaagtattcacttgtggctactgagccagccatcacgcctgtcccctaatgtcacttagacatccaggtagaaaggggcttgcttgtgctacttcactcagcacaatgctgccttttttgatgagcggtgttaacagatagaattatgttgggactaagaaggcttagccactgaatctgaatgttaatagccgcggtcacccatgggtatttttacaggaggcgggattatctaaggtatatcatcttgcctatacctaacattgtcttctatcctcatagggcccaccctggtcattacagaatattgttgctatggtgatcttttgaattttttgagaaggaagcgtgactcgtttattttctcaaagcaagaagagcaggcagaagcggcactttataagaaccttctgcactcaacggagccttcctggtaaggctgatttgcataaacagtcagctgttgacaggcagttcatggggtcataagggtttgcaatcaaggctgattcttttaaaaaatgagcagaggtgctcctaggtgtgaaatcagaattattaaattgtttaagcgtgattaactattccggaagttcagatagtagtacccttgaagattcaaattgagatttgtcactgatttctcttaaatgtgtgtctctgtccttccttcagccttagtcctgtgggattggatgtgtcactacttgtagggaagaggagaaaggctgtcctatggtggttaagtcctggagactgcgcagactggccaagaccacccagcatatgtagactactagttatcagcattgttttggcatccgagtctctccccgcccctggtcccatcccatgccccatcattttactgcattatagtcacatcactatcaaagaacgttgtttgaattctggacctcatcgacattattctcatggacgatgatgcaaaggatgatggatgtatatgcaggttcaagagccttggaggaaacctagtttgatgcacaaccagagtagaagtcatggctgtggcttgtccatcctttcttccccaatgtgcttgagacccttcaggcccagtggatatcataattgccccctcgtattttatactgcttccattgtggagcggatcttacctctgtttcatgtttactctaagccccgggttcaaatcccagcaccagaaactaatatcatgaaatgccataccaactgtctttaaatggcaggattttgtctttggaggccttaaatccaggcttccaaggagacctcagttaatgggcgattaccatcgcccagtgtagcctttgccaccactaaagcttaaagtcccaagagaagcctcatgctttcatttcagtcctgtaattttgagttgtttaacatggtactaaaatgccaccaaaacccaccttttgttagttgttcttggacatagactcctcatacggaggcaagagcctctttgccttgtctggagactgggccctgtggtggtttttttgttttttgttttttaaactttctgaaataatggcctgaatcggtccatcctgtgtgatgttctttgcgctttgggatcccatatgggtttggagccaccagcacgctctgaaggaggttgttgtcatggtgtttctatgctaatcagaggcaggaagtactagaaatcttgaagagtctccagccaaatgttgcagattcaagaggtccagatggtctagaaaatcatccaaattattggtgtttatctgaaccaaacttgggttttttcaaaccttcttcccttcgtggctgtgttcaccatctcccccctcaaatgtcttcgaagtgcctgttgactttccatttgtctgagtaggggctaatttagagtctgaagtaacctgaggtaacattttttagctctgtttttccccattgaattctaactggattcccccccccccaagacatttaattccctgagaattggaccttagcgttgaatggcaaatatatgtatcccacagaacctgattttgaaactttattcaaggcttgcattgcttttcttgccctggagtcagtgctgcacggtgaagtgggtgagaacgggaacctggcctggcagtgccatggcccccacctgcctcacaagtccagtcccttcagttctgacacgggtctcgcatctctcctgcagtgacagttcaaatgaatatatggacatgaagcctggcgtttcctacgtggtgccaaccaagacagacaagaggagatccgcaagaataggtgggtacccaccaactagccagagcagcttaacacgctggggttgtaatcaaatcttgttccttttttttttttttttctcttgtctcagggagagggcttaggggtcaggggctgagtctgaagaaacatggggcagggattgtgcctctttcccactaactgaagcgagtacagcattccctggaaggagctaccggtggcaaaggaaattggccggtggcagttaacagtacacaagcaaaagcacatgtttttatatctactatctcactgttacagttgtgagattttgaagatagaccccccccccccatcatcctaaggtttctggaacccagctggggatgatcagatagctattggctttgtgtctaccattgttcctccctggggaggtgactggcctgggagtcgacactgcttatccactgctagctttgatactaaggctgcttctcctctccttaccactaagggttttttggttcttgttttgtttttttttttgttttttgtttttttttccttgctatcttcctaatagactcgtacatagaaagagacgtgactcctgccatcatggaagatgacgagctggctctggacctggatgatttgctgagcttctcctaccaggtggccaagggcatggcgttcctcgcctccaagaatgtaagtggcatggagtctcatgagaggagcacggcatcctttttttttttttttttttttttttttaaagccttgaacatttcctagtcctagttagaattcagagtgtcattttgaagtgtggtaaccgaaagcaggggaaaatttcgtttcttcacgttccaacttctgtctctttggaattcctgttctaatttctaagcttgaaagcgcaaacctgtctaaatgagcctccatgaatattcttttatatgcagtgagttcatttaaaagctttaagatgtaggatgcgcttctagaaaatagaaggatagtggttttatcagaaaatgggggagccaggagtgtgactccctcactgttactgtgcctggtaaggcatatgactgtgtatgtgagacccacgtactgtgtatgtgtatgtgactcacagaggatcaggacatgagaaggggtcagagagagcatggagcagctagggaaaggatagagacgggaagagagggatggcacgggatgaaagtgttccggggaggaaggtgtggccaagagtgaggtcacagtggctcttctagtgacattcccaggtaactaccaagctaaaagacaggctgaaatgaaagaccctcttccttgtgtccttgggagaagacgtcaagttgaagctgtgaaactttttttttttttttttttttggagaaaacgttcaaagagatgcatacaaaatgaactttcattttagaaatgggatttgactatttataatgcattttcctgtgaatggaaggaagggagaaagacgtttattaaaattgggttggaaagcaattatagtcattagagccccgatcctgtgaaacacaaaacgggaatatcacttgcaccataatttttattttcggtgtgctaaatactttaaaacgaaagtttctttttttttttcatgtaaacaccattgtagtattaaaatcatcttctctcggagagctgaaatgaatggctgttgctgtctttccttttctcccccaacagtgtattcacagagatttggcagccaggaatatcctcctcactcacgggcggatcacaaagatttgcgatttcgggctagccagagacatcaggaatgattcgaattacgtggtcaaaggaaatgtgagtacctttctccatctcatgagtctacccagggtgctttggtatccagtcttgattctaaattgttttctatgatcattacaactcctaccttgtaatgtcacatgttagtaccactaaggcttgttaatagaatttttagctataattgtataattgggggtgtgcgaaataaacaaaaatagccttaatttttcacgataggctgaaactagcaatccatttgattttgctcaactataacaaatgtagacctgaaggtcacggtaggctttctccccgcttcgtttgaaatactatgtggaaatgactacagtctaagatggtgttagagttagctgtatgcaatactaggatgcttgggtctcttaatcaatatagggctattaagtagattcataagtaatggttggtttgtgggacacagtgaagttttcaaagtgccagccttctgtaacctcagaacaaaccttagaacatgttgtcttccaatgtttatagtggaagaaactaaggtccagtatagttcagtgatttatatctgagatagctagtcagcagggtccactgggtagggaaggccataacctcctagatatatattcttaggtgcgtttttcccctcagcccatttgaacagtccatatttattcctggaggtcaatttttgtgtctgtcgtgataacgcagttccttctcgttcatcaccgtggcggcagcatctctgttggtaggctgtgcatgacttggttttgtaaggaagggtattgctggctttatatcctggctcagtcatacagttctgaagagactgtcaaggtcagattttttttttccaggaggtttgatgaaatcaacttcctggcttaatattcgaaggaagatgggaaatgcttcagtattccaggataaaggagcaaaataaggaaatggggtgtctgggcccaggctggccgagttccagcctggtcccatttaacgggggtgggaccgagtcagtacttgtaggagttactacatggcagagttctcagaacagggccaggcccattctcctgctttgtgttttgaaatccaaaccatcaggacagaggttgtgcccagaaccttcctagctcagtctgtagttgacaagtctagccgttgaactggccaattatttgagaaagtttcaaacaagggaaatgtatgtgacgcggcgctgcatggaattttaagtgtagtcattgtaaagtccctttgttctctgaaagatctttcagagttgtgaattcttaattattttccacgctgggctctgagtctacgggcctatgggccccttgtcagaataccatttcagatgaatggaatacttatatttagccaagaaaagcagactctgtcgaatgaccgttgtatcgaattctgtaaagcaaatttagtggtagacgatgggcgcgcttctttattacacggagcaacatatcataaaggctgttgtgattttcaaagggactgcgaatggaagttttcttttgtaattcctgtaaatactgcgatgggacgtgaagtgtctgctgtgaaggacaagccacagagcctcttttactgctttgtctagttttagacaaccctagatttcacttagaagttaatttttagatacccaggccccttgaattcaagacactaatagatcctcacttaacactcctgtggagaacgcagcataaagtctggggatagatagtagatggtttttatagtttgagaatcatctcctccctcaaccctccacccccacccccaccccccacgctaaaacaacttcaaccctagaagggctctcttcctactgttcagtcgtaaacggatttaaaggattgattctgcctcatgtgacagattaatatccagaaatcctgatagactgtaagaggcaaggtcagagtaagcttggcctgaccgagtggaaggaactggaatgtctcctgacataagcactaactgtgcgcgctcgcgcgcgtgcacacgcgcgcgcacacacacacacaccacagagatcagacacagctcatcagtgcctgctagtctgggtaaatcttaatgagctggacgttggtaggcatttttttatcctgcattgcctcagttgtcccatgaaataacaactcctggtatttgaagttatttttgttttgcaaaagatgattctgggcctggcttatccgtgtttaggtaacttctctagtaggtgcgtgaggggtgcacttgtgtcagaggtccaagagtgaatgggaagggatttggggccaggcagagaattctgaaacaacacttagcactgaacccttctgcctctctgttttgtcattcctacatgtagccctcctcattctggtcaaagatgaccggaccaacagccagccgtcatggtataaggcagatgtgtgaagggatgccactagaaagactatatatatatggtgtataaaaccacagtattttaagtgtttttttttcctcatgccactgcataaaatttagatcttagcagctaaaactaagtggtctggctatagcttgctgcaaagcagtctgggaaatgtagttatagttgggagaggccatatatgttgttgacaaaaaaaaaaaaaaaaaaagaagaagaagaagaaagttgctagttgaggccattactagaaggaaggttagaacccctggacttctctgctcttagtttactgtcctatactgactcaacacccctattttaaagggagatattagaattttgaattataagtaggggaggtggctggaggtcacaaggtttaaggtcctcgtctatcgctgtcttcattagctgcttgaatttgctgtgttccgttctaggcacgactgcccgtgaagtggatggcaccagagagcattttcagctgcgtgtacacatttgaaagtgatgtctggtcctatgggattttcctctgggagctcttctccttaggtaaaatgttccttacccaagatgccctcactgtctaaaagcttctgtcgtctcccgcccacatggacactgatttgccacctctctgcacccaggaagcagcccctacccagggatgccggtcgactccaagttctacaagatgatcaaggaaggcttccggatggtcagcccggagcacgcgcctgccgaaatgtaaggactcacaagccttttcttctgataatgtccttttgaaagacagaaatgttgacagtctttgctagcagggtttgaaatgtcactcacttggttcttgggccacccgcgctcaaatgtcatggctgtggttcttttcataatctcttgtcaccaacagcaccgaagcttttgacagtatctcacacacacggggtcttattctctgtatgtcactcacgcgctatgcacatcctggcacaggcccccagatttgttattgaagttgtcatgtgctgggcagcagaaagcaggttaagggaaccaggagtgacaaacaatgtcccctccccttcccacccctcctctctgcttctgcaggtatgacgtcatgaagacttgctgggacgctgaccccttgaaaaggccaacattcaagcaggttgtccaacttattgagaagcagatctcggacagcaccaagcacgtgagttaatgggccaggcctggaatcctctttctccttactctagggtcacagacacctcaggcttcaaaggacaaggaccaatctctcccacctcccttcctggttgaattataagctgggcttccttctgcgggtggaaggaaaacaatgcaagcccattctttctgcttcctcccacccacctccacccctgttctcatccagagagatgtgagatgggggaggggctggggctggggttctgctgtgtggcattagatggtgtcataaggtctggccgtgcttcctcccagtcctggaatgttgatcatgggactgtctggtctcctcacgtggcagggccagtcaccctgggtgggttgaggtgaactggaatgaaagtcatggctttcgtagcttgttacaacagtcaagtgaactttaaaacagccggaaggaaccagccagccgccgcaatggctgggatgcccgcagctgtgtagaagggttggctgtttgaacttaggacatccctctcagtaatgtggggagtgcggaatgaactaaagccattgtttcctctcttgcttctaaggaggaattggccatgtttactgggaccagactccatttaagccgccctccccctcccctgagccatctgcgggaactatctttcctaatagcgcaacactgatcttttcgagttagcacttgttctgaggggcatcaaggcacatttcaaatgaaacgccactttccacccaagtgcttttgattcctgacaaaccacctttggaagagccatgggtgccactgcaaattacaccagcccttgggttgcagttggctctagggatcctcagatcttcttcacaggctagctagtacttgctttcagacacaccccagccgaagagaaacattgcaggcagtgttgtacctcattctcgaaatgatttacctggggaaactgaggtataagccccatcttgatttttgaccactcttccttgtcttcaggattctgcaacagttgagcgggccccatttgctgggttttgtcaccaagccgctgtatttgaccgtgggctctttctctgcagatttactccaacttggcaaactgcaaccccaacccagagaaccccgtggtggtggaccattccgtgagggtcaactcggtgggcagcagcgcctcttctacgcagcccctgctcgtgcacgaagatgcctgagcagaaacccaagtccaacaggctttgctgctgtctccgaccccgtccttctggcttctgtgatggttacttggtttccctttgacttgcatcctattccagggtagcgagttccccaccccacctccaaccccactgtgattccgcctttacgagcacacactttagtggccgatggccttttcttttctgccatcagccaccgtcccgctgcgaaggtccgaactgtatgtatatattttcccaatagcaaagtagctcctactgtaaacagaaggactcctcctgctttagaggagaagggaagggcggggtgaaactggatgcccagagttcttcccccagtgctcccctgagtgtatttgaaaagtatggccagtagttcacttgaagaatagatgtagtcccatttggccctgagagccatccttaatgatgggagatatatgtagcaagactagaaaaggaaagccaagccctttgtgtagaaagcagaccattcttagaacagagggcaacggggcatcggaagtctggtcacgctaagaagaccgaggctgagaaggaacaagccaggggaagcgtgaacaatgatgctctgctctgggctgccgctcgggcttctgtacaactgacctggtttctcagtactttgctgtctgggagtagcattggaatcaaggcctcctccctagtcagcctttgtatatactcatctatacgttgtatgcgttcatactttggaggagggatttcccacaagctttcgtttctgtgtacagccctggcattagacctactgtgtgtaagaatagattaagagccatacatatttgaaggaaacagttaaatgttttttggttgtggttgttgttgttgttgttttaaagaaaaaaatgtatatgctaagcacaatctttataagacctcttagccaacatacttgctctgtctacacttcggaacaagccttccatgtcagagtggctttgcaggcaggagaactgaggctgtttgaaaaggttaccacaggatggagaaaacagtgcagtcctggtttggattctcacatagcagggagcacaagttaaactcagccttttataggcacgtcccggacatcgggccagtatctattcaagtgtgtatgtgtgtgcatgcgtgtgtctatgcgtgtgggtgagttgtgttgggaaacttgccctgcatccctgagggtcctccttcaggacccaagacgtaacagcttctgtcaccgctcctgtctctccagtttccctgcatgtcgctcactgtctagaatttactcaaagccgccacagaggcttagcggagtgaagtgccgaaggacctctttatttggagtcctcctgtatttaacaacactcttatcgtagacccattcattagaccttatgtaatgctgccaatccagggaaacagatttaaagtgtaccccgtagacagggcccagaggttcccttgtccttgccctcccccacaccacccatgatcactgtccaacataaagggttcagtgtgtacgtggtcatgtgttgtccttacaggattcaggtatgttgccttcacggttttccccaccccctcctgccctttatcctttaggccgtgtggccatgaacctggaagaagtgatcgtttgcacttgagtgctacactcttgcacctttccaaagtaagctggtttggaggtcctgttgtcatgtacgagactgtcaccagttaccgcgctctgtttgaaacatgtctttgtattcctaatgacttcagttagagtaaggagaatagctgttaatatggatgtcaggtacttaaggggccacaccattgagaattttgtcttggatattcttgaaagtttatatttttataattttttttacatcagatgtcagatgtttctttcagttgcttgatgtttggaattattatgtggctttttttgtaaatattgaaatgtagcaataatgtcttttgaatattcctgagcccatgagtccctgaaaatattttttatatatacagtaactttatgtgtaaataatacgctgtgcaagtttaaacatgtcacgttacatgtgggttttttctgatatgttgtccaactgttgacagttctgaagaattctaataaaaatgtaaatatataaatcaaataaatttttctgtttgttttttaaaggtacatttattcactcaatcagaaagtgttgtgtacaacatttgtgtaaatacatgcaggattctcattgtcacattagggtttagatccttgaaaattcaatagagatttattagtaattttagtgtgtgctattttgggttcttttaaaatttatcctcacgacccggaggtctctatttaagttgagaaatgtagaaaacactttgagagttttccacatagctatgattaacatttggttggttcatgggaagtgagtatttgttagaaaataacagtaaataacagcgatctcatgtggtccaagctaacgcacacagcatgttttctcctaaaacagagtgactaaaaattagcttcagtagtaatgaacaaggcgagaccagggagctggagaaagcagtttatgttcttgttggtgtagggattgaagtgatgtcagcgtgagggaagatagacactcttgccccaccatcagccttctgatgacatggttctggtcttactagcttccagaagagtttagtgctctcacttggagacctgtggtaggtatatgaggagagtgttctgtggctggatcgtcccatggcaccatagggcaccaaccagaccattggaactgtctgagaaagcctccctataccatgtagcctggtaggaaggaagggagggagggagtgggggaaacccttgtgtggtaacacaaacttataaatctgatacatacctgtaatctcagtgctaaggaggtggaggaggagttatgaggcttcctggctagccagtctagcctcgagtagtcaaggcctcaccagtgagagaagttgcctcgaaaaaacaaagaacagtgcctaaggagtgtaacctgaggttgccctctgacctccacatgcatgtggcagcacactcagcacacataaccccaccccacctcccccacacacactagaatgggttagaagcccaaacaccagcagtcttgactccctgtataggcatatacacttgcagaagtatcctctaagggataggaaaaggttgggaggtgagcttggatgaagacaagtcctttcgagtcaggaggggatttttgtggctaggaaggtctcaatggcaggcagtaatggggaagacagacggacagacagttatgctacgtttcagtcaggtgatggccactgccttgtgacaaacaggaatgaatgttaactgactatagaacaaaggggccttttcttgcagaatgcttccgctgtcatttagttagccctcctgggtttgagatcttgagttggaagcagttgaggagctcatgttattagcctgtcatgattttccccactgccccaggccctccttcaagctcaaattgagttctaatcttgacattagccctgtctttaccatttactggggtgtgaatttgagctgattggctcttgaaatataggtttcataggactacaagtaccatgatgcactggtacataatctttaaagccacctcccttatataccactcagtgtggtaaattaggcttagtagccctagaaggacagctcaagtcatagagattcaaagatcacttccaagtagtatcttcctcctaaattagtggctctcaacctttctaacgctgcgaccctttaatacagttcctcatgttgtggtgaccctcaatcataaaattatttttcttgctactttataactgtaatttcacaactgttgtgaattgtaatgtaactatgtgtttttgatggtcttgggtagcccctgtgaaagggtcatttgacccccagagaggttgtgacacacaggttgaggaccgctgtcctggcatgagatgactttgcagttgagatttctatgctcttataaaaattccaaccttttctacagtcactcaggcttcacttccatgttcactagtccctaagtataccccgctccttttccactgccagtgtcagcctcgcatctcctgtctcctaagtccccatcatgcaagatcaacaaacccatcccagtcggcagctgcccctcaattcctggactccatgcttctgccttcaactatagtcattctggctcctacctctgccctccccactttatctagtcttgaagtcaattaacatagtgcccacccgttccctggtatgtactggcccagtatcaaagcatgcggtccttgggagatggttctagcatggttttctatggctgtggtaaaataccacaaccaaaatatgactcagggaggaaagtttgtttcagtttacagttctccatcatgaaaggaggtccaggcaggaacctggatgcaggaatgaaatcttagaatgtggaggactgctgcatactggcttcttccttctggcttgctcagtgtgctttcttatatgccacctgcccagtagtggtagtgcccacaagaggttggggcctttcttgtcaatcattagtcaaaaccatgttcctcagacttgcctacaaacaaaatctaatggtgacattttctcagttgagggtccctcttctcagatgactctagcttatgttgagttgacaaaaaatgaatcccaacacaaaaggttatgagtgcctgaagacgtctcccttagcagtctgtggaattataacctacatctagatctgaatcttctctttaatcatggcaaatactgaagattttcccatgttgacatctcccaccttcgtgtcctggaaagacatccatcccagcccttctttggtccaacccaggtagcccatgctttggcctgagggagactggcctgcctcaccaccacctcgtaacatcatgagttattattgcacatctaaaattcccatgtccctttggttggtatgttaaatcaggtaaactttgtctgggtgttgagttaccatattttgatttgggtatggtgtgtgttcagttgaccattgaccatccaagatttggcacacaggagaaaggagcagtttcagttatggcaaattccaaggagtaattttgatgttatctttttaaattgttactgcatgtggcaaagccccttagtctaaattacttctccaacggtcttgatactcttaccttggtgctggattgaagtgtgatgactagagcctgtttgctttcacctgcttccagttttcgtcattagagaagtcagctcatgaggttgggagatcactctgaagttagaagtgtttgcagcataagcgtgaagaccccagttagaccccagttcaatccccagcaccggtataaaagccaggcgagcctttgtaggcctgtaatctcagcactagagaggcagaaacaggagggtctttctggattagccaatatggctaaattggtgagctccaggttcagtgacagactctgtactaaaaaacaaagtggaaattaatagcaaaacaccgaccatcaaccttgggactctacactcatgcgtgggcacatgatgtgcacctatgcacgtatgcagaagagcacacaaccacatccccctacacacacgcgcgcacgcacacacacacatgtacacgcacacgcgcgcacacacacacgcacacacgtacatgcacacacacacacatgcacacacgcacacacacgtacacatacacacatgcacacacacgtacacacacacacgcacacacgcacatgcacacgtacacgcacacgtacacacacacatgcacacacacgcacgtacacacacacatgcacacacatgtacacacacagacacgcacacacgcacacacgcacacacgcacatgtacacatacacacacatgcacacacacgcacgtacacacacacatgcacacacacgtacacgcacacacgcacacacgcacacacgcacacacgcacacgtacacatacacacacacatgcacacacacgcacacacacatgtacacacacacatgcacacacacgtacacatacacacacatgtacacacacgcacacacacgcacacacacacgcacacacacacgcacacgtacacatacacacacacatgcacacacacacacacagaagctcagaagtcagctcagtctgttctgaggatatttacatctttatttttatatttctctttgtctttggagcttaatactttattatgatatatgcaaacttgagctcctttttatataatggatttcatgagtctatctgcactttgcttgctcacttttaatcagtgatggaaaattatcagttcttttgaacttgtctgtacccacgtcctgcctttcttcttctgggactttgcggcatcttagctactctcctccttcgtccgtgtctttgagcacccgctctgttcttcatttactttcttcttgacattctatgctgcatggaacacatttcctattcctatttcctggatcccctttcagctccgggcctttggaaaatatgtttacttctttcattgagatgaaactaataagccaatgaaaagtgtatatttgatgactttattgtgcatttaatccctgcgattgggtttcaaattactgtcattctgaaactttccagttaggagatattgtgatttttaatcagatgattgtcagttgttctggcctcctgaaatgaagccacacctttcattttcattgcacagattcactcacagattgtctttgggctctttctggatctattgatcatttgaataacagagacagtggacatgatgacattgccatagtgcctaaaacacactgtattatggatgtattatgttttgttcttcttctctccacttaagcaatcccggaagagaagtattgctcatctcaaagatataaagattttgtttctgagggctttgctctcttgtcctaaacagatggctatggtaatgcagttggaaagaactctctagtgttctctcttgaatccaaaatacttattaatttacttaataattattatcattatttatttgtcatgctagacccaggcccctacataagctgggcaggcactagagcactgagccaccctcctagctcatctgaagacttttggcagcatccatccggccaacatatgagcaagccctctattgtcttttgctcagctgtgagtgaccatgatgccatttgctttcacctttaaaaaaccacaaagagtggtaaagaagtcagaatggctgctctgctatctcctactaacttctctaagagaatggtgggaatgaggttggactggaatgttcacatgagggaggtcccaggataggaaagtctcaggatttctactttttccactctctcatgtgtctcatgagtgtcctgtgccccacaggaacctctcttcctctgcgtttcaaagaactgccttgttcatctgagcctcatgagagaatcaactccctgcgctcacagagggttgtggaagcgacagaggacagaggaatctcagctttcctacttgatgtgaaagcatcaccttcccccgagggcaccagccatccctgttgttctgcctccacaagctacctccccccacccccacccccgtgtctccccccactgttgattacacccttgttggttgaatgcagcttttatgatgtgggtttttctgtgaagggtttgacctcccgagggctgggtcctcggtggagatactcctttcgtgagatgagtgttcttgagtggtggctcatctgcgtgtctccctccacggctggctttgaagtgtgcgtgctcttcctgagcgcctcggtgggactgtggtgtgttttgtgagagagtgacctttctctttgtggtcggtggcttagcagttgctgctgttccgtagcggatgaagaatgaggacagcagggactgtcctcatggctgcttgtttctgtatgaatagacggtctgaggcagctgaaaaccctgtgcctacacaacaggctgcctggtctcagtgccaaacttctccgttaaggcagttaaggcattgtttgtttctaatcaagctatgcgttattccgacagactgttgggtgtagaagactggtgtgaaggaaaagattttctctgtcccttcagctagattttctgctggactcaatagtttccatttggtgagctaagcaatgaacaactacctaaataaagtagctttgttaagagtacaggtgtctgacaggtggtgggggtggcacacgcctttgaccccggcacttgggagacagactcaggcagatctctgtgagttcaaggccatcctggtctaaagagcaagttccaggatagccagggctagacagagaaaccctgtctcaaaaacaaacaaaaagagtacagatttctaacaggttctggggaaggagtgctgtatttgattggttatgtctgttcagaattgggaatggggatctgtactatgtgtgctttcacatcctaagtgtaatatgtccatttaaatctaaatacatccattggtccagtctcttcaatgaccaactacaatagttattatttcattcaggaggaaactcaattgtgaagagtgtgttggctattcttggttgtcaacttgacgacatctggaattaactataacccatgcagctgggtacacctttgaaggatttttttcccttaattaaatcatttaaagtgggaagaccaactttttaaattttttaattgattatctataaatttcatatcatgtaccacaatcctactcaactcacctcttcatatttgccttccacccttgcaacctcctcccaccaaagaaaaataaaataaaataaaaaatttttaaagaccaaaaaatagcaacaaaagtctcactgtggaagtagtggtgtatcatggtgtgtcacacaatacacccttttgcccaaagagcttttacttaaaattgttcattgtagtgagtggttgccctggctcagggcctctggctccttctactccatcaatcctgcatcctcaccgaaactcctctcaagtcctactgttgccctgtgtcatggagaccctacagctttggatctgcagaaccagcccttccacgtgctctgtagatggtgtagatgctgggggtaggtcaactcaaagccctggatatttgcctgggtggaaactgagttcagctctcctgctttgatcagttgaggggtaaggccatctcatccactctcctggccttaggactggcttgcttgtgtccaggccaccagagccaactctactttgctgctcaggagagctgcaaaccactcttccaactttggggtgtgggagcctggagacccgcaggcccttgccaccatatggcagaataggggaagggaaaacccacttttaatccagatactttgaagtaggaagatatactttcattctgggccataccttctgttggcaatttctcaaaagggaatggagaaagataatggctctttttgcctgcttgttctcactcctgcttgcaagtccattccttcactggtatcagagcctacttctttgggattctagagtatactgaaaaccagctaagacatccaacgtcatggactgaacagctattggattcttaaccttccattggaagacagccattgttggactaactaaatcatggcctgtaaaccattctaatgaatcatctttctacctacctacctatctctatctctatctctatctctatctctatctctatctctatctctatctctatctctatctctatctctatctctatctctatctctttctatctatctatctatctatctatctatctatcttctacctatctgtcttgatacagagatctctttagaggagagagagagagagagagagagagagagagattcattctatcagttctgttcctctagaaaaccctgactagtacagagaagtcaaggtaacttgcccagggtcacatagctagtatgtagcaaagacaagatttaagtccaaagggacaaggttcagagtatgtatgtgttctaagtcattatgtcaagttgtctctgtgcattttctcagtgcagtagatgagaacaggggatagaaactggctaggcactttcaatagtaaagataaatatgatgttttctgtttgtttgttttaaatcttggccaaaatctggaatatctttaggcctgtcggcagcctcatctgcccaaaggtgacataagtaaataaaataaattttttgacataaataaagccaaaatatttttgattttgtgataactgtaggtcagggatgtcaggatgggggtctgggtttccttgatttatcttcccttataggagtgtcccactgttgaaaaccatcctgaggtctgaaatcatgaggtgcctggacacctgcagtggaagcagactaaacagttcattccttctctgttcctccatctagtaaagccttatagatagactccaggtccttgcccagttctaggcgcccccaccactgtacagggatctttccatctttctgtctcttaaactaactttctctctctctctctctctctctctctctctctctctctctctctctctctctctctctctctctttttgaatgagaatgaccccaaaatggctcatacaagttgagagcttagtctccagttgatgagctctttggaaagaattggaaggtgtagctttactggagaaggtgtgttgaggtgttactaggactgagctttgaggactcaaaaacccacaccagtacccccctcgccctctctctcttttgctccccgctccacctgtgggtcaggatgttgtactggctagttttgtgtcaacttgacacagctggagttatcacagaaaaaggagcttccgttgaggaaatgcctccatgagatccaactgtaaggcattttctcaattagtgatcaagggggaaaggccccttgtgggtgggaccatctctgggctgataattttggttctctaagagagcagggtgagcaagccaggggaagcaagccagtaaagaacatccctccatggcctctgcatcagctcctgcttcctgacctgcttgagttccagtcctgacttccttggtgatgaacagcagtatggaagtgtaagtcgaataaaccctttcctccccaacttgcttcttggtcatgatgtttgtgcaggaatagaaaccctgactaagacagatgtaaaggcctcacctacaattacagtgctacaaataatatctgttagcttcccaccatgctaagagtggaccaatcctctgaaactgtaagcaagcccctgattaaatgctgtttaaaaatcaatcaatcaataaatattaatagaaaagtaaccaagccattccccataataaaatacttctttctaaaacctaccttctgtgggcaatgaattaaattgttcaaatccacaagacacaaacagagccactggccctagaaagtctctaattctcacaaagacaccccggtgtccccatgtctcggtcaacggggacaaacaatgttagcccagttcagaagggtttgcctcacttttattcactacctaaagataccagaaggaggtttctccaccaagctgttgacccaacatgagcttcgtggaactctactgtactgctttcctctgaggtcgacaagagcgcagtcctaaccttacaaaaggagatgggatttacaaacagaaaaagatgagtgagtggaccactctccaccaactgtggctacctgtacaaactcaatccagccaatgttnnnnnnnnnnnnnnnnnnnnaactcaatccagccaatgttctagcatagatggggggagggctctgagcccccccaccccctattggctgttgatagcttctggtgagagatcactctttggatttcttgtgctccattggatgggcatacactcat

SEQ ID NO: 610 - DNA, 5132 bp, Mus musculus
acttgggcgagagctgtagcagagagaggagctcagagtctagcgcagccaccgcgatgagaggcgctcgcggcgcctgggatctgctctgcgtcctgttggtcctgctccgtggccagacagccacgtctcagccatctgcaagtccaggggagccgtctccgccatccatccatccagcacaatcagagttaatagttgaagctggcgacaccctcagcctgacgtgcattgatcccgactttgtcagatggactttcaagacctatttcaatgaaatggttgagaataaaaaaaatgaatggatccaggaaaaagccgaggccactcgcacgggcacatacacgtgcagcaacagcaatggcctcacgagttctatttacgtgtttgttagagatcctgccaaacttttcctggttggccttcccttgtttggcaaagaagacagcgacgcgctggtccgctgccctctgacagacccacaggtgtccaattattccctcatcgagtgtgatgggaaatctctccccacggacctgacgtttgtcccaaaccccaaggctggcatcaccatcaaaaacgtgaagcgcgcctaccaccggctctgtgtccgctgtgctgctcagcgtgacggtacatggctgcattctgacaaattcaccctcaaagtgcgggcagccatcaaggctatccctgttgtgtctgtgcctgaaacaagtcacctccttaagaaaggggacacatttacggtggtgtgcaccataaaagatgtgtctacatccgtgaactccatgtggctaaagatgaaccctcagcctcagcacatagcccaggtaaagcacaatagctggcaccggggtgacttcaattatgaacgccaggagacgctgactatcagctcggcaagagttgacgattctggagtgttcatgtgttatgccaataatacttttggatcagcaaatgtcacaacaaccttgaaagtagtagaaaaaggattcatcaacatctcccctgtgaagaacactacagtatttgtaaccgatggagaaaacgtagatttggttgttgaatacgaggcctaccccaaacccgagcaccagcagtggatatatatgaacaggacctcggctaacaaagggaaggattatgtcaaatctgataacaaaagcaacatcagatatgtgaaccaacttcgcctgaccagattaaaaggcacagaaggaggcacttatacctttctggtgtccaactctgatgccagtgcttccgtgacattcaacgtttacgtgaacacaaaaccagaaatcctgacgtacgacaggctcataaatggcatgctccagtgtgtggcagagggattcccggagcccacaatagattggtatttttgtacaggagcagagcaaaggtgtaccactcctgtctcaccagtggacgtacaggtccagaatgtatctgtgtcaccatttggaaaactggtggttcagagttccatagactccagcgtcttccggcacaacggcacggtggagtgtaaggcctccaacgatgtgggcaagagttccgccttctttaactttgcatttaaagtgctcattggctttgtggtcgcagctggcgcgatggggatcattgtgatggtgctcacctacaaatatttgcagaaacccatgtatgaagtacaatggaaggttgtcgaggagataaatggaaacaattatgtttacatagacccgacgcaacttccttatgatcacaaatgggagtttcccagaaacaggctgagttttggaaagacattgggagctggtgccttcgggaaggtcgttgaggccactgcatatggcttgattaagtcggatgctgccatgacagttgccgtgaagatgctcaaaccaagtgcccatttaacagaaagagaggccctaatgtcggaactgaaggtcctgagctacctgggcaatcacatgaatattgtgaacctgcttggcgcatgcacggtgggagggcccaccctggtcattacagaatattgttgctatggtgatcttttgaattttttgagaaggaagcgtgactcgtttattttctcaaagcaagaagagcaggcagaagcggcactttataagaaccttctgcactcaacggagccttcctgtgacagttcaaatgaatatatggacatgaagcctggcgtttcctacgtggtgccaaccaagacagacaagaggagatccgcaagaatagactcgtacatagaaagagacgtgactcctgccatcatggaagatgacgagctggctctggacctggatgatttgctgagcttctcctaccaggtggccaagggcatggcgttcctcgcctccaagaattgtattcacagagatttggcagccaggaatatcctcctcactcacgggcggatcacaaagatttgcgatttcgggctagccagagacatcaggaatgattcgaattacgtggtcaaaggaaatgcacgactgcccgtgaagtggatggcaccagagagcattttcagctgcgtgtacacatttgaaagtgatgtctggtcctatgggattttcctctgggagctcttctccttaggaagcagcccctacccagggatgccggtcgactccaagttctacaagatgatcaaggaaggcttccggatggtcagcccggagcacgcgcctgccgaaatgtatgacgtcatgaagacttgctgggacgctgaccccttgaaaaggccaacattcaagcaggttgtccaacttattgagaagcagatctcggacagcaccaagcacatttactccaacttggcaaactgcaaccccaacccagagaaccccgtggtggtggaccattccgtgagggtcaactcggtgggcagcagcgcctcttctacgcagcccctgctcgtgcacgaagatgcctgagcagaaacccaagtccaacaggctttgctgctgtctccgaccccgtccttctggcttctgtgatggttacttggtttccctttgacttgcatcctattccagggtagcgagttccccaccccacctccaaccccactgtgattccgcctttacgagcacacactttagtggccgatggccttttcttttctgccatcagccaccgtcccgctgcgaaggtccgaactgtatgtatatattttcccaatagcaaagtagctcctactgtaaacagaaggactcctcctgctttagaggagaagggaagggcggggtgaaactggatgcccagagttcttcccccagtgctcccctgagtgtatttgaaaagtatggccagtagttcacttgaagaatagatgtagtcccatttggccctgagagccatccttaatgatgggagatatatgtagcaagactagaaaaggaaagccaagccctttgtgtagaaagcagaccattcttagaacagagggcaacggggcatcggaagtctggtcacgctaagaagaccgaggctgagaaggaacaagccaggggaagcgtgaacaatgatgctctgctctgggctgccgctcgggcttctgtacaactgacctggtttctcagtactttgctgtctgggagtagcattggaatcaaggcctcctccctagtcagcctttgtatatactcatctatacgttgtatgcgttcatactttggaggagggatttcccacaagctttcgtttctgtgtacagccctggcattagacctactgtgtgtaagaatagattaagagccatacatatttgaaggaaacagttaaatgttttttggttgtggttgttgttgttgttgttttaaagaaaaaaatgtatatgctaagcacaatctttataagacctcttagccaacatacttgctctgtctacacttcggaacaagccttccatgtcagagtggctttgcaggcaggagaactgaggctgtttgaaaaggttaccacaggatggagaaaacagtgcagtcctggtttggattctcacatagcagggagcacaagttaaactcagccttttataggcacgtcccggacatcgggccagtatctattcaagtgtgtatgtgtgtgcatgcgtgtgtctatgcgtgtgggtgagttgtgttgggaaacttgccctgcatccctgagggtcctccttcaggacccaagacgtaacagcttctgtcaccgctcctgtctctccagtttccctgcatgtcgctcactgtctagaatttactcaaagccgccacagaggcttagcggagtgaagtgccgaaggacctctttatttggagtcctcctgtatttaacaacactcttatcgtagacccattcattagaccttatgtaatgctgccaatccagggaaacagatttaaagtgtaccccgtagacagggcccagaggttcccttgtccttgccctcccccacaccacccatgatcactgtccaacataaagggttcagtgtgtacgtggtcatgtgttgtccttacaggattcaggtatgttgccttcacggttttccccaccccctcctgccctttatcctttaggccgtgtggccatgaacctggaagaagtgatcgtttgcacttgagtgctacactcttgcacctttccaaagtaagctggtttggaggtcctgttgtcatgtacgagactgtcaccagttaccgcgctctgtttgaaacatgtctttgtattcctaatgacttcagttagagtaaggagaatagctgttaatatggatgtcaggtacttaaggggccacaccattgagaattttgtcttggatattcttgaaagtttatatttttataattttttttacatcagatgtcagatgtttctttcagttgcttgatgtttggaattattatgtggctttttttgtaaatattgaaatgtagcaataatgtcttttgaatattcctgagcccatgagtccctgaaaatattttttatatatacagtaactttatgtgtaaataatacgctgtgcaagtttaaacatgtcacgttacatgtgggttttttctgatatgttgtccaactgttgacagttctgaagaattctaataaaaatgtaaatatataaatcaaataaa

SEQ ID NO: 611 - protein, 958 aa, Mus musculus
MRGRAWDLLCVLLVLLRGQTATSQPSDGEPSPPSIHPAQSELIVEAGDTLSLTCIDPDFVRWTFKTYFNEMVENKKNEWIQEKAEATRTGTYTCSNSNGLTSSIYVFVRDPAKLFLVGLPLFGKEDSDALVRCPLTDPQVSNYSLIECDGKSLPTDLTFVPNPKAGITIKNVKRAYHRLCVRCAAQRDGTWLHSDKFTLKVRAAIKAIPVVSVPETSHLLKKGDTFTVVCTIKDVSTSVNSMWLKMNPQPQHIAQVKHNSWHRGDFNYERQETLTISSARVDDSGVFMCYANNTFGSANVTTTLKVVEKGFINISPVKNTTVFVTDGENVDLVVEYEAYPKPEHQQWIYMNRTSANKGKDYVKSDNKSNIRYVNQLRLTRLKGTEGGTYTFLVSNSDASASVTFNVYVNTKPEILTYDRLINGMLQCVAEGFPEPTIDWYFCTGAEQRCTTPVSPVDVQVQNVSVSPFGKLVVQSSIDSSVFRHNGTVECKNDVGKSSAFFNFAFKVLIGFVVAAGAMGIIVMVLTYKYLQKPMYEVQWKVVEEINGNNYVYIDPTQLPYDHKWEFPRNRLSFGKTLGAGAFGKVVEATAYGLIKSDAAMTVAVKMLKPSAHLTEREALMSELKVLSYLGNHMNIVNLLGACTVGGPTLVITEYCCYGDLLNFLRRKRDSFIFSKQEEQAEAALYKNLLHSTEPSCDSSNEYMDMKPGVSYVVPTKTDKRRSARIDSYIERDVTPAIMEDDELALDLDDLLSFSYQVAKGMAFLASKNCIHRDLAARNILLTHGRITKICDFGLARDIRNDSNYVVKGNARLPVKWMAPESIFSCVYTFESDVWSYGIFLWELFSLGSSPYPGMPVDSKFYKMIKEGFRMVSPEHAPAEMYDVMKTCWDADPLKRPTFKQVVQLIEKQISDSTKHIYSNLANCNPNPENPVVVDHSVRVNSVGSSASSTQPLLVHEDA

SEQ ID NO: 612 - DNA, 102756 bp, Homo sapiens
ttttttttgagacgaagtctcgctttgttgcccaggctggagtgcagtggtgtgatctctgctcactgcaacctccatctcccgggttcaaacaattctcctgcctcagcctcccgagtagctgggattacaggcgcctaccacaatacccagctaatttttgtatttttagtagagatggagtttcaccatgttggctaggctggtcttgaactcctgacctcaagtgatccgctggccttggcctcccaaagtactgggattacagctgtgagccaccacgcccagcctgttttattttattttattttattttatttttgagatagaatcttgctatgctgtccaggctgatctagaactcctgggctcaagtgattctcctgcctcagccttctgagtagctgagactacaagcatgggcccagctggctacctgggttccaagcctacctccaccacttcctaaccaggtgatctcaagtaagtcacttgacctttcagtgccttcctttccttatctgtaaaatggggctaatgatagacctacctcaaagcgttgtttgaaggagaaatgcgataatacaagcaaacacttccatcagcacatgaaccatcaggattaattaataaacattagctagtattatatcttgatatggttatggcccataaataagtcttaaagtcacttgtgtagtaaaaagatgggtattccaatcattatgccatgaatatacaattatgtattatttaatgataatgagaatgatgattattttggccagaaattttttttttaatatgcaagtcaatactattggtgtttttctttctttcctttctctctctctttttctggagagagtcttgctctgtcgcccaggctggagtgcagtagcgtgatctcggctcaccgcaacctccacctcccgggttcaagcgattctcctgcttcggcctcccaagtagctgagactacaggcacgtgccaccacacccggctaatttttgtatttttagtagagacggggtttcaccatattggccaggctggtctcgaactcctgaccttatgatccgcctgcctctgcctcccaaagtgctggaattacaggtgtgagccactgtgcccggccccctattggtgtttttcaactggcttaagctctctctctctctccctgacaccccacaatcttcacaccttcctctgaagctgaggtcaaaagcattcagtacttgcagccacatttccagggcatttctgtcctaaagggccttagggatagaagagacctgattcctaactgaaaagggtggcagcagagaagtttccacaacccctatcctcaggataaccgttcatcctggagtgcctagttgatgccttttgttctttttcactactagaagtgtcctagtatggatgataaattatatgatcaccctacttatacgcaactcaaaatatcaggtgtgttttaaaaaacacaccttgtagagtcaacctttcctcatttatctctttcctcttgcctcgggtccctgccaagtaaatatacccatctccagagtcactttaaccactggaggcctgtggtctagtaatgatcagagactcctgtcgttcggaatggtttatgctacagcacctgtataataaaggccatgttcatgttgctatttttccattgtgttaatagtttctgtcaatcaacaatgagggatagatggctcatgcctgtaatcccagcactttgggaggttgaggcaggcggatcatgaggtcaggagttcgagactagcctgtccaacatggtgaaactccatctctactaaaaatatagaaattagctgggtattgtggtgggtgcctgtagtcccagctactcaggaggctgaggcaggagaattgcttgaacccaggaggtggaggttgcagtgagctgagatcataccactgcactgtagcctgggtgacggagcaagactccatctcaaaaaaaaaaaaaaaaaaaaaaagaatgaggggcagtccctaatctgagatcatttagttgcaaatgttaagaattgcatacagattataaacagttctgtctccccagtcccccaccaatcaggaaacttgatttatctttactctttcttgtgttaaacacatatttactccttgtatttactcaaccatttaagacttttattcttaagaataaaaagaagggccgggcgaggtgctcatgcctgttatcccagcactttgggaggctgagtcgggcggatcacctgaggttgggagttcgagaccagcctgaccgacatgcagaaaccctgtctctactaaaaatacaaaaaattagccgggtgtggtggtacatgcctgtaatcctagctactcgagaggctggagactgaggcaggagaatcgcttgaacctgggaggtagaggttgcagtgagccaagattatgccattgcactccagcctgggcaacaagagccaaactccatctcaaaataaaataaaataaaataaaataaaataaaaagaagaagaaaaccaggtttttctcctgcagcaatgtaatgtaacttctttatcagatcagaaggaaaataataaaagtaaaaagagtcatgatgttcactatgagattaacatagatttggattatacaaatttatgacaataataataatatattggatttcctggggccaaaacaaatcctgatgaagtaaaaaacatagggaaaagcctccagatgcataatttgtcagcaattatggttttgtaaacacagtgcctgttgggtgcctggcctgcctggctttgttttgggcaagccctttgtttgagactcacagttgacttacagtacaatttcctccaataatttatgatttagtaaagaggctgtgacaaggttacaaataattgttatataagccagaaaaagatgtatgacttaaaagatgtctgaaccatgtgctaaggagatttacggaactctaaagtttagaaatactcctaaatctgggaagcaacacagatttagataagatgccctattactttatgtatgtatgtacacatgtatttctgtgcagtgcctttgttgtaggaagttctcaggaatgattgttgataattatgaaagagttacctattagtatcatattttaaatactcatatatacattgggactctagggtttttaaattcaccctacacacttccatttctcactggacttgttccttctggtttctaatgttcattcttccatcttggctttagattgtgtttccacttcccttttcaaatcaccctcccccctcacctggatcttccagatctgtttcttttttctttttcttttttttctcttttgagacagggtgtcactctgttgcccccagctcaagcgattctcccacctcagcctcctgagtagctgagaatatcagcacgcgccaccaaactcagccaatttttgtattttttgtagagacgggattttgccatgttacccaggctggtctcaacttccaggctcaagccatcctcccacctcagcctctcaaagtggtggggttgtaggaaagagccactgtgccagcccaagatctgttttctctggtgctttcagcagagcctacaaacacacagggctccccaatcttcccttaatctcttgcctcttccccctctttcctcataccaccaaacctgaaaactttccaaggaataaatccctgggcctacctcttcacttctaatgtattgttcaacccactacattctgaattctggccccacacactgtgtatgtgtgtagtgggtgtgtaggtgtgacaatatgtgtttaaagttaccaaagacttgcaggtttagggacgtgagatattacagtaattaagcacaggggctatgtcaagggttccaatcccggcataggattcaaattttgtgccttccttgtgcctcagtttcctcatttgcaaaatggggagaacaagagtatctacctggtagagttcttggaaacattaaatgagctactgtatataaagaatttagaactttggtagacgttgtcagttcttattatgattacaaactcccgctgatgcttttctgcccttatcttatttgacctccctatgagatatgatacagttgaacactccagctttcctgaaaatctccttttgccacagcccttttttgcctttctgacctctgcttattgggatcctttaaagggtattttttttttttttttgagacaaagtattgctttgtcacccacgctggagtgcagtggcacgatcttggttcactgcaacctctgcctcccagactccagtgattctcctgcctcagcctcccgagtagctgggactacagaggcctgccaccacacccagctaatttttgtatttttagtagagacaggtttctgccatgttggccaggctggtctcaaagtcctgatctcaaatgatctgctgccttggcctcccaaaatgctgggattacaggtgtgaggcaccatgcccggcccctttatggggtactctctgcctgtcccttacgggtattccccaaggagaggacatctttcctctgttttctttgcaatgtacattttatccagagtgacctcatgcaaatctgaggctgcagtcccctctctgcagcctggtcctgtgctgagccccaggcttccatatctagtgttaagaagtctggcctggtgcagtggctcatgtctgtaatcccagcactttgggaggctgaggtgggaggatcgctttagctcaggagtttgagatcagcctgggcaacacagtgagacctcatctctttaaaaaaattagccgagtgtgatggcatgtatctgtactcccagctactcaggaggctgaggcaggaggatggcttgatcccaggagttcgaggctgcagggacctatgagggcaccactgcactccagcctggacaacagaaggagaccttgtctccgaaaaaaataattaaaaaaaaaaaaaaagtcggccggacacagtggctcatgcctgtaatcccagcacttcgggaggctgaagtcaggagactgagaccatcctggctaacatggtgaaaccccatctctactaaaaatacaaaaacaaaattagccaggcatggtggcgggcgcctgtagtcccagctactcgggaagctgaggcagaggaatggcgtgaacccgggaggcggagcttgcagtgagctgagattgcaccactgcactccagccttggcgacagagtgagactccgtctcaaaaaaaaaaaaaaaaaaaagtccacgagcatctcgaaacaaacaggctcaactccaaatccttcactgtccactaacaagtacctccatgtcttgctggatgggagcacatgtagctccacaatacttttggtcacacaggcctattgaatcttaacttccttattcatcccctctcactattctcacctctgtggacttaattcagttccctgtttctcctgtggatcactgcattaggctccttaccattttcttcctgccttaacttttgccccctttcaagtcacccttcactgagtttcttcactatctttccaaaaatgtaaatcttagcacaacaggctgcagcttaaagtcctttagtgactccccgtagctcagaggatgaggttctcatttcggagtatttacagttcttgtctatctctgtggcctcgactctccccactctcctccaagccccatttccttgactgggcagcactccttgttcttcctattccttatgctgtttcctgcctctagccccgtgcgtttgtacttcccactgctggaacattcttctctcctttccctttccccgctcctgatccttcagagtctaatacccacctctctgggaggccacatgagctcactggacaggtgctcctctgtgtgcaaacatcactgtgcatggctctgttagagtacttcatgccatgtaatttttgcccctttattcatctctcccctcatttgctggaaatcctgtgagggcagcatctgtgtcttgtctaacttggtatccctgacacctaatacactacatctgacacagagatgttcaattaatactgaatgaaagctggaacgaagaccatacattatctcctttcagactcacaaactgtgaagtggttattgttagtatagaatctaaccgggggattgtattaatctattcatttcttcaactttatggacaaaagactttcagatgattgctgaaaaccaagaaaagctattaaaaagcaaacttgaaaaggattatactcttgttgtagtaattccacccctggttaggaatgcatacttaataactaatcagaagcaggcaagttttattcaccaagacattaatcatcaagtaatttatgatagtaaaaaaattggaaaaaaaagagagaaatgattaaacacccagaattatggtacatccataaaattgaacattatactgccattaaacagtgtgtttccaaaggatttttagtgatctgtaataatgctcatgttatttgtgaaaaagctggatagaaaactgaaaatataccaagatcttaaattatgtaaagggaaaaaaacctcacacataaatagagaaaaaagaaaggaacatattaaaacaaactcttcagtgattgtatcttgagtgccttttttgttttttataatttttggtattttccaaattttctacaataagcatcttttacagtcagaaatataataaaatattttcaagttcgagattttagctgtgttagttgtatttgtgtggcattattactctttcttctgttgatggtgcatcagtttttctttggggatgcacccttccccatctcaggcctctggtgtgaagtggatccctgaccccggcttcaggggtgggcacatgactcagacatggccaatcagcatactccatccctctggctccttcccaatgggcacatgacttaagccaggtcagtgagactcggtttctcccataaacttttacaggagatgtttatgggggcaggaaaactctacttccgttggtactagtgagctgtaagcctagagctgccctgagtgtatacaaggttggcaaaacaacacaggaaagtattgaggataaaggtggaggaaagtgtacgtgcacttgtgcacacatgcatccacacacactcgcccttcaagtcctgataactttgagtccttggatctaggaaagtctgaaacactattgtccctggactttctggttataagagccaatacatttaggcttctttgtttgcttgcttaatttaagctgcttctataagttgcaatcgagagtccttgctaaaagaattatgaaaacaatgaaatacataaagcacaatccctgaacatgcccaggactatcacaaaatacagtatagaattaatccatacatcctacctgagatataaaacatttccatcattgccaatgttccattggacactgctgatctataatatagttccttatatattacagcatatatgtccactcatagtgccttatatatatgcttcctttctttatgtaacaggcagtgggtattattaaaaacagctaacaaccctaaaggtacaagtactggaggctctctgttgtggccagcattaaaattttaattcctggatctaaggagatttagcgtgtctcaaggttgggctgggagatattttagggtatggttttttttgtaatcagtacagaaggatttcaatattgtgtcaaccaataaggccaaattggtgtgtactggctgaacataagctctgttagcagatattatagtttcttacttgagtacctattttccctgctggactgtgaattcccctagacagagactttgtcttactcatttatgtgggtcttatgcctacctaggtgctcaaaagatatttgctgaatgaaaaacaggaatgacggtccaacatggtataactccctattcagtttttttttttcctgatagaagttccgtgcctagaattaaattgcaatatggtctcttttcacccactcttttgaagatgttatcctctccaatatcagctgattgaagaagaaaattgtaaattttctctctcaggcataatgttgatattttaactcatagtgattttttctcaatacaaaatgaattttagaaataaatcaagatcccagaaacttatgattgctttgagtggtatcttttatctgtcatcctaagaaaaacatgagatctgatggcccagagcacagagacctttggtatttcagttctcctacagccgcatgactcgaaccttttgctgggagattgggatgtaggtccccatacttgattataaggactgtgagggcaggggccacatctgcatatctgtctattaataatagtactcctggtacctagctcctccttgcttcacagcagacactaaacaaatgcttgctgagtgagtaaatacttacatttaaagagaggcaattatacacattgatcatttgatcaccctctagcactgataatttttaagtgattagctttaaaaatcatttttcttacatcaacctgggtcctcacactattaaacaacaggagagctttcaatattaaatgaagtggggcagctgggcaactgtaaattttggatgatacttcagagaagagtctaggtgtatctgttctatccctttttctgatgggcatctgccatttatttttccattcttaagctctcaggagggatgtcttattagtttatcagaatgcatagggaaagctcatctttcttggagtaggtcttccaataagtgttcaagccctgggtcttccctcactacaataataaacatacctgctctaccctcctcacaaagctgttatcgtgagcatgaaaagacgagtcgctgtggggaagaactattaacccctatacagatactgttgttgctttccgttcaaggatccaccatgagactgtgggtaaggcactttctgggcagtgaaatcgggcttaagagaatcattgtacttttattttgctcctgggaccggcaagggcagttaagagccctagccctaaaactgtcgtctgttacagaggcagagaaatcattactggggttggcagcgttggggggaggggggaaaacgtgtatgaaaacctgggctcccagagcaaacttcgccacgcgccctccatcgcccctgtctccacacaagtcccggcaggggcttcttgggcggaggccacgccgaccaataggaacccactgtgttcctacaggttacgaagcaggtggagaaattgagcagaaacaattagcgaaaccgggctcagcctttaccgcggtgccaggagctcctaacaggcctggaggggaatgtcggggctcaatttcctaacgctcccctccccatccccatgccacctccacgagcagcggcgtccagcctcctcccgcccgaacgtgctcgaggggcgggcagtcgacctttattgtctggggagcacctggcaggtggcgggcccgtgccctaacgtgtgcgtggtgcccagcttcacaaagcgagcgggcagcacctccttggtccgggaacggcctcagcctggccgtccacatcccaggggtggaaaggtggagagagaaaggggctccggagtcaagagcggggagagagggcgcgcgcgccctcctcctcccggcgggcacggccccccggcattaacacgtcgaaagagcaggggccagacgccgccgggaagaagcgagacccgggcgggcgcgagggaggggaggcgaggaggggcgtggccggcgcgcagagggagggcgctgggaggaggggctgctgctcgccgctcgcggctctgggggctcggctttgccgcgctcgctgcacttgggcgagagctggaacgtggaccagagctcggatcccatcgcagctaccgcgatgagaggcgctcgcggcgcctgggattttctctgcgttctgctcctactgcttcgcgtccagacaggtgggacaccgcggctggcaccccgaccgtgcgactactcggcgaagcctgtgcctgggagggtggtacccgccagggtgcatccggagagaggactgcgggccctcagtgcccgtgcgttccagcctccggggagactccaggtggccctcggactctccggcgccctgcctcgctcacctgcgcgaggagaccccagctgctggtggtgggggacgcgaatccggggttcttcgggaatggggacagcaagagggggttaggcgtgagcgaggctgcaggctccgtgcgagtttggggtggcttttgtgccgacgttgcgcggggggcggaggcggggggctcaggggtttgcaccgagcgccttctcttgccgtgcgaggcgcggccgcagcttccttttgttaaaagttgcgtgtgtgtgaccggcgcccgggaggacctgcctgcaggttctccgccgcgctgagggcaaagttagagagccctttctctgctctgcggctactgccttccaaccgcaggcgctctttgtgcccagagctggggaccgacccgctgccgcctctgctcgcggcgccacccgtggagaccaatcgaaggctgcggcgtttccccgcctccgggttaggcttttgcgctgggagtgcgcggcgtggggctgttgtggggccggactcccgcgagcctggaggtggtggcgacagggacaacttgggcagggcgtgtggaaagcagccgctaggttgcagactttttgctttcgtacatcccgtgctcgcccctttctgccgcggcgccgtttcattcctgccgcgcgccccggggcggctggaggctgtgtttgccgcctgctccgggaaggcaagggacagcgtgctgggactctgcgttccctgactccaaccgcctagcacgccggccagagtgcccggcctgcctggcgggttctgaaagcccctagttcccggtgtctgcgacctgtattcgcaggtcctgttttcttcggaaatttttgagattcgtgaccgcccgcctccccgcccccgggacttctatacttcagggctgcctgggggtggggtgggagatggcgtggaactttctgcaaatcctactcagttcttaaagctataacagaaatccaggtatatccgcgcgggaactgggtcttaggtgaaggatttgcaggttgctggagccccttggtcagattcctgcctcccgttcccttttttccaggtgtcgctggtgcgggcgagtgcaggtcgcccagctcacccctgaagccctgctatctcccaggtcattttttaaaacaaacctttaaggttaccctgatgatgtaaggatagaaagtgagtcttagctggaatcaagcgcttgaaaggaagcggcgcaatgaacggttttgagactgtcgactaccggtcagtttctctataaagtctccaggcgcagtctgcagcgtcctggacttgtaactattgtgagggctttcctgtggggggcagagaggccttgcatctggacccctgtgcagcaggaggggtcagcaggggtcacgagggagtgttcggattctctggaggatttgatcacctagcttaaaacaacacatctggtctttatgtttttgtgccttgacctttttaatatcagttaagctatgtgaactagaacctagtaggagactagaaagaccacatcgaatatctcccttttaaaaaattaaaagaatcaatggttttcttctccccaatagatttttggcaaagggaattttaaggtctgtctcctgggggggcagtgtggtgtaacgacaaagccttgctctgtcccctgggttctcggtttctctgccatttcttggctgcgtgcccttggccaggttgcttagggcaggttgcttaaattctgggaaacgcagtgtcctccagagtacaaggaggcatctgcatcatgaaggatcctttgggtccagaattctcctccaatgttctgagtgtagactcagcactctttttaactattcccctggcccctgtctgcctctttgaaattcctctgcctctcctgctcacagggaagtcatagagtatgggtgcatctgaccggtctgcccctgactgaagcaaggagctgtggcttatgcttactgcccttcaattcccatatattcctctgcattgccctttgagggcccccgccccccaagtattacagctcctgtgcctaacaggatgaacctgctaggaatagtgaatcataccttccccgtttcgttcctgcaggtgtgaggctggagtcattctcagcagctggacacaaggcactctaaattattatcctgctggaaataagagaccccagataattcatttatccctattctgttttttcccccactcattcccattttttttctcatgactctgtaaatcatgtaatgctatgcatttatagcatgctttctaatgggccttaagtttcgtatgacatgtgtggtgtacatagttgttgctcttcagttggaaactgtgtgccaggccttttgcttggggctttacctatttctagtagtctcaatgagcctaggaagtagtactattattacccctaacattttacagctggagaaactggctaaggataagccctaaatcatcagtggtgaagcctgatgagattggctgcatgtgcccagctctatagccattcacatgattcaccagaatctgttgtaagactcattcaaaaatatttaatgagtttttactatgtgccagggattgttggaagttctgggaatacaggatggccaatgtcactaccttcccaattttggtgaaaaatatttagaattgcgtgtcttatgaaagcggattatttgtggagggaggattaattaaattttagcttggaggaagggctgtaggcatttgaccctgtggtatgttggcttagttgttagctatctcattccagttagcgtccctcagaaatgaaggtaagctgtttctaaaaggatgatgcaagccagttaaaaatccatctcccactccaaaacataaaaatggtcttgtgcataggtgtgaaagagaacacccccaataatggctgatgtcattggctatttaccctggatagcatggtgagaaataatgacaatctaccatccaaagccattttttctcccaaaagaaattctcatcagaaatgtgccaagtattctgcgggcttcccttggagaacatttatgtacagatgttgtggtggtgatgaattttgctgctgttgttgacagcccttcgaagttacccttagggttttgactcatttcctcaagtctcttccagctgattaaagaaggacacgaggaaatgaacctcggtgtctctagcggaattctcagagctggcctgcagtgtggggaccccttcaaggtagtggtcaaggctgtggcagctttttcttcagaatgaatgtagtttaagagttggcaggctaggatgtgggaaatgctttcttttgctgcattaatgtgcggtaacttttaaaagttgagattgaatgacatttgcaggaatccaaatatgcaaatttcatgtgcagttttggtaacttgaatagatattgccacagctataagtccggattgaagaaggcctggggaagagttagaggaggtaaaagtttgcctggagggcaaatccagtgtaaatctttgttgtacttagagaggaattgagttgagtcatagagaggaattgagttgagtcggcttggcccagcagctctgatttctgacattttttggatgtgatcatacagctcatcttttgacctaagactcttaataagtaaagagcagttgtaatctgatagcccgaggagacatgttttctttggcctacatgatgctttttagaaaacattgaggcgatattaaacaatctagagattttttttaaatcaagatctctatttctgtctcctctttaagaattgaaggtcatggcccctgtagatgaggcctgtgctcttcaggttgcattaggctctagggctttatcctgccatcccttaggcattccccactgggccctggtgagtgcaggaatccaaatatgcccctgggaccaggcagatgacaagtgggaggagacaggccggcctaccttgtgttggtctgatggcttcatgactgacagcttgatggccttagagcaaattgtttaacctttttgagctttcattgtccatcctagttttgccacttattagctctgtgactttcggcagattacttaacctctctgtgccagtaaatgtgttgctacatgtaaaacttttagagtggtgcctcatagtacaggctcaatatgtgttagccataattatcgtctgtaaaacaggaattattattgtccctaaaatgggaataatgcctactcttttaagatgattgccctaaagattagaaaggcattttttttgtttgttttaaagacagtatcttgccctgttgcccaggctggagtgcaatggcgcaatctcgtctcactgcaacctccacctcctgggttcaagcgattctcctgcctcagcctcctgagtagctgggattacaggcacccgccaccatgctcggctaatttttgtacttttagtagagatggggtttcaccatgttggcctggctggtctcgaacccctgacctcaggtgatctacctgcctcggcctcccaaagtgctaggattacaggcatgagccaccatgcctggccgacagttttaaaaataagctttaatttttttggtcttgttttatttagcttttgataagagttaggaaatcactagtcctagagattgaatagatcttgaactttttttttctccaggggggaaaaaaaaaaactacacatcttgtaagattctccaacataacatttgtgtctggtacttttcccattcatcttatgttttagctttcatgcttacattttggttatgacacacttttgttagacatcttcccatgcatacctttctgacaggttttcaacatttttgcaaaatttaaggtttaagccaaattattattcaggacatgtggcatcagttaattacgagcttgggctctgaaattgacacgctggatttttattccagttctgcctcttccctgctgtgtgctctgggacaagacacttaacctctccttaagcttcatttcctcatctgtaaaatggagatgatgacatagggcccctgcgaggattaaatgagattctgcatgtaatatgcttagcatagtgccccgcatagaggaagtgtgtggactccactatcaggctgattttcttatgttcccctttcagctttgcctcttagaaaaaaattgaaaacgtgtaaacagaatatgtagagtggtttttttttttcgtattaagatgaagttgttaattagtggtaatgcatgtttatctgcttggctctttgtttagccgtattcttgggttactttccaccaaaagagatacaaatttcttgataaaagtttaggttgggggaatgtctgcaaatggccattttctgtaggtgaataagtacatgtagttcacctagggtccatgaaagcagtcaaggagcttttccatgactgctttcactaggagttcaaggaccaagctgaacttgtccattgccccaggctagacacagcggttagtgttcagtaagtattagtttaacatcttttctattctccagcacttacactaagctttgaacataaatggtcagtaaacattttggattcagtttaacaaaggcttatcaatccccatgccttggtcctacgttacaggctgggggtggaggagggccagggcaagagcacagcccctgattcgaagtagaatttggttttcttaagtgtaaagtgctctgggcaggattttcaaggagatgagcttaaatcttgatgggcaggtaatagagatcaggaatcagtaagagcatccacataggagataatatttgagattaatttctgaaccttaaaggaagagggcagtgtagttgtggcttcagctgaaaaaaactacagtacaaggaacaaggcattaggatcttacttcaggattatcaaacctttctattggtatgatggctgggggtagggaattggctgggaaggtaagactcctcttactagcctcaaggagcatggagggaatgtgtatttagtgctgagtttggtctaggttatgaagaatgctttgaagtcaaggctaaggtggacttgacccaggagtggccccccaggctttgcatactagtccagggctgcctgttccaccattctgtccaattagacatactccccagcctgttccaatagtctgacgaagcgagaggccaagccctgccttaaaacttggacactcccttgctgtgggcaaccaagactaagggagagtctgtttttattatttatttatttatttatttatttatttatttatttatttatgagacagggtcttgctctgttgccaggctggagtgcagtggcacgatcatagttcaccgcagcctccacctcctgaactcaagtgatcttctcatctcagcctcctgagtagctgggaccccaggcgtgtgccaccacaccggctaatttttttatttctatttttgtagagaatagtctcgaacttatgagctcaagcgatcccccagcctcagcctcccaaaatgctggggttacagatgtaagccaccacacctggcctgttttttttttttttaatagtaaaacatacataaaatgaaatttactaccttaatcatctttaaatgtatatttcaatagtgttaagtacattcatactgttgaacactttcatcttgcaaaactgaaattctatacccattgaagagcagctcccctctccttcccccagcttctggcaaccaccattctactttctgtctctgaatttgactattccaggtaactcgcaaatgcagaaccatactgaatttgtctgttttttgactggtttatttcacataccgtaacatcctcaaggttcacccctattgtagtataagtcagaattttcttcctttttaagactgaaaaatattccattgtatgtatagaccacattctgtttacctgttcctcctttgatggacatttgggttgcaaacaatgctgtaatgaacatttgcatgtaagtatctaagggagatttttcgtggagactatttaggagggttaaactcatggctgcgagctacatgttggggagctgggcagaagatgggctctttagattatctctgagtgaaggggtagtggacctgggtattagggtacatgctttggaaagaaagcgcccttaagagacacgaggaggataaaggtgcaggtcttctctcattcggcgtatttatgggcaccttctgtgtgtcaggcactgatgagattgaggggaaggagaactggaattatcatgggtgtaggtaactgggagtattgttgatactatggaattagtggaaataaagccaagaggaggggtggcctatttgagggagagaatatgatgttggactctgctgggtttattcattgattatttgtgagctgcattttcttgaaactcaatttcacagacatggagggaagacgtcaatgaaatcttagggtcaggtccctgtaagaaataaaactaaaccccaaagtcacaaaacatggctctataatattacggtagcattggggattataaagaatggtatgttaactgtgaaccagtcttatggtgaaaagtaagttttcatgaaaaggagtgtatactaggaagagaatcctgtattcttctctgcattaggccatgtttaaggtatgttttttgtttttctcagaataaaatggccatactgggtatagaggaggacatagaattgacgaaagctttgggaaataggtcctttgaaagcaacttaaagaaattggatttattaagcctggagaagataaggtgagggaaggtttagtgaatgacagtcttcaaatatttttagtgtgtgagtgaaaagtagaacaaaatgagagtcatttaaattgccccagaaggaaattgaaaatttttttgtttttgttttttgttttttttgttttgttttgttttgagacagagtctcactctgtcgccaggctggagtgcagtggtgtgatctccgctcactgcagcctccacctcccgggttcaagtgattctcctgcctcagcctcccgagtagctgggactacaggcgcacgccaccatgcccagctaatttttgtatttttagtagagacggggtttcaccatgttggccaggatggtcttgatctcttgacctcgtgatccacacacctcggcctcccaaagtgctgggattacaggcgtgagccactgcacccggcaatttttttttttaagggaaaattctttcattagaagggttggcagagactttattcagttatagggcctttgctggagctgtgaagaaaaccaagtaattgtcattttgaaatggttcttaggtcctccccaactcagttggtttgatggccctttaagggcctgcctgaaatcgtttgggaataattcagaaatgggaaaataaccaaccgtttttctttcctcactgccttggctgtggggcagagtttctcataaatgctgaatagactctaacataatccactactatagtcacaatttcggctatattgataacagcaagtaaagaacccacagcctaaaaatgggttattgatctgttaggtgtggcgggatctaaacacagaagaaattgtacggtgtggtagcttaaactgagtgtcaaaataagacaaaaggaagctcaaggtctagagaaatccataatctatcatttagccctaccctaagaatcgctgtgctataacgcagcatgtaggcagaaagtctgtaagcatgaaggacggctcccaaagtccttttctcttgattactcaggggtggattggttacccaccactctgactaccctttccatctgtcctttccctctggtcattttgtggtcatggctcagtggcacgtttgagatcagcccatggtccagtggggaaggtggtagaaatgacattgcaattcagcagctactgcttgataacattttattaatacctgtcactttgaaattgatgagtcttaagatgggatccttgcctttaaggatcctaggacctataggaagatggtcctgggtaggcgccaatgttacaggatttgtaataagatttaagttaacaattccagtcctattcattaccattggtttggaggacataggcatcacttcttgaatggccaattgaaaggaagataggggcctgaattaaatcttaaaagagtggggtggaatttggtcaagatgtgaagaggaaaagcaaaggttagagttagccggaaggctctgctcccgccgacagaacgtctgtagagagtagcggaagatgagatgggataatttttagggcacctggatttttattcttcaataattgaagtctttcctgcagtgctatatgtgatgagatttttgtaaatgtaatctggctaagtagttgcctattcagagaaataacttttaaaaatggaaaagtatggatatcacttttgcatgtattacctgtgttgtatgttcgatgcacatccagtatggatatgtattttgagttgtttttaagtccaaggctaattctgctcccttctccctaccgaccttccccactcctagccaagattagagattttgtgggctcaacttctgattgtggcagtagatgacctttcatttgcttattaacatattttaaatatttagcaaaataatacaccttgtttatgtcagtttattcattgaagcaaagatagcaacaaacaagcctgcaaaccttgataaggagcctgtgtggtttggaacatcttgagattcttccctggatccccccgagtcctgttttagaaacctattaggggcacactggtggctgccctccccaacccagggagtcttcggagggaggaggaggtggctgtttgtggtgggcagaactctgtcacttaaggaagaggcgtgtctgatagcacttgccagtagtgaatgcctcattcttgaccaagtagaaaaaagataagagggaaaatgaaaaaggtgaaacggttctcctttaccttgtattttaaattgcttagtgaggcaaaatatccaccttcatttgggtttaccccaggtaactcatttcacagggtgttagaacatttcagagggtgttagaaaattccaaacaatggccgggactcccagtaatttaaatataatggcctatgcgggttcttaagcagaggaattagttaacagagttagaacaaaggagagcattatcacaaagagctctggaagttaatgtgtctctttttattggaaaagaagtatttctagaacaggattcaattggcttctggggaaaatatttactggagattttagaagtgtgaaaggtggcaggagacgttggctgtctgttattctacttggctagtgcacacttaaaaataaaacaagactatgttaaaaagatcttgagaattctacttggaaagactgaagtaaagatagtacaggtacttttcaaaggatataaattttggcttataaagtattttaaatgcaattccatcccaactttcacaatgcagacttcctttttagtggctgatgttgaaagaaggtaccttagaaagattttccatttaagaaatggttgatattgatatttatttggctgataaaacaccacaaggactggtttttagaattttttgtcattgttaaatcaagccaggattcttaacctaaaatatgttaggatagctaatgaaaatacttaattggaatgtttaaatgtttctctacttattttagtatagtctgtatatgtgcagctgggaaatagtatatacgtttttagccgcaccaaaaagcatcactttgataaaagaggaccccccccccttgcttttttaaaataaaccagcatatgtagaagggtttgtgagtttttttagtagatctgaatgtgttgcccaatttacattccagcattttcaagggatattatttaacatgatcatcttggtttcagaaccactgcctttcaaagagtctggcccagagcattgtgtgtgcctgcgagtgaggtgggtcccccacggggtctagtggctttgcgccatactggccactgggaacaccagctctggcggtacagcaggggtacttaacattacagctttattcttcattcttttgatcccttctgtatctttaatctgcccttataccagaaatccatagatttattcacaaataattattgaagcatcggaggtgtagtagtgaacataccaggcaaaagtctttgtcctctcttggggcttatgttttagtgaattatttttctctccaggagagagaaaagtccaggagtccagaaaggaaaaaaaaaaaaaaagaaagatgtaatttgaggggctatcatagaaagcagtttaatttagacttatttcagttccatattgtggttagttaaggaagaaagagaaaagaaaggtgatgcagagggtcagagggtaccagttcaaaaaagaggaaagccaaagaaagcaactagaacaataggaaaaggagattcaggggctgggggagatgggcaggagtggagtcagggaagctttgtgaggtgcttttcactacctgccaccagtgctgccctccagagggctgagcaccagctccatcccaccatgtccctgccccagtttctgtaacttcagagcagcaggcctcttgattcaacaggtgtttttgatggaggatttacccaagaggattgactagtgataggtgtcttcactttcaggacctttggagcctttaatgtgctttagtctgcaggtttggaactgtttgttctggaatgtgccggaatgctctttcacatctgagagagatgtttcagggtccaggctagatgctctttggtatctctccaaggactggagattctgcccctctttttaaaattcattcatgtttttcttaaaatatgaccgaactcctaactcttgctaaccttacacctgggattcttaggccctcagctgaagaacttgatgaatttcaactttaaagaggttcttctaacacttggccatttcaaccaggctttgctataaagtcctgtgaaattgggggactgaaagctaattacttggatcacaagttgcctgtgaaaactgcaaggacctgctgtcagggctcattaaaccccaaagtatggcaccttggcatgcagactactctgaccaagaggagactggaaggcctcagaagccaggtctctgttctttcctcctggttcctgctcccttttctcccgcaaagtgagtcacagaaaccagaattctttttccccaaggcaggtcatagaaactagaactcctctctcccaaagccagtcataaaacctagcaagttcactctcccttcttcctggaagaccctcattcccgaggggtcctgccccatccccaggggaaggggaattgtacagagcgggcttgctgggtttcaccactctgtccatcactgttaggccagatcctttgtgtccaatcacttttctgcatggctgttcattcatcaaacctaaatataaaaataaaggttttccctggggaaaaaaatatgacagacttcagttttaataataactgttgtaataactgtcggtctgtttgacacggtaccatttagccaccatcagccctactgcatgtcaagtttcaatgctcctgttactgtagctggcctgggtgaggtgccagcagagaggtgacagggtgacttcatccggctttttgcgttttcactttagagtggcctttcacagttccatgaaatgataagctctccagtttcaaatgaaggacgcctcaaattgagaactgacaccattgcattcctcaggatgggaaagttccttctccatcaattcttgggcactggagtaggactcttgctgcagatggtattgttctggttctcgagaaggaatccaagataaaggctgtctggggataaaagtggtaccctcttggaatatgggcaggaaggcatccctagtgaccatagccttggttgaaggtattaaggaggaatcttgaggtgcttgtctgggtgtcagttgacaatttcaatgaaattagcagcattaggtctataggtggctgcttaactaattatgaactcagctgcttaaatatatttgctccaggtttcacaattccttttatttacagtaattatcactggttagcacctattgttttgggtgagaatttcagggtctacatttaagtaaaccctatttaaatttattagttgactagggaagggttaaaaaagcagtaaggagtctatgccttctagagtattccctggcttgtttgaaaatgtgttagcagccatttttcaatatgaaagaactgaactttaaaaaaaagtatatttttatttatggcaacatttcaaataggatagtgtaatgaaccctcatataaccatctagcttcaacacttaccaatacggcctctacccactttatcttcccattattgggaagcatgtctcaagcatcatagaatttcatctataaatattttcagtatgtagtcctaaactacaaagaccttcttttctgaacataatgatgatgccaatgtcaaacccttccaaataaatataattacataatgtcattgaatagtattcacattttcctattgaagatacataaaaatataaacaaatgtatgcacatttaaaagaaagcaaacaagatctacacattgtaattggttgatatgtcctttaagtcatttcttctctgtaggtgttagccccgttttggttaaggaaactgcagttgtcctgtgcagcttttcattctgattgcattccttggtcttcacctgtaccattttgaatatttcctgtaaattggtgacttagacgtttgatcatactcagtttgattttttttttaatgagggtactgtgtaagtggtgtgttctcttgttctgctttctctttttggtgtacctttgggtatttgtgaagattcatattttttgctagatttgtatttttggttttaatggttgccttcagactgatacctttctataatacccttgtctgctgtttttgtgggggctattttccattgttgctaccataatatttaaattagccagcgtttgttctttgctctctctttactctcctgagctggggattggaagtaatattcttttacttccagttaatatctaaaaggcaatcagcaagcatattctacttttcggaacttcacctattccccatttttctgatggctatactcatttttcagagcatacagcaattatatactctgctgtctcccttgttaccatcatttagtcttagctctacaggtaaatatctgtttaatgctggcggccagtctttatatcatggctttcctggcattttggttttctgaaacgcaccctctaatagatgccttatgggaagtagttcctgaattatatgtccacaacggcgagtgtgtagtctgtatatttaaaggtcaggttggctagtataaaattgctggcccatcttatctttgcttggatacctttattattttactgtattgcattttgccataaagtggcgtcaaaatctgatgataatcttattttctatccctcaaatttaacttggtatgtttgcctagatacccaaaggaatgtttttccacctttattctttaaagcccactagttagttttatagtattggctgctgtaggttgattattttttttccatagacacaatgtgctcgctgctttaatgtgtaattttaagagttcttttttatttcctctccaataaagatttcatttaccatttgttctgatctttgttggctttaggaactcccattattcatgttagaccttcttagcctgtattctgtatctgccactttctctcaaatccttttaaccgcgtcataattcatttgaattgaaaaattttcctcctttccgtcttctggttcatttaagacactgttcatttttatttgctctcgtgttgtctttacctgtcatttctgaaatgattattttctttatttttaattcttagttcttttgcctccatttttaaatcttcattttcttcaatcaactcatttctgagttttaaaaattctgatttatgctgttcttcatagcttctttcatttagttaatttctcttggctccttctgaaatattaggtcatagctttcctttgtgcccttctggcgtgattttattgtttacacgatggatgtcattctgctccttagtttttctttaaaaataactatgtggaattcaactggattcttttctgttgttaaccgagttttcctatacttttaggagggccagtgtagatttcctagcatcagagatttaggagactctgttagttgttttcattttattttattttatttttgagacagagtcttgctctgcctccctagttcaagtgattctcgtgcctcagcctcccgagtagctgggattataggcatgtgccaccacgcccagctaattttttgtatttttagtagagacagggtttcaccatgttggccagactggtcttgaactcctgagctcaggcaattcagccgccttggcctcccaaagtgccaggattacaggcatgagccaccgtgcccggcctcatagttgttttcataaagtggtaataaaaatatgaactctactttcctatatcctaagactttttttttgtccctacccacactgcttacctgcccagactttcccttacctttgcccctatttcctcatcttagatctcatccccagcagcttctccccagtgtggggctttgccttggcttgctaattcataggagtcagacccctcccactccagaacattctggcacattggacatacaggtggcacagccctctccgcactcactaattaaactggaacttttttctctgtctactctcaggatgaccctctgagctttccagtgagtgcctgatagtggttcctgtagctgatggtagtttgtcatctagagttgttgtggatgttgtccatggtttttgagtctgctctctgtcagtttttatggttggggagagtcaataattatgctgccaccaccatcttcccagaatctatattgacattttaacacaaaatttggcaacctttgggtcaatgaaatctggataaagtcctgtcttgaaatctcaactcagaggtagctgcttttcaaaatgatttgcttccaaaataagttattaaaaatttgtaactatctgaaaactgattactatggaaatgaacactgtatggcctacctaacattagctttctaagcttattgtttatgagaaaatatagtggctgaaatcatccgagtgccaggaaactcactgctgagctattatttctgagaaaaatttataagaactgacatgcttttgtcattatttgtttggtgtgagattccttgagttctgaaggagagagtgctattttacagttttaaaagtattaaatcacatttatacttaatatcatctaataaagataacagcatttcttaattaggtgtattttcctctgattttttcccccactgaaaaatttgcatatctctaattataatcatttctggaaaaaatgctgctagggattgacatgatattaatttagatttccagaaatactaaatttccttcctccaacctgagttttcctccaattggccattgatttaaattacctactaaaaggttacaattttagaattgacctcttacccctctgcttttgggaatggccattatcctaaagccatatgaagaataaggacagatttctcaatagacatactggaaacttttgttatttaaattctggaagatagagtaagattgtttttagacatttcctcttgttttccacaaaaagattgagaagaagtaatttcaaacacagggctggtcgttaagaattctttgcaaagggaaacaggcttaatgtattgctctaagtgaatgtcacccaagaaaaattaagggaaaagtgaatactcattaagcaaattgaccagcaagcgttctgatgaatgttgaaacaaatttgaataaaccaattttgtccattagtgtgcttttaaaccaatgtgattgttttggcctaattattttctgttttgcttattcaaatgtagaatggctgcagaattaactattgcagcaattatctgattagcaatttagaaaattggtgaatggtatctgactactcaccaagaaatatctggtattttacagggctgtgtggaagaacacagactgtccagggaggatatttgctgtttttcactcactacaaatggcagctcagaggatctcactggattagtatgggctgtggatgtgggctccgggctctcagatgtagtgcaccagattgaggtctgatgtgctgcagaagttgtatttgccacccggtgtcactattctggagtcccgtagctgtgactggagaattctgcaacatttcccacttctaaagcttggggattcgagaaatctgtgcccgactggctgccaaagcttgtcagggggacccagtgctaggccgatttctaggtgtaaaagccaggcagatttgctcactcaagaaaatctgtttttgcaggtttgctttgagttccaagatacagatcctggtaaaattgtttgctgcgctaatgccctgagtttcttgtggtagctgggttcccgagtgtggtctggaccagcagcatcaggatcacctgggacttgttagaaatgcaaactctccgcccccacccaagaacctgctgagttggaaactctgagagcagggcccagccatctgttttaacaagctctccaggtgattctgctgcaggcgaaagtttgagaaccactggccttgagtgtaaaaattactgggctttgtcacagctgtcaggctgtgctagttaaaaagttaaagccctcgtggattcttcaattctcttaatgtcagaacgtcagaccagggtgcaattctcagttctccttgtgtcagactaagaaagatagatatgagtttcggttagtccagacaggaaaacagacaactggagtaccatgggacagtgctgcagtagaggcttcgagaaacctgcatgggtggagggagcaggggaagagtggtattttcagaggacaaatacgattgtgtcctaccctgattaaaacctgtcagagactgcccagtgctcttggaataaagtctgtctccgtagatccctttcaagcctccagtatctccttttgatctccattttgcacacagcacttgcctcattgttggctgtggagtgcacgctgcacccccaaaggtgtccagctcctatccacccatctgtggcctctgcaggagctgcccttctgtccactgccaggggcctcatgcttctccctggcctcctagtgcacttcacagcccagctcccacccgtcctttgcaatcttctctgacctcccagggtaggtcagatcagccctcattgtacagcgtgcttgttcgaacttatcacattgtaattacctaattgtataattattggtttattgctgatgtggagttaaatataaactctatgggtgaggggtggggaattcttgccctcttgactgtcccaagggcccagcacacagcaagctttattattggatgaatgaatggtggagcagtcctcatctttgttgttaggacacatgggctggttaatatattacattttgattgaggtgtcacctgagctttagacccctccatccctcccgcccccatccccactctcatccccaccctcgtcccaggagcatttgccaccaccatctcattctactatgggaaaggcaggtccctggcactgtggcagcgaaatttcataacttggttctaacttggggtctgccctgtgggacactagagagaagttcttgagtatcagtatttcagggatatggggaaggaagaactcctttgcttttgcagacattcataatacatgggtcagaagccagcagcctggagtaaaggtggccccggaaggttttcagggaaagtgactcttgcctcctctttcctcggggcttccaagaaacactgcctccttctgtcacagaagttgatggcaggctgggggttgtgggttgtgtttcttcccacccacttccaaatctatttgttagaagatacgcactcctttgccttttagtcaatttactttggcctggttgaagccagtgttttttattcctattctagaaggtaaaggcatggaagttgcccttcagaagcaacagctgtgcaacattgggacatttgtctaaaataagaaactcagccttgctgatttaatagaaagcttgacaatagcttataaaaatacatatattgagaatgagggctcatgttttgtgaaagattggggtttcaagacctagagggtaaagaggctgacgtgcttaatgggaatgttgcttttgatagaggaactggtaatctgttcactattttatttgcacgttgattgatgtgtggtttttgttttttacatttgaggctcaacatattctcttatacctatcgtaaacgtctgctagattaagtgaatgtaataaaacacagtaaatttgggaaaaattataaacacaattcctcactcactgtcagaataccgtagctaccatctgccaggagtgttgatagcaggaagaactataattttgtgctttgataacctatgttgtctgtttccttcatcttcatcagctgccatttttcttcatagcttcaatgcattccatggctggctcgctccttccttccttccttccttccttccttccttccttccttccttccttccttccttccttccctccctccctccctccctccctcccccaatccctgtgaggctgtctccctgctccttcacgttgccttacccccttctcttctcttcttgctgtcaagtgcagtaattatagtagtagtaacaacaggaccattttatttgagtataaagcatttaaaggatttgaagatggagattctgacctattttacccctatagatgtcaaaactgaagtttgtagaggtcaaatgagttttcccaaagtctcacattgcaatccatgcatgtctgactccaaaacccacacctgttttcataatattcctcttgttttcatctgctcacccaagctcagagaagcaccttaatttccagtgtctgatcctccttctaaactttccaatattgctgagtaaagttacaaagctggacccactttttgttttaaagctccttttttggaaataatttcaaacttaaaggaaaattgcaagattagtacagagaactccagtacaccagttgttaacattttgccacatgtattttgttttatatacatatttttttctgaaccatttgagagtaagttgctaacatgaccccctcccccacctttgctgtgcccccttgaagactcactgaaggagacagccttgtattattctatgagaaacactgaggccacccagggtgagttcctctgcctccacccaagtgcagcctttaccttgtccctctagagctgagggccctgctccaaggagtgacactgtgagctgctcacttgtgagccctttaaattaaactcatattctgaaacacatgcactgccttcctggaaattggctctctctagcacttaaaaaacagatcctcctctgtggcagggtaacacaaaggcaagtgaaaaggggctccctgaatgtttctaccaactccagagaggggagaaaggagatttgcctctgcttgttatccggagctgtaggtgaactgttctgctgctggtaattgaagtctatctgcagaacagttatcaagggcagtaaccttttttctagcaatggcctcagataaaacttgtttttcttattaataatttgtttttacttcctttggtataaaccatccctatggctataaagtgacatttttgaaagtggaaatagaaggaaaaatgtcctgtctgttcagtgtgggatggaggggaaggtgcaattttccctatttgacaggcccattaaagcaggatttcagagtatgttcactagcaaaatgtactgatttacccattataatgaaaattagcttaagtatctgagtcaagtataatttatagcatttttaagagctagaaaatcaggcctttataaaatgtagatcataattgaagacaggttttaaaaatgccttagggaaataatattaataaaatgtcaagacgaatggataaacaaaaatatagcatatacacagtggactattattcagccttaaaagggaagtcaacttttacaaatgatacaacatagatgaaccttgcagaccttatattgagttaaacaagcaagagacaaaaggacaaatagtgtgtgattccacttatatgaggtacctagaataatgaaattcatccagacagaaagtagaatcatgttgatcaggggttggagggagcagagaatggtgagtcattatgcaatatttctgtttgggatgatgaaaaagttctggaaatggataatggtgatggccgtacaacaatgtgaatgtacttaatgccactgaactgtatacttgcaaggttaaaatggtaaatcttatgtcatgtatattttaccatagtaaaacatttcttaaatgccccagttgccagatatatgtgtatatatacacatgcacacagataggcatatgtgtatgtataaatgttaatcagcctctcacttatctgtgtttcatttgatatcattcaaattagatgccataagttagaactagagtttagggttgtcacacttttttatgtcttgaagttttcattcgtccttttttttttttttttttttaatgagaaggagttttgctcttgttgcccaggctagaatgcagtggcatgatctctgctcactgcaacctccgcctccccagttcaagcgattctcctgcctcagcctgccgagtagctgggactacaggcgcccgccaccacgcccggctaattttttatattttaggtagagatgaggtttcacggtgttgggcaggctggtctcgaactcttgacctcaggtgatccacatgccccggcctcccaaagtgctgggattacaggtatgagccaccgtgccggccttatttgtcttcctcaaaactccatttcccctcctgagcctgcagggaattgacattttgcagaagcttgagtttcctgataggaggaaatttggtgattagtgaatattggagcgcctagctcacactcgcccacacccacacctgtccaggacagtgctaacatgaaggcagtttgcacttgtcaggtcctcctgcaggatcttgttgcaagaatctggtgatgcccatctgtttgtggagtgtgcagccaggaggatctgctcggaggtgagactgcaccagggctcccttttgtatgtcctaggtcttgggggggtgaagtctttgactagtgtggctgacctttgccatgctcttttgacctgtttctttttactttgttctgaattgttctttaagtgaaggaagaaaatgttcaaagaagggacgagctcgctaccccgaccccaaacttcacagatggtgagggccttgttctggtgtttattggattccaatccttagtgcttttctggttcatgtttcaatatgtgctttccagaaatcaaaacacagaaatctacatatttacggcagcggggatggggtggggggtgcggggaaacgggggactgtgctgggctgttgggaagaacccactggaaatgagaaagttcctcctttctgctcagggatggatcccagtatattttgcttgtcacatccagaccttatccaactccccaaagactgacttcataatggcagagaaaggtttcctcttagtctgtctctgagatcaaaaggggaggtctttcctcaagcattaggttgtatttttgttaggatgagtgagtgagaagagaatatattaagtagtcctatgaaggtctttgctgctggtaaggtgtgtgtatctaggagaagtctgaccacataattagctgagaaaggtccgtctttgagtgtcgaatgatacttgcatcttcatagttaattataagatgtcagagccgtaagtcaaatttcatgtttaggtccttattctaattctgtgtccaaagagtagtataaaaacaaagtaggcctggcatggtggctcacacctgtaatcctagcactttgagaggccaagtcgggtggatcacctgaggccaggagttcgagatcagcctggccaacgtggcgaaaacctgactctactaaaaatacaaaaattagctgggcatggtggcggaggttgcagtgagccgagatcgtgccacttcattccagcctgggaaagcgagactccatctcaaaaacaaacaaaaacaaagtagatgtttagttatatatttatattataagagaatcactgctattcattcttgccacaaacatttgagtgctttctatgtacaagaactgaattttctttttttttttttttttgagactggatctctctttgtctcccaggctggagtgtagtggcacgatcacagctcactgcagcctcaacttcctgggctcaagcgatcctcccaccttagcctcccaaggagctgggagtacaggcacatgccaccatgcctgactaatttttgtattttttgcagagatgatgtttagccacattgcacaagctggtcttgagctcctgggtaagcaatcctcccgccttgacctcccaaatttctgggattaaaggcatgggccaccgtgcctggcccaagcactgaatttttattaatgtaagagatttctttgtcttttttttcttttttttttgaggtggagtcttgctctatttcccaggctagagtgaagtggcacagtcttggctcactgtaacctccacctcccaggttcaagtgatcctcctccctcagcctcctaagctgagattacaggcacatgtcaccatatccggctaatttttttggtatttttagtagagacagggtttcagcatattggccaagactggtcttgaactcctaacctcaagtgatccatctgcctcggcctcccaaagtgctgggattacagatgtgagccactgcgcccggccgatatttctttgtcttgaccgtttttttttttttttttagaagacagagtctcgccccgtcacccgagctggagtgcagtgacgcaatctcggctcactgcaacctctgcctccctggttcaaacgattcttgtgcctcagcctcctgagtagctgggattacaggcatgctacaccacacctggctaaattttgtatttttagtagagacggggtttcaccatattgaccatgctggtctcaaactcctggtctcaagtgatcctcccgcctcagcttcccacagtgctgggattacaggtgtgagctactgtgcccggcctgtcttaaccttccgatggggcctatgtgtttaattccaaacatacaatgtaggatgattaaatcaggataattggggttatcccatcacctcagcatttatttcttctaagcatttaattacagatcttagaattgttagtggctttagactctttactttgtcaaatgagaaaaacaaggcctagagaacctaagtaacttgcctaatgatttagaatccagaactgctatgtctctaccagtatatattttccccttcacatccttcactaattgcttaagagcaaaagtatgcagttatggccgggcgcggtggctcacacctgtaattccagcacttaggaaggcagaggcaggagaatagcgtgagcccaggagttcgagatctgcctgggcaacatagtgagacctcgttctccaccaaaaggtgggggggtggggaagacaaaacccccaaaacccaagtgtaactacctgcaaaagtatgcatttatacatttcatctaatatatacaaatattaaatatttaacagacaccaaacatttaataattttgcttgtcttctccagcctgagaaaagctttgacagatgtcctgtctctaaaacacactcactggaagcttgagtcgttgctgctgggtcctcttagtaagtttccttagaagcacacagaacatttaacatgttctctatcttgggagtgctgttcaaaaagcagaagcagcccaagggcatcttcttttgccaccaggtggcacgcttgtgaattgggaactggtggaaggaatgagtcaaggtgagggttgcactaaaatgaatctcccagctgggcaatgttgaggaatctgagtggggaaatgcttcattgcagagaatgaagtctgtctgatttgcccagagatcacaaaaataaaagacagaaaagcagaacatgaaaatgctacaggaaaggtgggatcggcacaaatgataccttggcactatgtccgtgtggtttaaggcagaaaactgaagggctgacttggccctgaggaggaaactactcagtagcagaggcaggaagggcccaaaccacaggtgaatccacccaggttgaacgcccacacagaggtgtgtgggtggggtggggtggggtggggtggtgcagcctgactgcctccgctgcaaaggatgtgcctttgtgtgcagtgtgacatccctctctagccttggcgaacctgggaaacacttcgtctcacatgtccttggaaatgtgggacccacatgtaccatgggctcctttgtaccactgagagtctcctgaaaagagtaggtccaaaaaaaggggggcttgagcccaaaatgggcttctgcaccttatggacacatgcatcagctcctgggcaggtcaacttaggagcccttctagtcatccctctggctatccctcccctcagttccttctttctttattgccatcttcctctgtggatgttcatctccccaactcttcattctgagccttctggaagcaccctgtgtcttcatgctgccatcaggcactgtcccccacactcactgactccgagggtcctccctccacctcctcccccaaactcctccctgacaccagccagtccccacagttgctgctcccccggcagcacgacaaagctcccttcttccatgtcccacttctgccataccaatggccgggcctgcttctgctgtaccagttgccaggccctgcatctagagatcctggtttgactactgtgggcaaagctctggtggttccgacatgcagctgggattgctaatgagtgtatgagttctatgattgtttctcctcactgctgtcagtggccagtcctgtgccctggagacttgagggtgggttccccatccttctctgctccccaacctactaccttgtcctgaggttctagtgtccatctattttgccattcaaagtaatggcaaaaaccacaattacttttgcaccaaccttctatagaaggccctgtgcactgtctgatctggaatttcctggttctcctttagcagtggagtcattgtcatctctatcctacttcagccaccctgggccttgtcatttctccctggcccctctgttctttgtagtctccactccctccctgggggatttcatggacaccactaccaccctctgtgtgccagtaagactccagagtatatctgtggatataccccacctcctgcctccagtttccagaacctttttgctgctgcctgctgggccaaatgcctcaaaatctgttttacccctccaatctattggcaccccatctccccatcatgtaagacaaaaccagggatatttttctccttgcttcttcactgtccagggccagcccacccaaggtcccaggctcacctggcataaagccacccctccccttcatcccaccacctctggttgatgccctcatcagctcttttctgggtcgctgactggttgtctcctggctgacctttctccaattctgttccccttgcactgtccttcactgctcccagaggagtcctcctaaaacatacatctgcagctcacccccttaccatgacggaggaggcctccgggggttctgccctctgtccctctctagcctcacaccggcagcaattctgaatgattttgtgactcctaggcactgactccactagttctgtgatatttggtcttgaatgtctctcccttctcccctgacccaagtgatagacctttctcctcttctacccctcagcctggctgcacacatcacttgttttgagccctaggaatctttttctgagccttctccacttgcccactgccttagtttcccagctcagttctacataatactctgccctgttttagcctgtacttgcttcattgtatggtaattatgtgagtctgtcttccccactgggctgtgagccccttctttgtattcccaggccaaatgataggagctcaattcccatttcatcaataaggacacgttacacaagtgcttgctttgttactgatccagccttgtttgccattaattactgacactctagctttagctttatttctctgttctgtgattcccctgtgtcaattagttcatcatctttagaccaaccttgaaatatacttaaggagctacttaaaaaaaaaaactaaatatgctgtaatgaagtctgttattttgtgaattttaaatggctaatcatttttaaatggtatagtgctattgcttgaaaccttaaactgtccaaattctgtaaaatcactaaatatcatgtacataatacagtactgagacctggcatgcagatagaacatatctttaatttttaaaagctaaacagaaatttgcattgtccaaaggaactggtttctcaggcctggacatgggaatattacaatgaaaggtaaggaggagatgatgtcaatcagttacctatcattcacctcatgactaaacctgagtaggttttttctttttcttgaaatggggccttactccactcctcaggctggagtgcagtggcacaatctcagctcactgcagcctcgacctcttgggcttaggtgatcctcccacatcagcctcctgagtacctgggactacaggagcgtgccaccacacccagctaatttttgtattttttgtagaaatgtggtctcaccatactgcctaggctggtctgtaactcctggactcaagtgatctgcctgcctcggcctcccaaagtgctaagattacaggtgtcagccaccactcctggccctgagcagattttaatcatgagttctgcctaaataattgctttaatctctgtattactggattaaagatagatctgaacttaagagaaagtgtgatccgtccaggcatattctcaaacttttccatggaactacttttaaagattggaggtaccactggtttgagtgggacatttgggaatatgtggttgtaaagtaattcagtttcttcgaaagctcatttatttcctcctgaaaaaaatacatttgattttaccttctatattacaatatgtaaaacaatatgaaagactgtttaaaattatttaccactgagtgaaatcaaccttcaagaagactcataatcaactttgggaggccgaggcgggtggattacctgaggtcaaaagttcgagaccagactggccaacatagtgaaactgcatcgctactaaaaatgcagaaattagccgggtatggttatgtgcccctgtaatcccagctacttgagaggctgaggtgggagaattgcttgaacccaggaggcagaggctgtagtgagccgagatcgcgccactgccctccagcctgggcgacgacagagcaagaccccatctccaaaaaaaaaataaaaaaaagacttacaatcaaacatcctcaatgaaaaagcattgctctgtagggtgatgccacaaattatttaaccattctttcctttctgcccctttgcatcttctgtactgtagacattccttccccctgcacttagcaggtggtatattcctggcactggacagagaccttactttggattgtgagagctcacagtttggttgggttggggtccccataggactagcttttcctgatgctttggacaccccttcatgctttgagaactttgtcttcgccttccttttccttgaatacacatagaaacacatacacgtgcaaacacatatacaaagtcttcctggctcagctctcccctacaccctttcatggtccttctgggcagcacaggcctgtagcacgtgtgtcacctcttgatgttttatttcattagcattatgtctttgtctgcacaaggctgtgagctcccccatgagcatctagttctggttacacagtacatgcgtgatgaaaggtaagactttaatgacgacagtgcattgagctccccatagtagaacagggacatttttgagattctctgttgcatggcttcctttggttcatgtgggtgattcagagttgatttagtctccccactgctgggcaagagtgttttgaggacttgtgtggttttcactgagctcatactccccctcccccatctgcatgctatttccagtatcatctctttgtttgtaaagcctcatgggtgttgtgggcgattactgggatccttccatcatggttttcatccagtttattcctatggggatataaaagtgtgtcagaaacagtataatatacaaatcattagcttttttattacgaattgtggttaaacactatgtgaaccgaagagtagttgaactacaatgcacaggctctgccccagtcacagttcttcctgctctacttccccaaaactagaataggcctaatgtggtgggttttcttccccgccattattttgtctagttccttatatttgtgtccaaaagaggacaggtttagaaaggacttccttacttttaaccgcagctatcaatccagttgttggagctttagccttttgtgaaggatagaaagaccttgcagtcatggttgacctgggccagccactgctgaagttgccggggagaacccctgagctccatcaacaggtcactcctgcttccacagatcactgcacctagaattgcagtctcaactagtctgtgaattgacatgttaaaaaaatactacaggtatgctttgaatattttatttttacgaattgtggttaaacactatgtgaactgaagagtagttgaactacaacgcacaggctctgccccagtcacagttcttcctgctctgcttccccaaaactagaataggcctaatggacagctaggagatggacagctgcctatcttttgatggagggccaaagcctcttctttgagttttggttgagtgatgggctttctcaggaaagttctgagctgccattctttccatacaccacacccacaatgcagagtctgtgattccttatttctgtgtccttaaatggagtacttgtgaaacaatccaaatgcagaacccacgccaagtttttgtaaattggaggccctcctccgatctgctaatgtttgcccacatttaattcaatagtagactttctttagttgagcgacccatataaagcctttcttagttatggaagaattagcagctttctccccataagcacacactcatttttcaccaatttccataatgtgcactttatacatgtaatttatacataataaaatatcgaatacaactcccataagcaggtttggggataaaaccagatgactcatggtgtgagcagaagagcaaagatacactagagaagaacttaatagtattggacattaaaaatgccttgggcagggtcagtgtggtttaaaataagagcttccaggtctttccactcagagagttaaaagaccttttcctgccaatgcttatttagtataagctcaactgtatagcaaaactaaataaaaatagtgaagcaattaattttttaatgacatgaattaaaacaacattgaggggctcacagaggctaataatagaggccagtgtgatcagataaaaaagtgtcaagatagctgaggcaggttttaggtttagccgggccttaaagaattgttgagtttttaaaacattaattgcagtaaaatacatgtaacttaggatgtactatttttaagtgtcccaattctgtgtggcaccaagtatcttcacaatgttgtgtaaccatcactactaaccatttccagaacttcttcatatcccaaacagaaactctacttattaaataataactgtccatcccccactgtactccctccccacaccttaataacctgttctactttctgtctctgtgaattagcctatcctatgtacgtcatataactggtatcacacaatatgcctttctgtctggcacatttgacctagcatactgtttgcaaggttcattcatgtgtggcatgtatagaatgttactttttttttgtggggggggggggctgtgtaatgttccattgtatgtatataccacattttatccaagttattggaccacattgggttttataagttattggaccacatttgggttgtttacaccttttggctatggtgaataatactgctgggaacattggtgtacaagtatgggtttgagtttctgctttcaattatataggttgaattttatactgctagtgatgagggagacatagcaagtacctgaagaggttataagccagaggcatttcttttattttgagctatcactgaaatcttgcattgttgactcttcgtaagtgtccgcttcctcctctatgctgtttgagagcgaaggccattttctaggttcagcacttaccaagtagctgggataagtatttactgaataaatagttcccggagttcctagcttaaagccgtcattccttatagtgctagttggtctccagagtgttgggttttgccacctatcctttttttgggttaattaattaacatgtgttcagggaacagaaaacaactcttaatattagccttagccaaacataatttgggaagtacatttgctaatgcaaaaagtcctggtgtaaataaaacacaattcaacaaacatttgttaagaacttgctgtctaccacgcacatttcaaaatttggaatttcagagcaatttcaaagctaagttggaatacctttttgaaaggcgttctcttaatacgaacctctactcttttaaaaaaaactttgtttttcaaaaattgtgagactactataacaatattaaagacaatttaaaaaagagaataaacattacagtcccaccctaataaaagccctattttcattttataatgtgagtttataaatcatttattttgaaaataaaaccctgaatacttctggtggcaattattttaattattttttaaaactctagaagtgaagcatgaactcatgatcttgaatttagagggcccttatttggagggatgcatggctgtttgacttgatgaagccaagcttttcttggtggagcagcagaattgacatgggtcatcttttggggatagatctgtagactgttgacatctgttatagggactgggtgtttaggagcctgtcctgtctttattctttcatatgttcaggattgaagaaaatgtttttattactgtgctagagggaaaagtacgatttaggatccttacctgcaggatctaagaccttggagtggatgtaggagatatggacacagttgaacatcagtacaaggcaaatgagtgatgggctgcctctgttggtgggatttagtgaggacaggttatcgcaacatggagtggctagggaacaacatccatgaagaggctgtcttcagcggggctttacacaagacaagatgtgtcccagggacacaggcagaagggatgatgggcatgacaacggatgaagaatgttctcaggatccttagccagtcagcctaaggagaggcaggttgggtccggggaaaacagctagaagttaaccccatggcagttcctttaaagttgtaagagctgctactgttagctgctgctgcctctgttgtggttttgaggctggggatggaattgttaaaaggatattgttttaggctgatggacctcagagttttgagggaggatgagttggggtggggtgggtggcggctggcggggagtcttttaggagaggatattacttctgtgaagtagttggctggtctcaagtggaacagcaggaatggaagggatacagggtgtgtggagggggctctgaaggaaagaatgctaggatgtgctgcccgagagggggaagtcaggtaggaacatgtttggcagatgatggaaactcttcccatacataggaagtgggtgagtccggactgatttggaaggccaataagaagttccatttctggaataagtgtgcctaacatttattatgtgttttccatgtaccaaaacatagttctaagagctttacataacagccttataaaataagtactgttagtatccccactttacagatgagaaactgagggcagagttgagtaggaacttgcctcagggttacacactcagtggcagagccaagatgcaagtctagacagtcctaactcaagagccaggctctcacttggtatgctaaaaggctttcctgcttttctatgatagcatgtattaaaaactatccagtcctgttttaatctccttacatgtgttacctcacttgattctcagaaaaactctatgagatgagggtatttttatcctcattttccaggtgtggaaacttggacacagagttagggtgatatgcctatgtcacacagctagacttagctgcattggcctggtgtgtctcaggaagtcaaggatgtttatttgactggattgtaattatctatatccatcagatcaacccatgagaaaatggaattgattgaaatagattgcagtataaattctttaagaaatattgggtcaaatttgctatcaatatcatgcacattcattgggaactgttcttttttaaaaggaataaataatataaataatagcatctctattgctgcctctgtttttattatttagtgctctgtacaactctgaaaataatcctggccactgcgtgcccatattcttgctgccacatttagatgctgcacctagcggactcaacgtctcactctgtagcctttatgacgttgttgctgcctaataatatttaatgcttataattggacttattgtcttttgatctggggtgtactttgcttgacataatggggctacagttgatgccaccacaggcaatatttggctaataaacaggaattgagactggtcatctatacacacacctgcaggaaacaatttccaccctcctgtaaagcaccttcagtctgtccctacccacaagtgctcttctttctatctcgcatgtgagggggtctcctgttttctttacctttaagcctggtttggctacagatctctatttctgtcttgtactgccagaactacccaagggagaggtctgcatttgcagcttgtagccctggagcaaacaacacttcccactcaattgaaattgtactttagaatttccagcagtctctttgtaaccagattaggggtcttttgttcattccctgccatcttactgtggcatctgcccttagagccaccaccctctctttgaaactttgtactgcattgccttctttgccacttagcctctctcccttttcttcctggtggttctttttcttaaatctctcatgaccctttcctacaccgtcttggctggaagagccctttaagatcaatgcttggttggttcctcaaacccttttctttaatgatctgatcttgttttttaacttcacaaggtgtcactggaccaccatcatctgaattccaggtcataagcaacccactgctgagaagtcccattactggccaggttgtacctgtgagcaaattacacctctcacgtcccctcccctcagaatatgcccccatcccctatcctcacccatcctgaacttgtgtggctcactcagatcagtcctcatctgcaaccttgcatatggtggcaggggacataaatctgatgtgcatgaaccattcccttcaccattctgcaagaggtgactgggggccccagggaatcttgttatcacactgccccagcccacctcacctggggaccttgccttctgcctcctcactgaggtcttccctgagtcaaccttttgctttttcatcccgctgatatggccttcctctgacaatctatagtgtcttttcctgtttattctgaattccttactgtaggttctcattacttctgcctgcgaccagcatgtttcactcatttccttgaatctagttgattctctgggatctcactatgcatgtcacttctctgctgaaaaacctaaattgaatctacagggtccctgaggtacgttcccagaatttacacccagaagttcaggacccttgatggatctggtttcactccacgtagtttcacctgtcatgtgctccgcaaggtaccctgttttttagccaggctggtttctgaataactctagaggctctgtgctcacttcactgccagttcatgctgtcatcttctcctcctcctcctcctttgcccttatgatatggttacactccagcccacctcttgctttttcttcagattgacagtaaacctcatagctatgttttacttcagtactttgttctattgtttttagagagacagagtcttactctgtcactcaggctggagtgcagtgttgcaatcacagtttgctgcagcctcaacctcctgggcttaagtgatctcccacctcagcctcccgcctcagcctcccatgtagctgggaaaacaggttcccactaccatgcccagctaatgttttttctagtttttgtagatgtgttgggcggtgggggcgtctcactgcgttgcccaggctggtctcgaactcctaggctcaagcaatcttcccacctcagcctcccagagtgctgggattacaggcgtgagccacggcacctggccagcagtttgttctttaaaccctgaaatgtatgtgaggaccatgtgtcacactagcatggacttttccccagcatctagcatggtgcttttgtagatgataattaatgaataggtatttgaatacatggaggcatgcatggctgaatgaagtggctgttgtaaaatttctagggttcaggtttcatattcagagcctaaagtttgcatctttataaactaaatagtttcctatctaggaaacctatttaggcattagggtgttaaaacaggtgtatcattttctgccttagtgtttagagatttgtgaatagttctccttttgatgaacattgccatgtaaagagagttatacagaaataactgaattcacacagttttaaggaaaagctattctatgtcatggtcatgtatattctgccaaagagagtgacaggccagtagtttcttttttctttttccccatagtgtgagattttgtttctgttgtttctaagctgggtgtctgcatgtccacactgcgaagatggcccatattcagaatgaaaacttgacccaattgtatgtttagcccagagaaggctggggcattcagcacatcctggcttggggaccaaatgtgaccctcaggattaattgagggttggagaaaataattttatagatgaacttaagacattttagacagaactctcttttcagccataaatagcagggcagctttgtcctatttttattgtagagtacacagaagatggaactcagtattggaagaagtgctttatttcgccaaggaagaagatcatactcaacacgattctgtttttcttggcaggctcttctcaaccatctgtgagtccaggggaaccgtctccaccatccatccatccaggaaaatcagacttaatagtccgcgtgggcgacgagattaggctgttatgcactgatccgggctttgtcaaatggacttttgagatcctggatgaaacgaatgagaataagcagaatgaatggatcacggaaaaggcagaagccaccaacaccggcaaatacacgtgcaccaacaaacacggcttaagcaattccatttatgtgtttgttagaggtaaatgcttggctttctgcagtgctgtgctttcaagaatttaatatcctgctcttaattttggatgacatatggatgactgagccatagataaaatatttctggctgggtctagaaggcctaaaacacatgtttcttcactgttctctcccatcttttgatatgatacatagtggctttgggtatggccccagctggaggactgcaggactgtgatactcttcctaatgagattacagtaggtttagcccatttgtgctggtgctttgagtaaaccctgagaatcaattaggccctttgggaaagctgcattttaatgccttgagatactagatactcccacttagtaaaaacacttcagggagccgaaggcctctcaaagcctaaccagaccgacacttcgaaagatgtggcccactcttaaggagtaaatttcagaaaaataatttggtcagctaaacatcccatgtctgtcatgggttctttgtagagttgtccatagaaaaaaatgtgacctcttataaacaaaagaaaaataaatatggtagttggagttctttgctttatttcctatgacaagttcagtgatttgtctgtgattttaatagccttttcaagagtaagcatgctgggcaggggtgtatcttgtagttgatgtaaaaactgatccactggcagcttaagggacatatccaagtgacgggaggagaaatagagttctattttctagttctgggtgcccctggactggggctgtctttgaaacaggcctgagaggccttatccatggtattgtgaatgaataatggatacttttattctagattggagatcttaggtacctcctgagttcagttcctcactacagtatttggataagatgatctgttctgtcttccttacgtaattgttagggagccaggatggtacaaattctaacatgctccatcaggagcgaataaagctgactctaaagtttgactgtgcctctccgctttatcagttgtcctttccgaagtaggtagctgcaaagagatataccctggtaagtcaccacttcgcctcagggcatgcttctgtgattgctgagctaatccatgtgctgttctttacattcaggaaggtattttgcaatttccaggtggcaatgaagtatcatgacaattgaataaatgaggaaaactgttgaattggttaaatcactctaacagggctcacaaacattcttcatagggaaagtcatcttctgtatcttggaactatccttaattataacaaatgtaagatgtttgaatacttaagtaatctctgttacagcaatgaaggaaggtggggcatcattgtaggagctagactcaagtgacctacaaagagtagataaaacagtaactagctatggcctgggaccatccatagttcaaccatcatgaggtcatttatttgcagaataaattagtaaggttgggagatgcataatttatcttggaaaacttttttttcaaaattgatcaaggataaaacacaaacctatttcaatgatgtcaagttcattttgtgaaacacctgagtttcagatggaaaggacagtttaaaaacagattttaaatgtaatctgtgggcctaaacatgtatctgtattatgacactgtagagagtggcagcatattgtgtatacgaaattaggtttgtctggcttctatgaggccccagtcagcctgagccactccgagtctgttcctggtgtcctgtcataaacactaatggtgttcactttcactcacaagtgtcctggtgggctatggtatttgccacagaattcctgaaactcacaagctccccttgtgcatttgaaattatttgatttccagaagctacatttacatgtttcttcagaggaatatgaatcaagtgagactcacctatcatgggtactgggtggcctggtgagagttttctggattctctttagaagccgaaagactctggaccctggaaagggtcctgcaccaagtggttagaaggaggaagcctttcctgctctcactaggaatcatcacactggcttattggcagatgatccctggagttgtaataaagttttcccaaagttttaagagctcaaatattgctctctgttggacttgggtttgagttccaatcagccatttccaggtcatgtcactttaggagggttgcttttatgacaccgcagtttcatctatgaaatggcaataatgatagtactgatcatgggaggggcaatttgaagattaaatgagattaagtgtaatggtccaagcttagtgcgtgatacatggaaagcgtttaataaatgttaattctcaatagtactagatggataaattttgcttttgtttacacagaaaaaagcagccatttgggccactagtcatgaaaggcaacatattagatcttttaaaaagtgttttcagtgtctgtgaccagccattccaactactgattttggatatgcttctatagatcctgccaagcttttccttgttgaccgctccttgtatgggaaagaagacaacgacacgctggtccgctgtcctctcacagacccagaagtgaccaattattccctcaaggggtgccaggggaagcctcttcccaaggacttgaggtttattcctgaccccaaggcgggcatcatgatcaaaagtgtgaaacgcgcctaccatcggctctgtctgcattgttctgtggaccaggagggcaagtcagtgctgtcggaaaaattcatcctgaaagtgaggccaggtactggctctttcttatctgcctctgggagttgagaactcacttatctaaagaagacttctcttctcgttgatccaccttagtgtagtcaatcagggagctagctgttcatagttcccccagcttcaaaaaatgtcatctgcttttgaatttgtttatttcatggtcctgaccccgtgtggcagttccatgactgcctctcatagaggtgaatgtatctgccatagattggcatttagactggactgacttaagtcagcccaaagtttcataattgcatcaagtactcgttctaagggaaacccattgggtagcttgaattatgttggttgaaaagattagcatgcagatgattcattctttgatttactattgacatatgaattgactttcccttcagctgatcaattgcaatgcatcctcaaactgtttgagatctgagaaggaaaattccagttgactgtggaacttgttatggttgtgccgttatgtagaatatttcgttagctggaagataatctaggttttaaatctcagagatcatctaattcaacaccagttggcattcagctattgagtacagtttttattaaggcttttgaaaaagtatacttattgaaattagggaaaatttgattatttaaaacctgggatttccagaggtgagcagggtagggtttgcatgagaaagacgcctgtttgcttaaaagaatataagtagttgttggtcacatcctcctgacaccatcaaggttgtctgaaataaagattaaagcagcttctctatgctagggcttctacttggtttggaaaaagtgttttccagaagtattataatctcacagtgggcatttctgtctttttcactcaatttacttgaaggatgcttgatttaattgctggtaccttcagatatgcaagtagtacagataggttagcaccatgctttgtattttatttaaaagatgacaaagtaagctgtacacatttgaggagaaatggtaaatcaaaatttcatgctataatacaaattatttgaggggccacatttcttttcattctagccttcaaagctgtgcctgttgtgtctgtgtccaaagcaagctatcttcttagggaaggggaagaattcacagtgacgtgcacaataaaagatgtgtctagttctgtgtactcaacgtggaaaagagaaaacagtcaggtgagtgaatcgcttcattcttctcatgttctgtctctgtgggagatgataagttttctctttcagaagagtctgtcctgaaactgcctcgactagtgcgtctgtcagaggtggattgtctgggagagtgttgggattgcatatttccccctttcatacctccacatggagatatatacatttattattagtaacaaataaatttcattttatacatttattttgagaaacttgagagaacttcagattcatgttattacttcatgctgtttctttgaaaaactgttagggacttaaaaaacatggttaactgcatgaatactttgatttaaagctattgttgataccgtttaggccagactatttaaaatattgaaaagagttgccacttccatacttaaaaagaatagagagtctcaattattcaccagaaaacccttccctcgcccacaaattggcctatccatttgaagatgggtttctttttgtaaggatctgatttcctcctttgaggctggttacctgagattaagttgctaatggttttctatttgttttagtcactattaataaaactgttatccttaatctgaaacatctgggcatgcttacgttcccattcatttaacaaatgcatattcaatgccattatacctcagatactgggttaggcatatcttaaataaattttagctagttactgaaattttctccctactaaaagagcagagtttttacactgtcttaatttccaaatactttgctttaaacttcccattgaccaagttttcagtaatttttgtttgaataatcttggccatctagttaattagctatcacagtggtttttattcattacccatgcaagcattatattggaaaaaagaaatattatattttctttctcctcctcttcctcctcctgccccatgttcaacattggcaattttatgcctgtttaaaaaactctttgctaaacaaataaccatggtgattgccataatgcaaagacagtgtgatgatattcatgtagacctgtgatggatgatatcttgctaaatgaagcctgccattgactggtagaatggattgtaccatagacttattctttcaaaccaatgactcagagaaacattttagtttttgtatcatataatgtaatacaaaaatagcttatgtatggatttttggctaaccttacagaatacaatctcatattaattggctttctataatccttgatttcagatgagagaacaatttagactgggtgtgcatttgagcctctgtataacttgaacattatccttttttgagatgagaaattaaattgccccaggcagttttgttctgaaccatttttcccaggagccctgcatgccagtcccaattaatccactggtgctggtagataagccttcagtgttaggagctctttggggaaatcccagtgtgcacctccaagggttaaggaaaaccaaatcacgtgcaaacaatatgtaatgtgtgacttgcagatggggctcatggctgtctgccaaggttcatccatgaatcttttattgatatcttttggcttaatttagaatactattagcactatcaaattattaaaaaatccataatattttattctgaccctttggaataagtttaactcacaatgtaatttagggtaaaatgactttttagcattgttgccattgtttaagcgcaagggagtcttggagtttgttcaatactgttaatcttagttggttagctttcttaatgcctctaaaccctcacatttttacttgcttgtaatcagaatctttgacagtatcctaacttatgggctttgggtttggatgttcatgctgcatctcttatgactgcactattcctttcagcgctgacaagttcagagttcctgtttgagttctgttgtggactcttgggctcttgaaagaactagaaggaagataccttaaattgagactttgatatgttatctgtccattgtcactctgcctttgtggagaagtctgtgaaactatgaactgggaaaagccagtttgaaaatgttgcttcaccttgctcttacatcttcttgacaattgatcttatgctgtgaaatggtagatttctgccaattattagaagactctcttagaagggggtagtaggaaatctacatagtgttacaaactagaaaagcctttaaagatagttttgttcccacatacccttttagaaactaaaagttaagactagtgatgctcttgacttacctaagatctcacgattagttaacggcaaagcaggtttctgttctttttagtttgaaacattcagcttcagcagtcaacttttgtgtgtggttactttaatgtaaaaatatttgtaaaaccttaataacattaaaaaataggtataattccaccgtcatagatagcaatgctgtgtaatagaaatacatgaaccttatatgtaattttaaattttctagtaggtacattacaaaaaataaaaaaggtaaaattgattttaataatatattttatttgactcagtgtgtctaaaatattatttcataatgtaattaacataaaaattactaattaggtgttttacatttttttaaatataagtcttcaaaatccaggacatattttatatttacaacacaacttactttggactaccagatttcaaatgcttagtagtcccaagtgtctagtccttataaatgctatatagtctgcattttttcatattttttctcttttcccctatgcatatgtattatcagataattgcaattttaaggtacattcaatttgtgctttttaagtaggtaaacacctctcttatagtcataatgctatacttgatatacatttaggtcgtttctgagtttttaccacaaccaacatattgaagcttttattttctgttgagcaatttccttgagttaaatttgctgcagttgatcagagggtatgaacatcctggtaagctcctttccagaaggatttttctgatttataatactgtcagatgctttaactctattaggtttaccaaagcctcgccaaggaatcacccttgatctcattccatgtcaatattagctccttttactttaattggttgtttttttccccattgtaataggagtgtgtgtacattacagaaaatttggaagatgcagaaagctatattagacttcctttaatcttttcagaaagctgctgtagcttatgttatggtttccccatgactttttaaatacaagaaatctctccatgtcttgtctgcagacaaaaaatgagtgagatggtgatatcacaagggtaaattcacaaccttttcttttcagctcatgcttaaataatttgggccttgttcttagatgtctcttataccttggaactcccttcagtagtttacaagattctgctgggtgagaactgcaggatgagtttccaagctagttgttgacattgtgattctgttttcattcttgcaaataataaattttaataaaatagaacattattgttattagcaatgtgttcgctctcagtcattgggacatagaagagaaaaagacatgacaaaaatatgctgactcatattacaaaatatcagtatcccataatatttcagagatagcaacttttaaaatttagcgttgtatagaatttggaattatacatactagggttaagaaatgaattttcgtttttttcccaatcgttaataatgactgtctttcaacataatcctgtaatatgaagtgttccaatgacagacttgtcatgatgctttattattcttacttaagtagtgtataatgaaagttaatatggagaagttaattgctgctatttttaatttatctaggaaagattctgaatataaattatatggtaatcttcatttttttttctccttttctgaaaccagcagactaaactacaggagaaatataatagctggcatcacggtgacttcaattatgaacgtcaggcaacgttgactatcagttcagcgagagttaatgattctggagtgttcatgtgttatgccaataatacttttggatcagcaaatgtcacaacaaccttggaagtagtaggtaaatacctctatgggaatgtttaaattactggcagtagtgaaagaagaaattattagacagtttcttttttatgtaaatggaatgttgaacagattcttagaattttgttatcactgaatgaatgaaaattatccttgtagcctcttgcaatgaaagcacaaaaccaaattctaccagtttagtggaggaaagtggaaagctgttactaaaattgttcaaacctattattctttgtgcacctcaccctcctttccccaccaaacaaaacataagttgagatttttcaaaaatgctagtgctcgctgaatgacttgagtttggaaatggatgtagaatttatcaaggaacacaaatgcttagagcctgaagtatttctctgaaacttttggtaggggctgtgccccttggtttattgttttgccactcatcagatctagttccttctagtaaggactgaattggacttttcctccctagtattccctacctccttatctcacctgttctctaagcataaagattatagcataaaccttcaggaaggagtgccattgggacacaggtcattggttctacggagcataaactacaacatggtaatctgtccccggaccccatcatatctggtatgcacaattggttcagccttatcttctctactctagaaatttcactaaatatttattttccaagcatctttatttaaagagagcagagcatagtgagtttcttcatgcttttgatttactgagaataataataattttaaaattactttgtttacaatttttttgtcttttgagtattgtttgaatttaatccatttttctgtctttttagtacaaccatattcctagtgttagactttcattaaatacttctaaggtggcaaaattcttgatcaagaacaataataaagtgatgtggtatttgttttcatctctttccccgcctcaccaaatttcttcaataatttatgtagcagtattaaagctttgtgattatcccacaataatctcgtaaaattttggcgtttctgcccatgttataatggaaagtttctccccagactgaacatggaaaagatactttacttgcaattatagtcagcacacagaaagtgtactactttgttcctaaacatgattgtgaaccatttattaatttgaatagaaggctatgcttttaaaatattaaactccataagcactaatttgctaagttgattagggagcatgttgatatatcagcttcagctccagaaagcaattagtaaggatgttttgagaacattgttgtatgtaatcggatttttaaaatccattcatcaatttccaagaattatcactgtatgactggaaggacttgtggctgtgaaacctgaatctggttttgtattgttttgagaatgggttgaggtggaacaggaacaggaggagacaaacagaaaagtaattttttagtggctgggaggagggtttggatccatgatggagtgatgaagagaacagggctttggtatcactctttttttaagaaattacttttttattgtatatttttaagatatacaacatgatgttatggggtacatatagatagtaagaatattactatagtgaagcaaattaatgtattcatcatctcacaaagttaccctttctttgttttttgttttgtgataagagctgttaacattttacctggttttgaattggaggctctgcctgtaatcccagcactttgggaggctgaggcgggcagatctcttaagcccaggagtttgaaaccagcctgagcaacatggtgaaaccccatttctacaaaaaatacaaaaatgagccgggcatggtgccacatgcttgagttgcagctacttgggaggctgaggcaggaggattgcttgagcccaggaagtcgaggctttagtgagctgtgatcgtgccactgtgctccagcctgggcaacagagggataccctgtttcaaacaaaacaaaacaaaagattaagtgtcacaattattaagtaaaaggtatgctaaagtacttaaagcagttcttaacacatagtaagcacataaatggtggccataaaaataatgttagcaattactttattgctctctttttcaagatcttttttatattattatatcaccttttctaaggactccattatttatttaaccggttttctattttgccattttatattataatagcttataatagtgtaaatagcacttttgtttttggcctgtagctatctatctcattttaagaagagttctcaaatggaaattacaagatttaatcaaggaatagataatttaaaaaaaaatctatattgctaaatgcttcctaaaagaattgtgccaatttacagtgtgtaattcagcatactacttttaccacacttgcaaaattattgagtttagttaaaattagttttgctatttttaataagtgaaaagtgatgtcttattttaattactagtttagctaaacattttttctacattttattctcctttttcctgttacattaattattttactatatagacttttaaaaatatttatggatttaaatttgtcttctatgatgtttttcttctgttgcttctaaaaagcctagaaacttcccctctgtagaaatttcataggagtcaattgttatttagttaaaaataacattttattgttaaaatgctctttgatttatctgtgatatataagaagacctaaggttatttttcttcaaatactaaagaacattctttgaacatttttattaaacattagggctctcttgttttcccttaatttatgacaccttatcacatatataattatatattgggtctgtgtatgaactcactatttattccaaattcttttaacctaaaaaacatcaagactagtagatttagaagacttttaagatggtgatagatctttaagagaattgcttaagaggcagagatgggagaatcagtatttcaaatgtgtgtcctttctcacttgtgacagtgattctacaagagcaaaataaaatgaaaaacagctagttaaaattctcttattgccaattaatactggaaatcaaccaattgtttttgtaattccaagatgaggttctgtttttttgtccagtagttgtagataatggtttctttctgtcttatttcattctaattagataaaggattcattaatatcttccccatgataaacactacagtatttgtaaacgatggagaaaatgtagatttgattgttgaatatgaagcattccccaaacctgaacaccagcagtggatctatatgaacagaaccttcactgataaatgggaagattatcccaagtctgagaatgaaagtaatatcaggtaagaaatggaccttgccctgggggattacacattacccccttttccagtgggcttatcagatcttatttctgtaacccgtaaatccacgagaagatacctggtaaagaagaaagtctggggctgcctcctatgtcctcatcctagtattccattttgttgtgtgtttagagcatgcacactcttgcacacgcatgcacacacacacctgtgtgcctcagttttctcacttgtaaaatggaggacagttttctagagatctgagcttagctcaaagcagtaactttcatgtactcgggatacagcaagtctcttcagagaaaaagggaagttagtacctataattgtttcttaaagctgtaagaaaactaagagccaaataacttcgcttcaggcagtgaacccatgttcttttacactagacctctcatttgatcctcaaaacattatagtaaaaatagtagcaatagtaatacttcaggtaagacataagtgctttttttctgaagcatggttctaagtactttacgtgtattcacccactgacctgaagcctcacagactttgtgagtagacattcttatttcccaccatttttatagaagaggagacaggtacagaggggtgaagtaatttgaccaagaccgaacggctaataagggctaagtgcctggatagggttttgctctatttttccagtcaggactgttgactgttggaaaaatatgggtgagagatgatagcgtcctgggccaaggactaaaggttggagggaagaggataaatttgggaggtctccaggtgattgagagggcaggagaggcagggaggagttgaagatgcctttaggttgggtggtgagagaccataccattcagggagagcaggaggacggggagggacaagtttctgaggaaagacagtgactttgttttggggtttgttggatttgagattgatagtgggatcttgagtgggattgtttaggtaggaagtatcttttgccaaacgccctagaagcagagcctgagacagggattctgaggcaagtgacttatgcagggatagactgaccagggagtaggggaagaggcatgggagggaaaggaggcaagtaaggatgtggctcagatgaccccaagcctcagtcttatccaggagctgagcggggcttttgcacctctccagctatcagtcacttactggctgcagacctggctgcacggtcaacgtcttccaaggattgcgcaagggcaatccttgggagaatgctgcaggcaagtgtttgggggcatgaaagtagctctgtagaggagacatggtacagagaaccctgcgctggaagtaaagacgtgaaggttgtgagccagcagccagcagctcagtgtgagagagtgggctgcccagggagcttgcatagtgtgagagttggcacaccgcctatggcaagttggtgttgtggcccatgtggatcatgtgggtcgtgggctgcccagggtgacacatgtacatcggagcccctgccagtaaccccgacagggttgtagggtgctcagtgtacacagccctatatggcggtcctgcaagaagtcagaagcttgagtggcaaatactgccaggagcactgagaagtctccggggtggaggaaaaccaggagatgggggtgttgcaagaaggaaggtgagcagtgtggacctcgctgagggcccagagtgtctgtgtgagggcagtgagcatgtgcatgcagggcaggtgagttcaggacactgtggagagcaggctcctgcagcaccatgggcaggggaggaagtggtatggggacagcccagggtggtggggggagggcggaggcgggaggcggtgggccagtggagaggctgcagcctctgtcaggttgcctttgtgcttaacctttccccactctgtggtctctcacaacaggcgttggtcccagatggaatatgtgtgtgcgtgtttatgtatttgttaatgtggattttgctaatacttactgaattaaatgagttatatttttcctcaaacaggcatagatttccaggtagaaactgaaaaagacatgccttccaaggcatgctatccacaggtgattgactagttgtcttttctttgtagatacgtaagtgaacttcatctaacgagattaaaaggcaccgaaggaggcacttacacattcctagtgtccaattctgacgtcaatgctgccatagcatttaatgtttatgtgaatagtaagtaacatgaagggctccttttaattttttattcttttaaagttgtggctcgtgtttgtaacagctgcaaggactcaacttgtgtactatgtaaataacgtttcatgataatcttgaccttcacagagacttcgtggtttggtggttagagtgtgtcaaaaaaccagttccttgtcctacatttcactgatcacatgaccttgtagaagttgctcaaattctgcgtgctgcctttgaagtaaacagaggagccaaacaagttgaacatacagttgtttgagggaaaatgtattattattgattgttggaatggggggctagtggttgaataggagctgaattactgcgttaggtagggaagagatgctatcgagccctgacgtgatttctttgttcagtgctgtctcttttgaggctgtgatgttacttgtgtttagattgttcttccactgagacaaatgcaatactgacaggcccatggctcactactgagtaccatgtggtatgtgggagaaggtagcagatggtttaggatgggagatggccatgggcacctgagcacccaagtcctgcactgctggggtcctaccgaccccactcctgcagcccaccatgtcttagagaaatgtctgctctgaagttgaggccaagggagcccgatcatgagctggaccttttgccaagtgcagggcttcttcctggctccactctgggccccgtgtgcatttccaaggaaggtgcctcccacaccatacctgctagtgcaagggaggcccctaaagactaggagttccaagggagtggcccaataaatgactattggaattggctttcctgggtgtgtggaggatgaggagacaactggaatatttcatagaaaagagcttaggcgttatgctgggcactttatgtgtgttgggttatagggtgttgtgggaacaaaggactggggccaattccttgtcttgaaggagcttactttctgtacgaggtgttgtggttttgtttttttttgtttttgagacagagtctctcactctctctccctgtctggagtgcagtgacatgatctcgattcactgcaacctccacctcccaggttcaagtgattctcctgccacagcctcttgagtatctgggactataggcatcccaccacacccagctgatttctgtatttttagtagagatggggtttcaccatgttggccaggatggtcttgaactcctgaccacaagtgatcacctgcttcagcctcccaaagtgctgggattataggcatgagccaccgcgcccagctagatgttttgtttgtttgattttgagacaaacatgtttttgttttcaaacatgttgacaaacatgttgagccagcatctgtctctgtcacccaggctggagtgatcatagctcactatatccttgtactcctaggcccaagagatccttccgcttcagcttaccaagtagctgggagtacaggcatgcaccaccacgcacagctaatttttaaatgttttttagagatgggggtcttgctttgttgcctagactggtcttgaattcctggactaaagcgatccttctgccttgtcctcccaaagcactgggattacaggagtgagccacaacactcaacctgtgtgaagtgattttacataattgtcttatttgatgctacagctcaggaaagatggtagggtgggtggtgtaagccaatgaaaagaaatagctggacagattttttattgctaatccagagtcttttgactatgaacatttcaaaaattgtgttttctgaataagacattcatatgagtttagatgaagaaggtcacattcgtgtaattaaacacatatctttattactggccttcccagaatcctaatatgctaatgtgactttgccagagggggccatgggataggatgtatatatcccaaactcgtttgatcacacagttctcccttttcaagggaaacattaattattatctgagttccagcaaacagttttgattacatagcatttctctggtcctcaattcaagtatctctagattaatttcaatgtgaatcagaaagtaatagtatatagaggctggacgcggtggctcacgcctgtaatcccagcactttgggaggccgaagcaggtggataacctgaggttgggagttcgagaccagcctggccaacatggtgaaaccccttctctactaaaaatagaaaaattcagctggttgcgatgatgagtgcgtgtaatcccagctagttgggaggctgaggcaggagaatcacttgaacctcaacctgggagacagaggttgcagtgagctgagatctcactgttgcactccagcctgggcgacagaacgagagtccgtctcaaaaaaaaaaaaaaaaaagataatagtatatagagcttagtgtattacccatggacaaaattacctgcttctgaaaagtcttaatgttcatctcatttaagagatgaccgtaggtaaatcggtatccttgcaagcataatatgcatattgttcatacagaattttattgtggctgctcttgtgtgatgcttctcaacctttctatgttaaaagacttccttttctaagattcccaatacattgtggatcaatacttcttgtaaaatatagtaaaaaccaattactggaaaagtgaaatgaaaaagaacaatatacaaaatacaagctcgggtttttttattttttagattcaatagatataacaattactctttgtcaaattgctcctcctcagtgcttcttctcagtttctgtatttatctcctgtgcaccagcaacagcagatcgtgggtggggcccactccacagacctcactttgagagttcagtggttgggaattttatgaagtgaggtactttgtgttaccactgtttccctggctttaagtccaaaggggtgtttaaatgtgtctcttttcttcttttttcatgcttccatttgccagtgtgtggtctgccagttggtcatgagatattgacctcaggaagatgtttctgacttttctctggtgggggcaaaattgctactaggctaatttgccattccagcaggctcagttttaatcagtgctgctggtgaacccatgcttatttgaaactagataggatatgttgttagccttccaaaaggatatcttcttggattgcctgtaagtaggaggtcttttctgcattctagggtatgggtctctaatacccacccagcacttcctgaggtcccactgtatttcactggatatacagatgaggatcatgttggtcctgacctcaagctcttcagaaagtcttttccttgaagttagtttgttacaaataacaaactgacagaggcatttatttcacttacctaacacgttggatttattgatttgcaaacgtttggacagaggtagtagcatttatgtttgagctttaaactgtctatgaggtacgtcccagttgctctttagagatatagttagctgatttgttgattttttttaattgaaaaaaaatctagttaacattattatgtggtagtatttttaaaaattttatttcaatagtttttggggaacagatgggttttagttacatagataagttcttttatggtgatttctgagattttggtgcacctgtcacccaagcagtgtacactatacccgtgtatagtctttatccctcacccccctcccacccttcttcctaggtccccaaagttcattctgtcattctcatgattttgcatcctcattgcttagctcatgaggtaggatttttttcatgttaaattttaaaatcaaaagctaaaataattctacaattttaaacttagaatagttgtggcctttttgacatcattttagctgagccagttacatatgtaggtgtactgtatggtttattttgtaaataagctgagcctcaaggacaaaagggattgtgttctgcaaaaatcagaattgataaaaatcagaataatgaatgcatagtgtttgttagtgcagaaattcagcctacttttactctgtgacactaatgcgtaattgcttaatagattcatctgcaagaaatgctattgaaaatccttgatttggcatggttaaatatttggcggttgaaaaatctatttgttttgaaaattccacatgtaaatttcagtatagtgaatgtggggaaggggcatgttttaattgcttatatggtagacttttaaaaaatattgtgctctgacaatttgtgttaagaaaacacgtatataacatgttaagcttgaaaatgttctaatactgtttctaacctctctaatcaagccatgatttacatgggcctattaaactgactcagtgacatttaaggtggtttataatggccaagagccattataacatggttgccatctttgagtagaacttctagtggaaactgataggaattttcattaaaaaacaaagcaaaaccaaaaattagtgattatatctgcattgaatttgcattactctaattaacttttggaattgcttatccaagatgtgtatggacatcaaattcttagatctgaaatgtttgatatccttcagcgaaaatggtgatttgtttttcttggaaatgaaaatcaggaaaaaagtagagttttgaaaccttacctcaaagtgctttcttaatagacattaacctttccaaaactcttggaaatattagaaaaaaatgacattgccaagatgctatgggtagcttatgctacttatttaggaactgatggcctctttggttatattaaatgtcacacaatgaggtttttttttgccagatccaggacaaataaaaggccaaatatgcactttaatcctaatatatccatttggcttttttccccactccatctagtatttcttgaataaataacaaactttatagtggacttaaaggataatcagtaaagtaaatattttgtaggtttattttggcttcaattttaaatacccatgtgaatcctgaaataatttacataattgtagaaataaattatggttgatatgataaaccagttgtttttcaaacctttggaataattttaagaagatcctgtaaccttaaagtggatagttcaaaacatgatctggtagcatttccagggcggtattatgcatttaaaatatgtggcaaatggtatttacggatcataaatagatcccgctcccattttgaaagcttatcctttaatgacgagcttcagccagtgcggtgggagtactgtgatcctcacgtggtggtgacggggaggcagacattgagaactgaagggctccctttgatcattagccttacataggatgcctttaatgttgagctagattggaagcccaagtgactgctgaagtgcaccaaattaactcagaagtcaccaatttcactccatttatggaagggtattaacagggggttgagaaacaatttaaggaaatgttaaataatgtattatttccaaatcactgcatcatataattaacatcctacctgttgttagcaattatttataggtcatacagtataccaaaatcagccaaagcaataaatcacccagaataaggcttctcgatgagaaagatcccctttgaccaagtatgcaaagtctgggctaccttttagtatttttggttcacagttaaatccagttatggatggtggaaccaattctagggagaagctcctgcagataaagcacatagccatctagcttttggccagccaaccagaaatgatcccaggtagactatcagtgcatttgtgttgctgttaaaaaaaaaaaaaaaaaatgcccggggctgggtgatttataaagaaaagagatttatttggctcacatttctgcaggctgtaagaaacacctgcttctggtgagggcttcaggaagcttccactcatggtggaagcggaaggggaacaggcatcacatggcaagagaggaggaaagagagagaggagaagaagggtgccaggttgtttttaaaaatcggatctcgagggagctaatagtgtgaggagtcactcattacctctagtacagcaccaggctaatcatgaaagatctgtccccatgacccagacacctcccatcaggccccacctccagtattcaggatcagtttttaaacatgagatttgaaggggacaaatattcaaactgtatcatagacccgtgaaagccagccatatagatggcttcacctgtttgccagctctctgggtcacccacctggctggaatctccaactacctttatccagagtaaaataataacggcagtcttgcctgcaaggactgctcagatctggtccttaaggccactgtgcccttcaggaagatcctcacaaaacagagcaaagttactagaacttcaacttttttggaagatggcaatgtcttcccaccacttaacctattagctttttctttccattttttaaaaaaatagtaggacctttcaaacacatgcgcgtccaaaccatacttgtgttagaggccacaaatttgaagacttgctgttaatttttgcttgaaagtctttgcttttcagtgttttccccattaggtggatactattagcgtgacttcctcttatagtaaataattgtaaattttaaacgttaaataaagtgccgaatagaactcctttctgatttatttacttgcttttgagagtttgctctaaggctgcaacagtaactggaacatagcttcgtttgtgtgaacatttgtatgctgcatgtttttaaattaaaacaattttttctcattacaaaagcattatgtgaagggtagaacaattagaaaatgtaaataagcaaaaataaaaatcaagttttatttttactttttatgtttatttactttttataggttaccattactaatattctttattatacattcctccagaccattaatttttttttaaataaaaatgaagtcatattgctttataacctggatttttggtgctgcacaacaaaagcattgtgaatatctttctataacatcattttggcatctcagtgtatggatcttttataatttctctagcccatgcctgatgcaattttgagacatccaggagcgaggcgggactctgaaatgatgtgactgaattttaaaagaaacctgtcagatgattatttaaagtttataattatcgtgtttaatgtctaatgagtgaccttgcttaagtggctggaagttaataaggttatcatctgttgttatctttcatgctctgtgtcttcaacatacgatatggcagatatactgtgctggctttcaggacagttctaaattaaggaataattttcagatcttcttagtgtggtagctaatctatgtaaaaatcgttgcttgtcttttcacattaatctttttatagataatatgtgttcatttgagatatctgacagtgtttgaactctgtttgtattttctgttcctgaacttgaaatgagtttttgttctcaaattgcttgggaattatgaatgttgtttttgatgtgacactctaatatctctttctccttataaagagaatgtctgtggaggcaagaattgttatagatgtttaaattggaaaaaaaaagatataatggcaacctacttttaaagtagaacttgattctcttctgttctgaaaaaatttagcagatgtagctctgaactaagctaaacatctttccctcctcaaaggctggcatcattactcttcctccctatctcataagaaagttggtctggtggatgtgttgctaatttaggggccttgatgtaaacactgaacctgtaagagaaccaggtaaactctctggatccatagcccttggttgcccccgtttgtgtggtttggccatttttttatgttgatggtggaaaagcaggagaaacaggtttaggtatgtagccatgtaaacttctgctggaattgactctaaacttgggtacatagacttcgctaaaagcagtgagtggtcccttttatattgtggaacttccactctgtggagattttcttttcagttgagccacttgtttttacatcaaattagcttccttcatttacagatatatgcaaggtcacctgtaatgtagtgaaatttaaattaatccaagaatagggacataatgtttccatgggcattctgtcaatacccttctcctccacttctgaattatgttgcaaaatgaattagctacttttccagagtaggaaaaaagaggcttttgtcccatgcctgcactccttggcagcaagcagagtggcattgtgatgtgtgtacaggtcttcctccccacggctgggtgatacagcaatggtgctcctgtaagttgagcagtgattctggctgaagaagtctctctccaagtagtttcatcatttttcaacgtaatctcgtgattgggatatctttttgattgctgtttagaacaggggttggtagaactatagcctgctggccagaattggcctgtagcctgtttttgttttgttttgttttttgcttttgagacagagtcttgttccgtcgcctaagctgtagtgcagtggcacaatcttggctcactgcaacctccacttcccaggttcaagcagttctcctgcctcagcctcccgagtagctggtattacaggcacctgccaccatgcctggcttatttttgtatttttagtagagatgggatttcaccatgttggccaggctggtctttctcctgccttggcctcccaaagtgctgggattacaagcgtgagccgctgcacccggcctataacctgtttttgaatggctcacaaactaagaacgttattgaatttatttctgattagttttaaaaaatcaggagatttcatgagacatgagaatacaactcaaatgttagtgtccacaaggaaagttttattgaaaacagccatgcctatttgattatataatgtctatgggcacatttgtactacagctgcagagttgagttgcaggaaagaccttatggcccacaaatctaaaatatttacctgaaatatgtatctcgccctttatagtaaaagtttgctgagccctagttgagaaaatcacttcattaagagaatgattttttttctttttaaaatgacagtcactgttaaaataaataggtacaggagattatagttgaagttttattttgtttgttaaataaacttctgttagtgtccatatgccaatttctggatatctttaagaatgtataagacacagtatatgtccaaaatatctatcctgggaattttttaaaaagtataatattccttttataagtaaggttatttttctactccaattttagctgacttaaatttctttattataatggtattatggcacaagtgtaggttttacacagaccaaaaccgggatagtgaaaaattccggaaaagcattgcttcattgcctttaaacaccagcaaacctcgaattttaaaaacagaaattcattcttatgatccctcttcatttagtcttttattatttggagacttaagtgtttgcgttttttgtcctgctgattataaaatatgggcaaatgtgcatttatagcggaagttggttaaagtggctgggtgagagaactctaatcaaaaaatgcctccctgcatttagatgaagaaaggaagaccccttctaccattggcttgtgtattgcctttcagccaccagccctcagctttgttatctgtactatgttcttaaaattcattttgttcttgctttccacatggactggatggtgatgaaaaggaatattttccaagatcacaaatctgtggggtaaatcactggatgtgtaggatttttaattgcatgagcaataaattctcagcagagttacaagcatctgaaatctgcctacaagctgatcggtgttgttggcgatatcagaatgactcaggtccatgatgtttttaaaggcaaaaaggctattttttttttatctccacaggaaatgcataacttatacacctcttaggcttatctaaacctccaacttgggaggaattagagaatgtgtcatttgctatactgcttattgcagaatatctaagaagccacagctcagatttaacctggagaactgcagagttatgtatctttaaaggcaagatgtatatttaatgccaaacacggtgcattgaggcacttataaaatgcagatgagcccagattttcatttttaggaattagatttccacctggctcattctttatgcattaaacattttcataatgcaacttgccaggtacagctcatgctgtactagtgtgtctcatccttttcagaaggaggtctcttagcaccagtgttagggaaagggctggaccgaggtgaggcaagaaaggcacctagagtgtgaaatataaggaggtgctctcacagatacccactcataggccctttagggttagtgccttcttatttttatgccctgggtgcttctcttgccttactcttgtcctggctttgataagggttccttaaaggccctttaaaaaggtacattgctgggttataccctcagcttactagatctctggaggtgcggcccaggaatgtgcatttattctcttcccttagagagtctaaggcatattgaagatttaggaccctgtcagcttggttggccaacctaaggccagcaggacaaaagctgctcaattagcctcaggttatgacccacctgggatagaaacttaacaaaactgcttaattaaccggcacatgggaacaagtaggccagccagaccacaccgttgccagccatggctgttgtataactgctaccaggtgtcacgctagaaggcttggatgttagagcatacttgtaaccaaagctaaatggaattgattatgtaattttgagctgttccaattttttaattaaacaatgttttataggttcactttcagctacccattcattgcaaaataaaattagaaataaaagaataaaatagaaacttttcatcaccttactacccagagataaccattgttaacatcatcttaaagtgttctttcagcctttcctccgcctattaagttaatatttaatttcactaagaatttaccatgtagtgttatgagcattaggaagtatgagtattaagggaatataggtatgagtacatctatgttgtgaacttagctcctatttgagtcctattcagttatctctaccatctttgtgtagactggtcccactcatcattcatctcagtgttataaaaaattcatgttgtcaggcgcttggatttcttatctcatggccctccattgcaaaaataatagaaatagtgccgtatttacgaaagtcaccattaggctgttcccacaggtctcttcttgtgactctataattgaatgcctttggaatcttagagacttgttcctttgggtgggatcttcatcatacaacagtgcttactgtgtgcctgctgtgggtctcactgagctaggagtcacaagtatactcaatcagtaagatgtcgtttctgccctcgagaacatcgagtctgatggaggaggcagaccaagatcttgcataccagcgtcaggtgttcttaaatgctttgggaataaggaaaggagagagaccagcttggcatcagagagtttaggcttgcttagaaaaggaggtgacacttaaactgagtccagagagacccacagtatggcacctagagtccctagcaaatagcactctcctaagggtctgctgatttcttgtgtcgtgtcctacttttcagcctgatcacacagttgcccatgataattaaatgaaacttgccagatggatgctttcgcaagacgatggcttgtcttcttgctctatttgtaaagctggcattggatccaaactctcaaggatgcccctaccttgagattgttttggagagtttctcttttgtgtatattagccaaatggcctgctcatcagcagggccaggttgagtgacaggtgggtgtgtcatgcatgtggatactctgatctccgccaactccagggaggtgcctccagggaggtgaggtgctgagaggttattctacaaagatgtcatttatcagtgttaccttcctttggggaaataaacttcctaagtttctgatctgtcagtctttccttctcactgcatatattttccctatcagttgcaatataattgatgttgaattccctgcgcattgggttaaaatatacaccttatcagactattctaaagaaggaatttttagattattgaggagaatatttagagtggcaaatacagttcacttcatttgtagtgaaattggttatccaagaaaggtagatattctgattataaaataataactcagtattaatagtaataataaattttattgagatggagtcccactctgtcacccaggctggagtgcagtggtgctcactgcaacctctgcctcctgggttcaagccatcctcctgcctcagcctaccgagtagctgggactacaggcgcatgtcactgtgcccagctaatttttgtgtttttagtagagatgcggtttcactgtgttgcccaggctagtctcaaactcctgacctcaggtgatccactgcctcagcctcagcctcccaaagtgctgggattataggcttgagccaccgtgcccagcaataataataataaataattgtttcatttctataagtcattcttagctctctgtatgtgccatctcatttaattgtctcaatatccctatgagaggggcacagttattattcccattttacacatgagggaacaaaaatttagagagatgtagaaacttactcaagttcaaagaactgagaaatgtaagagctggtattcagatgtgtccactatgcatggggctcccgtaattctgtgcttagacttggcacaatcaatgctattcttccgagtacagggtgagcatatcagcatccctgccatcctgttgcttctgttgagcttatttattcttagagggttggaatccttcagatgtattgccatcagaaccaccgagtataagtgcatcttcctttcactttgtaaataacttcaaaaattagaaattcttgagtgttagctggttattgtagttacatagaaataccaaattagagcatttctgctgttacagtgaatatattcagatttatatatatatttatatatatatgtatttatatatatttatatatatttttatatatatgtatatatatttatatatatgtatttatatatatatattcacgttcataatatacataaatatataaatcttaggctggttttcttttctagttttctgttcatattttgcatttgaaacaaagatttgaagtaaagcccatattgtattttactctttatgttctagcttccctgtaaatagagtgattcggcttttaatcggcaccacccttccacccccaaaaaggagaaaattcatgtaagagcaaaagagtggggcttatcttttcctctaacaactcctaatttcatccattccagttcccacaataacttgaaattcctagggcaggtacagttgcttgaaatcccattggcaggaatcctttaaagtagatttttacctgtggaacactttggagtcctagagtttgattagaagcagtcttcagatccctactccctgaaagcagaaaccctgcagttggccctgccacctctgcctcagccatctcctctggggctgggccactgtggctgggaaagcctttctgggttggaccctgacagccgcctccttgtaccttccactccttggttcagattctgccctttgaacttgctccctcaggctactcagcagcctcaggaaggttgtagggattagagagggagtgaagtgaatgttgctgaggttttccagcactctgacatatggccatttctgttttcctgtagcaaaaccagaaatcctgacttacgacaggctcgtgaatggcatgctccaatgtgtggcagcaggattcccagagcccacaatagattggtatttttgtccaggaactgagcagaggtgagatgattatttttggcactgcttataatgcagaggggaaggactgcaattcacttgaatttcaaatatgttttctgattttttttaaaaaagctttgttttgattattgttttttttctagccatgtggctttttagaagggataattgctatatttttcttggtagacattaattttgtttgctgaaaaatcattactgaatgacttctctattttggtgttatctttctggatttatcatgcaatttctagcctgcaggtagataaagcaattttgcaggacagagtaattagatttccattctatacacaggaggtaatgtgtgtgggaaatgtgactgtagttatcatgaaaaaattacctcagtagttaattgccaagttaccaaaaagtaatgatcgcacaattacaacatacatatggcatttgcaagcgaccgcttttaaaaagggtttcttcttgataatgtgcccagcccctgaacagagaacatctggcactgtgctgcttgcccctcaccatccacacttaagccttaaattgcccttttgcattacctgaagacgaaaatggggtcaccacagctgtttttatccatcaattgctattttatgctcaggctttaaaagcccaggttaacatcacaattgaatagttagtatggtcgcagaaattttatttttcatggaataagcctctttatcacaacaagttggaaggggttacatcggattgctgttttcagctggggtttaggagagtgttttcttttggggaatactaagtagggttcaaggcccctgggaggaatggccacagcagaagcaagccctgtagttacaggcattcattcagtagatacacagggagtggcaagtgtgtaccagacactattctaatggacagaacacacccaagtctttttgcctttatgagtttatgttctagtgcaggggtgttcagtcttttagcttccctgggctacactggaagaagacgactgtcttaggccacacataaaatatagtaacactaacgatagctgatgagctaaaaaaaaaaaaaattgcaaaaaaatctcataatgttttaagcttcatgaatttgtgttgggtcgcattcaaagccgtcctgggccacatgtgggctgcaggttggataagcttgttctagtgggtagaaacacataatagatggaataaacaatgaatgtatgtaggtgttaagaaaggaaacagggaatagctaggtgtttagaatagggaagtcggggtctggctcatgaaaaggatcccttgcagtggtggtctcagccacctgcagtataactaggccttcctgcttagaactcaaacttcagtcctcactttgactattttctggtctacatccttgattttgttgttgttgttgttgttgagaccgagtctcactctcttgcccaggctggagtgcaatggagtgatcttggctcactgcaacctctgcctccagggttcaagtgattctcctgcctcagcctcccgagtagctgggattacaggcgcctgccaccacgcccagctaatttttgtatttttagtagagacgaggtttcaccatgttggccagtctggtcttgaactcctgacctcaggtgatctgcccacctcggcctcctaaagtgctgagattacaggtgtgagctactgcgcccggccccttgaagattttttatgctttcctcctctatgctatttcttttcaaccattcgtgtacccttttgaagcttgtttattttagggatctactgtgtaccagcatatatgcctgccattttattgaattcctttccaatcctttcagtaaccctctgcaatgggtattactatccctgttttacagtcgtagaaactcagtgttggtgggggttaaaaactcatcaggattcaaacccgcatctgactccgaagcctcctctgccttctcttccccagtgcttttttcactcactaggtcaccaaagtgcttattcttagacacttgtaaaaggacattttctgttgattatgaacctctaactttgttttaaaagtatgccacatcccaagtgttttatgtatttatttattttcctagagtaagccagggcttttgttttcttccctttagatgctctgcttctgtactgccagtggatgtgcagacactaaactcatctgggccaccgtttggaaagctagtggttcagagttctatagattctagtgcattcaagcacaatggcacggttgaatgtaaggcttacaacgatgtgggcaagacttctgcctattttaactttgcatttaaaggtaacaacaaaggtatatttctttttaatccaatttaaggggatgtttaggctctgtctaccatatcagtcatgattttaagttcattccaacattgaccatgtcatttctggtaatacatgcatcacaccatactgtcatcaaactcactaagtttcattttgtactagcttgttaagtatatgcttttaccagagcaattttaaccatgctactttatatattttatatgtatgtgtgtctctattagttgtatatttacaattgtctccattaaaaagagctagagaaagcaaatgggggaatatatttaccttacacccaaacagaattagaacaatctaaaatttaaattcaattaaaaatttcagttatttaaaatgaattattttaacactttgccagacactgtatccaaaagttaacactgcctttatgaagtcatgttagcaagttatttctttaaaatatttaaaatttgattcatgtgtgactaactctcttaacaagttaaaagatcttttgggcaaactgatgaattggtacaaagtgggaagacaaagaaactgggcacttactttttaggccttcttggggttttgtttgtttgtttgttgttttcgttttttgagtcggcaaagactagtgccaaaaagtggcgtgttttctcaggttttgagtagtgaggggaagaatcttccatgtttttcagacagggcaacgaaaagaataccttaaaaatgttttttttttttttggttgtgaaagacattcatgctcagtgtagaaaatttggaaaatacaggaaagcttaaagaagaaaatataaaccgtccataaaggaagcttcttttttttaaagttgtacaaggcaggaatttgattgaagtataaagtgcattcagatgttgcttttcattgaaaaacagcataaattattccttttctacagaaatctcaacttctattctgcagtattgtggtttcaagttatatttttaaagattcatttgaataacaagagtacaatgtaaccaaggtgaagctctgagactcacatagctttgcatcctgccatgggctgtgagttgggaggtggggtcagtttgggactgagtggctgtggtagagatcccatcctgccaaagtttgtgattccacatttctcttccattgtagagcaaatccatccccacaccctgttcactcctttgctgattggtttcgtaatcgtagctggcatgatgtgcattattgtgatgattctgacctacaaatatttacaggtaaccatttatttgttctctctccagagtgctctaatgactgagacaataattattaaaaggtgatctatttttccctttctccccacagaaacccatgtatgaagtacagtggaaggttgttgaggagataaatggaaacaattatgtttacatagacccaacacaacttccttatgatcacaaatgggagtttcccagaaacaggctgagttttggtcagtatgaaacaggggctttccatgtcacctttttgggtacacataacagtgactttaaggaactccagtggcttcctttgttttgttccacctgaaacaatgagttttctgtgaaattgcgccccttttgataggtttgccatagagaacatcgtaggaaaatgtctctggacaacattgtttttaattcctttattgattttgaaactgcacaaatggtccttcaattccaccaccagcaccatcaccacttaccttgttgtcttccttcctacagggaaaaccctgggtgctggagctttcgggaaggttgttgaggcaactgcttatggcttaattaagtcagatgcggccatgactgtcgctgtaaagatgctcaagcgtaagttcctgtatggtactgcatgcgcttgacatcagtttgccagttgtgctttttgctaaaatgcatgtttccaattttagcgagtgcccatttgacagaacgggaagccctcatgtctgaactcaaagtcctgagttaccttggtaatcacatgaatattgtgaatctacttggagcctgcaccattggaggtaaagccgtgtccaagctgccttttattgtctgtcaggttatcaaaacatgacattttaatatgattttggcaatgctagattataaactgcttggaagatttttttacccagactgttgttctctcttgctagattttgttttcctcattgttcttaagaatgcagattttaattttatcattatggggtagaacagcccaggacataccctagttattgtcgtatttgtaacatcaacgacatcagcctcttgaatatctcatcccgaccagaaggcttctgttatcttgtaagctttatacatttcttgatcatatgtagccactgaaagggttaatattaatttgcatactacaatttaaaacaggcgcctaagcctactggttctcaaatatacaccaaatgaggcaaacatttcacttctctaaaaataagtttccaatttgaagccttagttgaagttcccatcaaggatgtctgtgatgtttgcagaaagtatttcagttgaaagaaacaaagatgtgtaaaatgagctgtttctggagatccacgataaagttgacagccttatatcatgtcttccaataatccccataaatgttgcttcaccacatcatgaattgttcatgagaaaatttcttacccaagttaattagttgcctgttacttctaaactacagtttaaacattcatagcaccaaaaaatttttcaactagtagcgctcagaacacaggtcattttaggttttcactcactttccagtcttgtcccagctggctgctccttgtggctgattttcccactatgccacagtttgtgccttcattatttccataataacgttacagagagtgtgtgaagccctgctgtaaacagaagtgaaccagaggattcacgtaggaagcttgataatagtagaatctttgaaagcagtaacttctctctgtaaaaccagcagtcatgcttggctccaaatactaatgtcacttagaaattcaggttaaaagaggcttgcttgttttatgttactccacataaggctgcttttttgataagcagtgttaatatatgggattgtattgggactaagtagtctgatccactgaagctgaatattaatggccatgaccacccttgggtatttttatgggaggcagaattaatctatatatctcaccttctttctaaccttttcttatgtgcttttagggcccaccctggtcattacagaatattgttgctatggtgatcttttgaattttttgagaagaaaacgtgattcatttatttgttcaaagcaggaagatcatgcagaagctgcactttataagaatcttctgcattcaaaggagtcttcctggtaagactgatttacataaatagttagctgttgacaggcagttcatggggtcataagggtttgcaatcaaggctgattctttaaaaaatgaactgaggtactctgaggtatgaaatcaaaattattaaatcatttaaatgtgattaacagtttagaaagttaaattgtgtttttaaagattcaaacctagatttttgctgattttttaaaaatgtattttcagttttcttctacactttagttccatgcaactgaatgcattctatatctgtttctcttacggttctgtcctgcatgtatttccatttatactattgagcttggtactacatgcatgtttccagtgagatactgtttatagggaaaatgctaaagcctctcaagttgccacagtaaagtccctttaaaacctttagcagaatgacaaagagctctgaacatatctccacatgtaggcttcttgccatcgacctctggattattcctgtataccttgcctcttgccctttttatttcatcatgctattaaaagacataactactccagcacattttttaaaaattctggacattattctcatctctttcatcattgatgccattctgaatttgaatcatgtataaagagctttgagtttgacttacaaccagaaaagaattcttctcatatcttgcctattctttctttggaaatgctcttaagggccaccatttgagaagacttcctagatgtacccagtccaacagaagtcatggttattttgcccagtcccctatactgtatattgctgcagttgtgtggtagatttctcctatccttttcatgcactttatatccactgcatcttgcaatggcaagacattgcctcctgaactcttaacaccaggtcctcaaggagacctcagtaaatattattgatgggcaattaccccttaaagccattttctgtacctctggctaaagtttaaaaccccaggtgaaactttttatttttttttaatcctataaacttgagtagtttaaagtggtagtagaaactgtacaaaaccactttttgttagtttctcctgggcatgtgctcattatatgaagaaatgagccattttgcttctttccgaaaccttggccctatatatatcctttaactttctgatataatggcctaaattgttcaatcctgtgtgatgttctttgtgctttgggatcccatatgggattggaaccaccagcacactctgaaggagattgttgtcatggtgtttctatgctaatcagaagcaggaagtactagaaatcttgaagagtctccagccaaatgttgcagattgaagaggtccagatggttcagaaaatcatccaaattattggtgtttatctgaaccaacttgatttttttttaaaccttcctccatcagtcactatatgttaacgatctctgcctcctgcataacacgtcttggaagctcttctttgtctttctttcatcttgtctcctggggctcatttagagagtttgaggtaatacgggataccatatttggctctctgtctcccattaaattcattgtgtcaagagacgggaaatttctaacctgagtcctctatatgattatacacaaaaaggacacctagtttctgggcatggaccccaatatcgattattaaaaactcatttcttacagaacaggattttcaaactctttattcaaactttacatgactttcctcaaattggtccagtctattatgtagcaaaggggatgaggaggtagagcatgacccatgagtgcccttctacatgtcccacttgattcagtcatgacttgtttcatctctcccagcagcgatagtactaatgagtacatggacatgaaacctggagtttcttatgttgtcccaaccaaggccgacaaaaggagatctgtgagaataggtgagtacctacctatcaagcaaccaagagtaactttacagagagtatgtatatcatgctaatgtggaatataacatcattcccagtagcaatgatgcagaccagttctgctttatggtagcagtgccaatggtcaatggcagttagggttgcaagtgggtgtttggggtcagagcatatgtttttgtgcctgagtatctttctatagatatgggatctttgctttaattcgccatccctctcctctatggattttgtaacccagcctaggattgttaaatattaactttgtgattcagcatctacctttcctggacaccagggaagtgatctgcctgcaagttcacattagttcattcattaccagcctttggtatgtcattgccactgtcttttcctttcctgacctttatggttgtaattgctaagaaaaatcctctcttcctcacaggctcatacatagaaagagatgtgactcccgccatcatggaggatgacgagttggccctagacttagaagacttgctgagcttttcttaccaggtggcaaagggcatggctttcctcgcctccaagaatgtaagtgggagtgattctctaaagagttttgtgttttgtttttttgatttttttttttttttttttttttttgagaacagagcattttagagccatagttaaaatgcagaatgtcattttgaagtgtggtaaccaaaagcagaggaaatttagtttcttcatgttccaactgctgtctctttggaattcctgttctaatttataagctgtaaagtacaagcctgtctaaatgagtttttctatgaatattcttttatatgcagtgaaattcttttaaaacttttggcttttaggatataggatatgttcctagagaacagaatcattttatcagtaaaagcagagggcacctcatagttacaaggcttggggtgaagcatagacttgagttttattgaagttagatccaaatattatatgtgtggcttatgaagtgtcaggaaataaggggtcagagggagtaataaacacttgggagaaggttaggaatggaaagaatgatggaaccaaaacaaggagcatggtctgtggaagggtgaaaggagttccttaggaagtaagattaaccgaacagaatgagttaccagtcctacccttaaatgtcatgggtgacatttcccaacaattaccaaactaagaaaggatataagatggctgaaataaagaccttcttccgtgtgtccttgggagatgtcagattgaatttgcaaaggcatattaggaactctgtgaaaggacattcaaagagatgcatgcaaaatgaattttcagtttaaacaatatgatatgactatttcttatgtatttccctatgaatgaaagcagtcctgagaagaaaacagcatttattagaattgcttttaaaagagattataataattagactcttgattatgtgaacatcattcaaggcgtacttttgatttttatttttggtgtactgaatactttaaaacaaaagtattggattttttataatataagcaacactatagtattaaaaagttagttttcactctttacaagttaaaatgaatttaaatggttttcttttctcctccaacctaatagtgtattcacagagacttggcagccagaaatatcctccttactcatggtcggatcacaaagatttgtgattttggtctagccagagacatcaagaatgattctaattatgtggttaaaggaaacgtgagtacccattctctgcttgacagtcctgcaaaggatttttagtttcaactttcgataaaaattgtttcctgtgattttcataatgtaaatcctgtctagggatatcacacattttagcagtcaaattaagtatacttcagcaaaatttgcatggtatgctgaacattactacaactaacattcaataatagaagtcctaattctaattgtgtaattttggggcatgtgaaggaaacagaaatagccttaattttcattatagcctgagaatagcaatgaacttgattttgctcaagtgtaacaaatgtaggtcattgaaggtcacagcaggagaaattttggggggattggcatgccgtgtgaaaaatattaaaatctaagatcatattcagagttagccatatagaatgttggatcctagaatacacggagagctattaaataggttcataagtaataatgggtttgtagaacatagcaaatgtttttcaaagtgctgtatttccttgccaatttttattgaatcctcagaacaaacccttgtcctataattgcagcaccttcctattttaaaagttggagaaactaaggcatggcatattttagtgctttttatctgaggtgacacaggacaatagaggctgaaactagagcctgtgatttccagagtggcatcccatcgccatggaaaaccatattgccctttataatattctctgcctgtcttcctgggcccatttctgcagtccagatttattcctggaggtggatttttgtgccccttatgataatgtaatgttttccccccatcactgtggcgtctctattggtagcctgtactcgatttggttttgtaagagtgtttctgtgtttatctcctggccaaagcatgaatttctgaaaaggctgccctgaagctagatattatcatcaggagtgataataaaaacaacttctcttcatcctggtgcaattttggaaggaagaatgataagtcgttaattatccagtcctctgaatattgaccaaagggaggaggaagaaggtggccgcctccaggcccagtcttgatgaattctgcaatctgtctccattatttcatgcctgtgtaattttgtcaagagttgtccaatacctctgaatctttgtttttctccccttgggaataatagtgattcctgactcagaaagttatgagttaatatatgtaaagtgcttatgacagtgccagacatattgttactattctttatagatgtcttatttacgatctaaataatcgtgacggtggttacatactgtcttgttattggttagtgaccttagtttgaaatgacaaagaggggttggctctatcaggcttccagattgtagactccagttcaagtcagttgaactaaccaatcacagatctcgctttcaccaggctagtgggtaaggagaatttctggaacaagataagaagaaggaaactcatatatgttaccgccccacatttttgtcatcatcatttgagatctccttgttgtgtcaggttctctgaagttctttcctttcacatgagttcttcattgtttttcatgtcatggccccttttagagcctggtaaagcctatgggacccttatcagaacactgttttcaacgcctatgatgaaatacataggaataccaaggaaaacagttaaatcgaaatagctatgaagatactaagtaaatttgtgatatgtcagtacatgtgtttactatagagtgtaacaggctctgttaggttggtgtaaaagtaattgtgggttttgctattttttctaaaaaccactgtaattttagagtggtgattaatgtaaatatgattttgagatacctataaagacttaataggatatgaagatatttatgattactgttcatgacaaagtcacaggtacagctgatactactgcgttttatcacctttgttagtaatttaaagaaatgctaaatttcatctagaaattagcgaaaataaggatgtcatttttcctttccaagttcacaggcccctgaatttgacacccatagatctcaggttaggagcccttataggaactttagcacaacatctaggaagggaagggatattggaagttttttgttttgtttttgtaagctgactaaaataactttaacaccaaaaaaaaaaaagaaaaaaaaaaaaagctttcccagttttcaatcctaaatggattaagagaaggattgatttagctttttatggcagattaagattgggaatccagaatgcatctaaaaggactagttacagaaagtttagctcaactttaatggagagagttctccaaagagtcaggatcacaagccactactgtttatcaagtacttgcctttcttctaggcaatttttcagatagcactgagtcaggcggtgctaagcatttttacccattttatcttatttaacccacaagacaattcataaaattaaaagtattcattttgttttacagaagaagatactgaggcttaattacaaatattttagtgactttcccagtgtattagagaaagttttgggttttgacagaaaacccaaaataaaagaagtctaggagtagactttataccaggattggtataaaggttccatggagtacccgggcaagtctttcctttccatgcttagccattcctgagtgtaacccccatgtccatggtccaagatgaccaccaggtggatagccagccatcatatccagaaggcagggggcccttgcactagagaagagagggcagagggcacgtgccagctatattgtaaggaggttttcctgaagctgctatacagcacttacaacttagtggccaaaaccgagtcacctaactacagctagctagctgcaaaggaggctgggaaatgtagtcctaattgtgagaggccgtgtttctgtttttaaggaaggagagggacatattcagtggaaactaacaaatctctgcattacctaaggcccatggtggagccagggctaaaatgtctggctgtctctgacgtttgtgctcttaatctccatgccgtactgacatagtgctcacatcttaaaatggggataatgcacttgtgagccatgtatttcagaggtgattgggatcatctgagttcatataggtaaaaggtttttgtgagatggtactcaagttatcactccacatttcagcaacagcagcatctataagaatatcttctgttcaattttgttgagcttctgaattaacattattgactctgttgtgcttctattacaggctcgactacctgtgaagtggatggcacctgaaagcattttcaactgtgtatacacgtttgaaagtgacgtctggtcctatgggatttttctttgggagctgttctctttaggtaaaatgatccttgccaaagacaacttcattagactcagagcatcttcttgaagtttcattggtgtcctgcttccttgtgattaacactgctttgcaaactgtgtctcaggaagcagcccctatcctggaatgccggtcgattctaagttctacaagatgatcaaggaaggcttccggatgctcagccctgaacacgcacctgctgaaatgtaagagccaaaaaatttttcctttaggtcacgttttcccttttatttttctttttagagacagaaacccagatgttgagggttttcataacacagtttgaaatgtcacttggattctttatgacacactggtcaaatgtcatttctgtagtttattttcataatctcttgtcaccaaaaatacagaaagtttcagtaatatttcatacatgcagtgttttatgttatctatatgtcagtccatatgtccagttgcatagccctggaattattactgaagttgctggatgcccatacatttgaaaacaagctgagggcattgaggagggatagtaaatggcccttgtcttgcaggtatgacataatgaagacttgctgggatgcagatcccctaaaaagaccaacattcaagcaaattgttcagctaattgagaagcagatttcagagagcaccaatcatgtgagtataccctggccaggcatagaatcccccttctcccagttccaggtgtgtcctcctcctcaggctttcagggtgaggactaacctcccaaccccttctctcctaatcttaggttgcaaattgggcttcaggtaggggaagtaaagcaatggaaactagttctttctgcccagccctcctgttctgagccaaagaaggatgtgagattgagggggaagggtggagagttttgtactcactggaagtagaagtttccataaggatttgccatgtttcctccctcatctcaaatgctggtcacggggtcagtattttctccctctcacatgtcagggccatgcatcctttggagggttggggtgatgtgaactagaataaaagcatagaaaagacagcttgttactgcagtgaaataagccttctgatcaaacaagcatagccagaaaatggcagatagctgtcatgcccacaagccatatagaatgaagagctgtttgaagttgggagatccctcccagtgatttgggaagtgtgggggaatgaaaactcaaatccattatttcctctctttttaagcaagaattagtgatactttgactcagatttttttaagctgctttctttcctgggctgtgtgcttggagctatcttttctttcctaatagcacaccactgataatttttgggttaaagcttgttcttctgggtgtcaaaacatgtttcaaattgaacagcattttccacccagttgctttgattcttgacaagagacccctggaagggccgtgggtttcccagcaaattacattggttattgggttgtagttgctggagagatttacaagccttttaaataggtaagatagtgcttggtgcctggtgtgcccttttagaagagctaagcttgtgcatgttttgtccccacttcttgtataaagttatttccttggaaaaatgaagggggaaaacaaagcttatatttgttttgtcagtatgacttgggttttggccacaaagttcttggaaaccacttctctcttaagagtttccatcagttagttgtgatcttgacactgtaagtatgccttttgttgctatgttcgttgtagggactgctgtattgactatgggcttgttttctccagatttactccaacttagcaaactgcagccccaaccgacagaagcccgtggtagaccattctgtgcggatcaattctgtcggcagcaccgcttcctcctcccagcctctgcttgtgcacgacgatgtctgagcagaatcagtgtttgggtcacccctccaggaatgatctcttcttttggcttccatgatggttattttcttttctttcaacttgcatccaactccaggatagtgggcaccccactgcaatcctgtctttctgagcacactttagtggccgatgatttttgtcatcagccaccatcctattgcaaaggttccaactgtatatattcccaatagcaacgtagcttctaccatgaacagaaaacattctgatttggaaaaagagagggaggtatggactgggggccagagtcctttccaaggcttctccaattctgcccaaaaatatggttgatagtttacctgaataaatggtagtaatcacagttggccttcagaaccatccatagtagtatgatgatacaagattagaagctgaaaacctaagtcctttatgtggaaaacagaacatcattagaacaaaggacagagtatgaacacctgggcttaagaaatctagtatttcatgctgggaatgagacataggccatgaaaaaaatgatccccaagtgtgaacaaaagatgctcttctgtggaccactgcatgagcttttatactaccgacctggtttttaaatagagtttgctattagagcattgaattggagagaaggcctccctagccagcacttgtatatacgcatctataaattgtccgtgttcatacatttgaggggaaaacaccataaggtttcgtttctgtatacaaccctggcattatgtccactgtgtatagaagtagattaagagccatataagtttgaaggaaacagttaataccattttttaaggaaacaatataaccacaaagcacagtttgaacaaaatctcctcttttagctgatgaacttattctgtagattctgtggaacaagcctatcagcttcagaatggcattgtactcaatggatttgatgctgtttgacaaagttactgattcactgcatggctcccacaggagtgggaaaacactgccatcttagtttggattcttatgtagcaggaaataaagtataggtttagcctccttcgcaggcatgtcctggacaccgggccagtatctatatatgtgtatgtacgtttgtatgtgtgtagacaaatatttggaggggtatttttgccctgagtccaagagggtcctttagtacctgaaaagtaacttggctttcattattagtactgctcttgtttcttttcacatagctgtctagagtagcttaccagaagcttccatagtggtgcagaggaagtggaaggcatcagtccctatgtatttgcagttcacctgcacttaaggcactctgttatttagactcatcttactgtacctgttccttagaccttccataatgctactgtctcactgaaacatttaaattttaccctttagactgtagcctggatattattcttgtagtttacctctttaaaaacaaaacaaaacaaaacaaaaaactccccttcctcactgcccaatataaaaggcaaatgtgtacatggcagagtttgtgtgttgtcttgaaagattcaggtatgttgcctttatggtttcccccttctacatttcttagactacatttagagaactgtggccgttatctggaagtaaccatttgcactggagttctatgctctcgcacctttccaaagttaacagattttggggttgtgttgtcacccaagagattgttgtttgccatactttgtctgaaaaattcctttgtgtttctattgacttcaatgatagtaagaaaagtggttgttagttatagatgtctaggtacttcaggggcacttcattgagagttttgtcttggatattcttgaaagtttatatttttataattttttcttacatcagatgtttctttgcagtggcttaatgtttgaaattattttgtggctttttttgtaaatattgaaatgtagcaataatgtcttttgaatattcccaagcccatgagtccttgaaaatattttttatatatacagtaactttatgtgtaaatacataagcggcgtaagtttaaaggatgttggtgttccacgtgttttattcctgtatgttgtccaattgttgacagttctgaagaattctaataaaatgtacatatataaatcaagtggagtcatttgattgttgagattcgttgagattaaactttaaagcattaaagtgcaatcatcctgacaaagttttgtacgcagttttcataaaatatgtgcagggctatcagatcacgctaggatttacatgcttcgagattcaacagatattaagaattttcatacgtgtgatattttctcattttagtcttacaacctgaggtctctatttaaattgaaaaatagatacagagaaggtgcttagtatgtatgagctgggtgctgtcatgtgggtgaaacattatgcatgcccaattggtaccgtccagaccactggaacccaaacagaggctgagagttcttcagcttgaaacaaaaggaagcaccctgaatcacataatcttattaagaatgaggcacccacacaccctcagtcatgactgtctttattgacgtgacatctacacctgcagaaatgtctcctgaaaggaaagggaaggggtgaaaagtgacctgtaatgaaaaggaatccttttaaaatccagagggaattgtgtggcaaggaatgcgtcaataatcagtgaaaaacagacccacatttcagtcaggcaattcccattattttattgcagacaggaatgaatgctaattgaccacaaaacaaagaagtcttttctttccaaatgttttcactgtcatttagcctttgtcatgtgtgagaaatttgcgttagaagcagttgacagtcccctgtgttaagagtctagctaattttcctcaccagcctagcttttcattggaaaggaataccaggtcttggtgcccaggctcaaacttggttcgaatctcagtgccacccctgtgtctaccacttaaccactgtgtgacattaggcagattagctcttgaaatctcagctcatgggagtagtgtctaccttgatgtattaatgtgaggctgtcaagaccagctcgttcatatgcctaataagtttttccacggccaattcaccttattaagcagggagggcggtgttcctgtactgacataacccatgtaaaattatacagtcaaaagcttgattctaattttctttctcttaggtgcaaacagtattgtacaagtgtgttgcacaacttgacattgctataaagatttctgggtggtggtggtggttttttttttttttaatcccagtgtttgaccaggaattcaaagctctctattcttgctccagccttccttcctacttctctcctattatcaaaggcccatgagtatgccccatgctcttctctgcttccattctcagactgcatactgtctcttctctccagcaagaccccatctttcaagaccagcaaaatcatctcaatgggaagctgtcgctgaactcccacaacactctttactttttatggctcttacaattgatttttttattattttggcttttgtcttgtccccacccatactatatccagacttaaaatcggttaacataaaattcccgtatgtgccagggttactggtgtcagtggtatcatttacttgttaaatattgaattgtccggacgctcaggggttaaattgcccaagaggttgcaagagttacattttgcccaagttcatggagcagtacatgaaaccagacttggaatccagatctgtacctcagtgatggcaaacacctggtcttcccatgctggtgtctcccaccaccctggccatgcagacatcactcatctgccaccacaccctccaactgagcccaggtgccttagaagtcacagtcttttccaacaagctgataggagtcaactggtgttagcctgcagagagacttacctgtcccccttaaatgatgaccaagtttccatcttcctgagggacagatgttcttcatctcagacaccccaaagctgctagcagagtacttcaagagtggttctttttgaacaaataattaaacatcccatcagtgtttggagtgagagagagccattagggaggaaatgggcccaagaaagagaggaaatagaagaagacagaagctagtgaagttagcttaatttcacatgaggggggtggcgctttggggagaagagaaaggggaactagaaacattccttcggacagccttactgaggcctatacagaggctttgtgggaacaaggagaagagaaggaaaggagggcgttggtagttggggaagggtgaagaggaagggaaagtggcaggagtgctctgccttattcagaagtagggagaggagctgcagctgacaagcagtttcagggcttaaggtgcagaagctgaagacaggaagaccgcaccacgccacacttggtcttggagaaggtcagcagcaccagcgtctgcatgagaaaatgccccatgggagaggtctcgggatgagcaaggcttcaggaagcaccacctgggcagcctttgagtgaacctttatgaagaaaagtgtattggtttgctagggctgccataacaaagcacttgaaactggctggcttccatatggaaattgattgtctcacagtcctgcaggctagaagtcttgagatcaggatgtcggcagggtcggttctttcggagcactgtgagaatctgtcccatgcctctcccagcttctggtggtttgctggcagtctttggcattctttgtacatctctgtcttcaacttcacatggtgctctccctgtgtgtgtgtctgtgtccaagttcccccttttgatgaagacactagtcatattggattcagggttcaacctactccagtacaacttcatcttaactaattacatctcccaagaccttatttccagtaaggccatattctcaagtactgggagttatggatatgacttcaacataggaatttgggagagacacaattcaacccagaacaggaaaatctcaaaaccctcttgattgcaggtgacctggttctccctagagtactaaatgggctctctaaaaactcttgagtgatctccaaagttccagtttcagagcactctgttcaatcattccattgcctagagcagtgtttagaacagagcctggtcagtagcaaccactcaattgtcaaataaatgaagctttatgcattgaaggactcctccttgaaacttgccttcttgcctgcattcgccggtcctcctctttgtcttcctccagcacccctttaaaagtgggagttccagcgtttggtcctttcttgtcttatgttctccaatctctggtcaatctcatctaatccctgagatgtggctgtcatctaccaacctacaatttccaactctgacatctctccctttgtatagactagaattgtcagataaaatagaggacatccagttaaatttgaatttcaacatttaatgtaagtgtgtacccttaagtatttagaacatatggatcctaaaaaaattattgtgcacttgaagttcaaagtcaacttgatgaccagtattttgtttactaaatctggtaacccttgtctagattgtgagactcttgaagttaaggatgacacttaattaattattggatattctaggtccagcacatgaaagaaatgcagtttcaaagatactaaaatatagaagaggaactttattttattgaaggtctgcaggtggcaaaccctttactttttgatgtctaaattgtcatttcaccttcattcttaaaaatatatttgcactagatatagaactcaaggatggcagttatattttttagcacattcatttccaccctcttcgagtttccattttttgctattgagaagtctgttcaggttgtcattctcctgaagatattatttttttgttttcattattgcctctaacattttctctttgtctttggtctttacagtttcactatgatatgcctaagattgaatttctccttacttatcttatttgaaattctttggacttcttgaatctatagattgatgtctttcatcaatactggaaaaatctcagtccttttaaaattgttcagtcttttaaaaatctttcttctccatcttatttctcttctccttctgggactccaattcaatgcatcttaaagtctcactgtatccttcatgtctcttaatctggctttcatattttccttctttttgtctttctatgctacatgcaaggtaatgtctgttattcctgttatctgaatcccccttcagctcctgtccatggagaaccattttagtacctttactgaggcataattaacataccatagaccccactggccattgtaagtatataattcaatgattttattaaattacagaattgtgcaactattcccacaatccagctttagaacattgctgttatccgcaaaatttcccttatgcctgtttgcagttaaaaggtattcaaataattttaatggattaattttcagttatttttgccctgtgagataataccacatatttcactttctcttagattactcactcattgagtcatttattgtctctgggttctttccagatgttttggtcacataaataacagtgataatcaacaggttgccttggttggagaattatcagtggtgataatactgatgataatgagagctaccatttatgtaatgcctattatgtccctggatctttattgggtgtgttatacgtattaccttatttaagcttcacaacaatcctggaaggtaggtattatttgtctccatttaaaggtgagaaaacttggcctctgagaggcttgctatcttgccctaaacttcatggctatgggcaatggaattgagaggtaagctctagtttgacccctgaatcataggattttaagcagcaacttcaccaagatgagcaagtcctttcttgtctgtttctcagtgttggatgatctttgagccatttcatttcacttttaaaaatacaagagaaggctgagcatggtggttcatgcctataatcccaacactttgggaggccaagggggaggattgcttcagcccaggagtttgagatgagcctgggcaacacagtgagaccccatctctataaaaaataaaaataagataaataaaaatacaagaaggtaaggaaatcaaatcagccactttgctacttattactaattcctctaaaatgttggtgagaatgtggttgaagtaaatgctaatggagctaatataggctccagaattatctgttgatgtcacaggtttgtgatctgcccacttcctggtgtgccatgagaacttccccatgtccttcagggatatttatccccctctgtttcaaagaataatctggttcatttgagcctagtgagaaaaacaaaatgctggatttacagaggggtgtggggtctgaagtgtggagaggagcattagatagagccaatcaggaatttcagataaatgagagtgtgggtgaaaatactgcctttctcttgatccaacatgttattgttggttataaattaacaagctgttacccatatgtctcctccactgttgattccatgttcattggttgaatgcagcttctatgatgtgggttcttctatgaaggatttaacttcacaagggctaagtcctcagggtaaacgctcctagttgaaataaaagttcttgagtggctcagctgtgtgtctccatccatggctaactttgaagtgtgcgtgcctctttgagcacatcagcagggctgtggtgtattttatgaggctgacctttttctttgtggtctgtggcttagcagccactcttgttctatagtaaatgaagaatgaggacaggcaaaaggactttcttcatggctgcttgtctcaggatatgcacaggcatcctagggaaactgaaaacacttgtgtccacacaacaggccacctgggtggcctgagtgccaaaccctcttatatggcataatttgcttctaatcagggtgcattttactcctatggagtgtttggtacagaaagcgggtatgtgtgaactgaatttctctactgctacattcagatactccagttgacatgatagcatgatgtgacaataggttttattgagtgatctggttcattagcaaagacgtgaagtgacttttttgagaaggatacagaggtttccaataggttcagtgagaaagtatgctgtggttaagttctgtctgcttggacataggcatgaggaattgtattttgtgtgctaactcttacatagcaccaatatatagctcgtatgttctcagtgctttacttatattcattagtctaatcctctcaaaaaccatacgtaagttattattttacagatgaggaaaataaggcacagagagtgtcaaacagcctgcccaatgttacaaagctagtgagtggccaaggcaggactggaatccaaggagcctgggtcagagtttgggttctgaaccactatgccaaactgcctctctatgtacttattttcctgttctaatcaagacagactacctaggtcagccgggttccatacaggcctcatatttttccctggcctaggatgcaagaggggatcttctccacatggatgcctcctacacatgagtttccttgaatgtccttcttttctcctaggctgacaaggatttagattcctgaccttgcaaaatgagacggctttttcaggaagacagtgatgaagccccaaggataaacaggcacccagagcacatgttggtggcaattgaactgtctttgacatgcatgatatctatggatgacagggaaagttgaagacaatggtacagtgtaaggcagcagtccccaaacattttagcaccagggaccgattttgtggaagacactattttcatggacaggggtggggagaatggttttgggatgaaactgttccacctcagatcatcaggcattagattctcataagaagtgggcaacgtagatccctcacatgtactggttaacaatagggttcatgctcctatgagaatctaaacccgcctctgatctgacaggaagctgagctcaggcagtaatgctcccttgcccttgcaatgcagcctagtttctaacaggccatggaccagtaccggtccctgttgaggacccaggttgtaaggagtcccaagcccatcctgttgccttagttgtgctactatttaccacttaccttacctcctttcttaagcaaccatttattaagccttaaacacttaacttgcattatttcatcctatcctcacaacagccctaggagatagggagttatctgtattgcaaagatgaggaaactaagactcaaggagtttaagtaaattttgtttaactccaaattccttctcaatggattccacagaaaatttccactgttgttgctgctgaactccaaattaagttaaaagtcccaataagcaaaatagacaatagcgacaggggtccctgaagtccacttgcctgcccagctcttcctccacagctacctctcagactctctagtccttcacagaccacatttgggaaatcactgaaagttccctgcagttcagcagcttaaaatcccaccctgtcgtgatgtggttgactgtggcttaggtctcctcttcctgaaagacttccagtccctggggcaccttgggggcattccctagtctcttaaatgcagactcttctattgactcaaacaggaagatatggaaggaagcacaccttccctgtccacaagtttctgagatttctccagcactaaggctcttgtttttaaatttctttttaatttttatgtaatatactattattttcaaaagatctgctcagctcttattttccttgaggtaatcaatgttaactttcatataataactttcatacctttctattcttgtgcatatatttatatctattatttaaagaaatgggattattctattaaggaaggcaaagaatttttatctgaggaatgtgagccctttctaacttttaggcctaaaaagccattaaaatgagaaaacaatcacatcctacttccctgctttgtgagctatgcattcacccattgaacctgcttgctattgcctataaattaatctaataatgccacatcaaacactataacccacactctagagtttaacaatgtatagccaatcactaatcaatgttatttctgtaaaccaatgagaattcctgacaaacaatgaatgtcctatcaactccctgtccctttttttttttccgttaaaaatccatttgtaactgccactaattgaattatacgttcatggcaacttgaatctatgcttccaagttgcagtcctcaaccttggcccaaataaactctctgcttatattaattttgcctcagtttcttcctttccttttatgtcaacgttttatatatatatatatacacatatatatatgttatatatatacatatatatgttatatatatacacacacatatatatgcaactaacattgcattgcatatatatatatatatgcattgcatgtatatattctgcaactagcatttttaacttacaatgtattatgattatcactccatatcatcacatatagattaaatttacagttttccacagtatgggtctaccacaaacctgatattttcaggtaagaacttgtcacgttggctattggcagtctaagatcttatcatttttggtccacttctgccaaatgtagaggatggcatacatttgtttgtttggactaaaagctaagtcagggggaagtatgtgatatactattttggtcagtttagcaaataaagataatttatataagagggcctagtgcagtgccagttgaggcacatgtactcattaaaggttagttaaatctcaaaatataatatgctttggtaagtaagaatgaactgagaaagtaaaaggaatattagtgtgcctggacagatttttattgaatgtattttaaaagtaagattattagctttttgtagatgtctaaaggaaattggaagaaaaggagttattttcccatcaaacacatacttctacagattggctgcctatgattaaaatagagccaaaccacaccagggttgctttagacattcacccttcagataacaataggttatcactttcattttgaactgctctccaatgaatgcaacccccctcctcccaagaatgtcaatcaatccttgctccagtttgggctgattggtaaagtattagcctgctcttaaccacacaaaaatagctgcactccaggtacttgtcaggcagtataagctccaactccctggcattcagaatccatcaaaagcctggttgatagaaacaatacttatgcacaattgtctaaagaataatcagttcatctgccctctgttttgaaattcaagttctattcatgaacttaagaaagctgtgtgtatggattgggttatattgtaccataaccccagaaatgcttttgccaaattatgctttgggtttaatccatcagcttccaccgcaaattaaagaaattgttaaaaaaagaacattattatgattaatgtttattgtttggagtccagaagagttgagttttcattccacctctgccatctattagccataagactttaaggctaatatacagaatttaaaaggaacaaaaacaacaacaacaacaaataatcccattcacaaatgggcaaaggacatttttcaaaacaaaacaagttaaatggacaagaatatgaaaaaatgttcaatatcactagttatcagagaaatgcaaattaaaaccacaatgagacatcatcttatactaatcagaatgactattataaaaatgacaaaaaataacagatgtcagtgaggatgtggagaaaagggaactcatacactgttggtggaaatgtaaattagtacaacctctatggaaaacagtatggagatttctcaaagaactaaaaatagaactttcactcta

SEQ ID NO: 613 - DNA, 5025 bp, Homo sapiens
ggctcggctttgccgcgctcgctgcacttgggcgagagctggaacgtggaccagagctcggatcccatcgcagctaccgcgatgagaggcgctcgcggcgcctgggattttctctgcgttctgctcctactgcttcgcgtccagacaggctcttctcaaccatctgtgagtccaggggaaccgtctccaccatccatccatccaggaaaatcagacttaatagtccgcgtgggcgacgagattaggctgttatgcactgatccgggctttgtcaaatggacttttgagatcctggatgaaacgaatgagaataagcagaatgaatggatcacggaaaaggcagaagccaccaacaccggcaaatacacgtgcaccaacaaacacggcttaagcaattccatttatgtgtttgttagagatcctgccaagcttttccttgttgaccgctccttgtatgggaaagaagacaacgacacgctggtccgctgtcctctcacagacccagaagtgaccaattattccctcaaggggtgccaggggaagcctcttcccaaggacttgaggtttattcctgaccccaaggcgggcatcatgatcaaaagtgtgaaacgcgcctaccatcggctctgtctgcattgttctgtggaccaggagggcaagtcagtgctgtcggaaaaattcatcctgaaagtgaggccagccttcaaagctgtgcctgttgtgtctgtgtccaaagcaagctatcttcttagggaaggggaagaattcacagtgacgtgcacaataaaagatgtgtctagttctgtgtactcaacgtggaaaagagaaaacagtcagactaaactacaggagaaatataatagctggcatcacggtgacttcaattatgaacgtcaggcaacgttgactatcagttcagcgagagttaatgattctggagtgttcatgtgttatgccaataatacttttggatcagcaaatgtcacaacaaccttggaagtagtagataaaggattcattaatatcttccccatgataaacactacagtatttgtaaacgatggagaaaatgtagatttgattgttgaatatgaagcattccccaaacctgaacaccagcagtggatctatatgaacagaaccttcactgataaatgggaagattatcccaagtctgagaatgaaagtaatatcagatacgtaagtgaacttcatctaacgagattaaaaggcaccgaaggaggcacttacacattcctagtgtccaattctgacgtcaatgctgccatagcatttaatgtttatgtgaatacaaaaccagaaatcctgacttacgacaggctcgtgaatggcatgctccaatgtgtggcagcaggattcccagagcccacaatagattggtatttttgtccaggaactgagcagagatgctctgcttctgtactgccagtggatgtgcagacactaaactcatctgggccaccgtttggaaagctagtggttcagagttctatagattctagtgcattcaagcacaatggcacggttgaatgtaaggcttacaacgatgtgggcaagacttctgcctattttaactttgcatttaaaggtaacaacaaagagcaaatccatccccacaccctgttcactcctttgctgattggtttcgtaatcgtagctggcatgatgtgcattattgtgatgattctgacctacaaatatttacagaaacccatgtatgaagtacagtggaaggttgttgaggagataaatggaaacaattatgtttacatagacccaacacaacttccttatgatcacaaatgggagtttcccagaaacaggctgagttttgggaaaaccctgggtgctggagctttcgggaaggttgttgaggcaactgcttatggcttaattaagtcagatgcggccatgactgtcgctgtaaagatgctcaagccgagtgcccatttgacagaacgggaagccctcatgtctgaactcaaagtcctgagttaccttggtaatcacatgaatattgtgaatctacttggagcctgcaccattggagggcccaccctggtcattacagaatattgttgctatggtgatcttttgaattttttgagaagaaaacgtgattcatttatttgttcaaagcaggaagatcatgcagaagctgcactttataagaatcttctgcattcaaaggagtcttcctgcagcgatagtactaatgagtacatggacatgaaacctggagtttcttatgttgtcccaaccaaggccgacaaaaggagatctgtgagaataggctcatacatagaaagagatgtgactcccgccatcatggaggatgacgagttggccctagacttagaagacttgctgagcttttcttaccaggtggcaaagggcatggctttcctcgcctccaagaattgtattcacagagacttggcagccagaaatatcctccttactcatggtcggatcacaaagatttgtgattttggtctagccagagacatcaagaatgattctaattatgtggttaaaggaaacgctcgactacctgtgaagtggatggcacctgaaagcattttcaactgtgtatacacgtttgaaagtgacgtctggtcctatgggatttttctttgggagctgttctctttaggaagcagcccctatcctggaatgccggtcgattctaagttctacaagatgatcaaggaaggcttccggatgctcagccctgaacacgcacctgctgaaatgtatgacataatgaagacttgctgggatgcagatcccctaaaaagaccaacattcaagcaaattgttcagctaattgagaagcagatttcagagagcaccaatcatatttactccaacttagcaaactgcagccccaaccgacagaagcccgtggtagaccattctgtgcggatcaattctgtcggcagcaccgcttcctcctcccagcctctgcttgtgcacgacgatgtctgagcagaatcagtgtttgggtcacccctccaggaatgatctcttcttttggcttccatgatggttattttcttttctttcaacttgcatccaactccaggatagtgggcaccccactgcaatcctgtctttctgagcacactttagtggccgatgatttttgtcatcagccaccatcctattgcaaaggttccaactgtatatattcccaatagcaacgtagcttctaccatgaacagaaaacattctgatttggaaaaagagagggaggtatggactgggggccagagtcctttccaaggcttctccaattctgcccaaaaatatggttgatagtttacctgaataaatggtagtaatcacagttggccttcagaaccatccatagtagtatgatgatacaagattagaagctgaaaacctaagtcctttatgtggaaaacagaacatcattagaacaaaggacagagtatgaacacctgggcttaagaaatctagtatttcatgctgggaatgagacataggccatgaaaaaaatgatccccaagtgtgaacaaaagatgctcttctgtggaccactgcatgagcttttatactaccgacctggtttttaaatagagtttgctattagagcattgaattggagagaaggcctccctagccagcacttgtatatacgcatctataaattgtccgtgttcatacatttgaggggaaaacaccataaggtttcgtttctgtatacaaccctggcattatgtccactgtgtatagaagtagattaagagccatataagtttgaaggaaacagttaataccattttttaaggaaacaatataaccacaaagcacagtttgaacaaaatctcctcttttagctgatgaacttattctgtagattctgtggaacaagcctatcagcttcagaatggcattgtactcaatggatttgatgctgtttgacaaagttactgattcactgcatggctcccacaggagtgggaaaacactgccatcttagtttggattcttatgtagcaggaaataaagtataggtttagcctccttcgcaggcatgtcctggacaccgggccagtatctatatatgtgtatgtacgtttgtatgtgtgtagacaaatatttggaggggtatttttgccctgagtccaagagggtcctttagtacctgaaaagtaacttggctttcattattagtactgctcttgtttcttttcacatagctgtctagagtagcttaccagaagcttccatagtggtgcagaggaagtggaaggcatcagtccctatgtatttgcagttcacctgcacttaaggcactctgttatttagactcatcttactgtacctgttccttagaccttccataatgctactgtctcactgaaacatttaaattttaccctttagactgtagcctggatattattcttgtagtttacctctttaaaaacaaaacaaaacaaaacaaaaaactccccttcctcactgcccaatataaaaggcaaatgtgtacatggcagagtttgtgtgttgtcttgaaagattcaggtatgttgcctttatggtttcccccttctacatttcttagactacatttagagaactgtggccgttatctggaagtaaccatttgcactggagttctatgctctcgcacctttccaaagttaacagattttggggttgtgttgtcacccaagagattgttgtttgccatactttgtctgaaaaattcctttgtgtttctattgacttcaatgatagtaagaaaagtggttgttagttatagatgtctaggtacttcaggggcacttcattgagagttttcaataatgtcttttgaatattcccaagcccatgagtccttgaaaatattttttatatatacagtaactttatgtgtaaatacataagcggcgtaagtttaaaggatgttggtgttccacgtgttttattcctgtatgttgtccaattgttgacagttctgaagaattc

SEQ ID NO: 614 - protein, 974 aa, Homo sapiens
MRGRAWDFLCVLLLLLRVQTGSSQPSVSPGEPSPPSIHPGKSDLIVRVGDEIRLLCTDPGFVKWTFEILDETNENKQNEWITEKAEATNTGKYTCTNKHGLSNSIYVFVRDPAKLFLVDRSLYGKEDNDTLVRCPLTDPEVTNYSLKGCQGKPLPKDLRFIPDPKAGIMIKSVKRAYHRLCLHCSVDQEGKSVLSEKFILKVRPAFKAVPVVSVSKASYLLREGEEFTVTCTIKDVSSSVYSTWKRENSQTKLQEKYNSWHHGDFNYERQATLTISSARVNDSGVFMCYANNTFGSANVTTTLEVVDKGFINIFPMINTTVFVNDGENVDLIVEYEAFPKPEHQQWIYMNRTFTDKWEDYPKSENESNIRYVSELHLTRLKGTEGGTYTFLVSNSDVNAAIAFNVYVNTKPEILTYDRLVNGMLQCVAAGFPEPTIDWYFCPGTEQRCSASVLPVDVQTLNSSGPPFGKLVVQSSIDSSAFKHNGTVECKAYNDVGKTSAYFNFAFKGNNKEQIHPHTLFTPLLIGFVIVAGMMCIIVMILTYKYLQKPMYEVQWKVVEEINGNNYVYIDPTQLPYDHKWEFPRNRLSFGKTLGAGAFGKVVEATAYGLIKSDAAMTVAVKMLKPSAHLTEREALMSELKVLSYLGNHMNIVNLLGACTIGGPTLVITEYCCYGDLLNFLRRKRDSFICSKQEDHAEAALYKNLLHSKESSCSDSTNEYMDMKPGVSYVVPTKADKRRSVRIGSYIERDVTPAIMEDDELALDLEDLLSFSYQVAKGMAFLASKNCIHRDLAARNILLTHGRITKICDFGLARDIKNDSNYVVKGNARLPVKWMAPESIFNCVYTFESDVWSYGIFLWELFSLGSSPYPGMPVDSKFYKMIKEGFRMLSPEHAPAEMYDIMKTCWDADPLKRPTFKQIVQLIEKQISESTNHIYSNLANCSPNRQKPVVDHSVRINSVGSTASSSQPLLVHDDV

SEQ ID NO: 615 - DNA, 5027 bp, Homo sapiens
ggctcggctttgccgcgctcgctgcacttgggcgagagctggaacgtggaccagagctcggatcccatcgcagctaccgcgatgagaggcgctcgcggcgcctgggattttctctgcgttctgctcctactgcttcgcgtccagacaggctcttctcaaccatctgtgagtccaggggaaccgtctccaccatccatccatccaggaaaatcagacttaatagtccgcgtgggcgacgagattaggctgttatgcactgatccgggctttgtcaaatggacttttgagatcctggatgaaacgaatgagaataagcagaatgaatggatcacggaaaaggcagaagccaccaacaccggcaaatacacgtgcaccaacaaacacggcttaagcaattccatttatgtgtttgttagagatcctgccaagcttttccttgttgaccgctccttgtatgggaaagaagacaacgacacgctggtccgctgtcctctcacagacccagaagtgaccaattattccctcaaggggtgccaggggaagcctcttcccaaggacttgaggtttattcctgaccccaaggcgggcatcatgatcaaaagtgtgaaacgcgcctaccatcggctctgtctgcattgttctgtggaccaggagggcaagtcagtgctgtcggaaaaattcatcctgaaagtgaggccagccttcaaagctgtgcctgttgtgtctgtgtccaaagcaagctatcttcttagggaaggggaagaattcacagtgacgtgcacaataaaagatgtgtctagttctgtgtactcaacgtggaaaagagaaaacagtcagactaaactacaggagaaatataatagctggcatcacggtgacttcaattatgaacgtcaggcaacgttgactatcagttcagcgagagttaatgattctggagtgttcatgtgttatgccaataatacttttggatcagcaaatgtcacaacaaccttggaagtagtagataaaggattcattaatatcttccccatgataaacactacagtatttgtaaacgatggagaaaatgtagatttgattgttgaatatgaagcattccccaaacctgaacaccagcagtggatctatatgaacagaaccttcactgataaatgggaagattatcccaagtctgagaatgaaagtaatatcagatacgtaagtgaacttcatctaacgagattaaaaggcaccgaaggaggcacttacacattcctagtgtccaattctgacgtcaatgctgccatagcatttaatgtttatgtgaatacaaaaccagaaatcctgacttacgacaggctcgtgaatggcatgctccaatgtgtggcagcaggattcccagagcccacaatagattggtatttttgtccaggaactgagcagagatgctctgcttctgtactgccagtggatgtgcagacactaaactcatctgggccaccgtttggaaagctagtggttcagagttctatagattctagtgcattcaagcacaatggcacggttgaatgtaaggcttacaacgatgtgggcaagacttctgcctattttaactttgcatttaaaggtaacaacaaagagcaaatccatccccacaccctgttcactcctttgctgattggtttcgtaatcgtagctggcatgatgtgcattattgtgatgattctgacctacaaatatttacagaaacccatgtatgaagtacagtggaaggttgttgaggagataaatggaaacaattatgtttacatagacccaacacaacttccttatgatcacaaatgggagtttcccagaaacaggctgagttttgggaaaaccctgggtgctggagctttcgggaaggttgttgaggcaactgcttatggcttaattaagtcagatgcggccatgactgtcgctgtaaagatgctcaagccgagtgcccatttgacagaacgggaagccctcatgtctgaactcaaagtcctgagttaccttggtaatcacatgaatattgtgaatctacttggagcctgcaccattggagggcccaccctggtcattacagaatattgttgctatggtgatcttttgaattttttgagaagaaaacgtgattcatttatttgttcaaagcaggaagatcatgcagaagctgcactttataagaatcttctgcattcaaaggagtcttcctgcagcgatagtactaatgagtacatggacatgaaacctggagtttcttatgttgtcccaaccaaggccgacaaaaggagatctgtgagaataggctcatacatagaaagagatgtgactcccgccatcatggaggatgacgagttggccctagacttagaagacttgctgagcttttcttaccaggtggcaaagggcatggctttcctcgcctccaagaattgtattcacagagacttggcagccagaaatatcctccttactcatggtcggatcacaaagatttgtgattttggtctagccagagacatcaagaatgattctaattatgtggttaaaggaaacgctcgactacctgtgaagtggatggcacctgaaagcattttcaactgtgtatacacgtttgaaagtgacgtctggtcctatgggatttttctttgggagctgttctctttaggaagcagcccctatcctggaatgccggtcgattctaagttctacaagatgatcaaggaaggcttccggatgctcagccctgaacacgcacctgctgaaatgtatgacataatgaagacttgctgggatgcagatcccctaaaaagaccaacattcaagcaaattgttcagctaattgagaagcagatttcagagagcaccaatcatatttactccaacttagcaaactgcagccccaaccgacagaagcccgtggtagaccattctgtgcggatcaattctgtcggcagcaccgcttcctcctcccagcctctgcttgtgcacgacgatgtctgagcagaatcagtgtttgggtcacccctccaggaatgatctcttcttttggcttccatgatggttattttcttttctttcaacttgcatccaactccaggatagtgggcaccccactgcaatcctgtctttctgagcacactttagtggccgatgatttttgtcatcagccaccatcctattgcaaaggttccaactgtatatattcccaatagcaacgtagcttctaccatgaacagaaaacattctgatttggaaaaagagagggaggtatggactgggggccagagtcctttccaaggcttctccaattctgcccaaaaatatggttgatagtttacctgaataaatggtagtaatcacagttggccttcagaaccatccatagtagtatgatgatacaagattagaagctgaaaacctaagtcctttatgtggaaaacagaacatcattagaacaaaggacagagtatgaacacctgggcttaagaaatctagtatttcatgctgggaatgagacataggccatgaaaaaaatgatccccaagtgtgaacaaaagatgctcttctgtggaccactgcatgagcttttatactaccgacctggtttttaaatagagtttgctattagagcattgaattggagagaaggcctccctagccagcacttgtatatacgcatctataaattgtccgtgttcatacatttgaggggaaaacaccataaggtttcgtttctgtatacaaccctggcattatgtccactgtgtatagaagtagattaagagccatataagtttgaaggaaacagttaataccattttttaaggaaacaatataaccacaaagcacagtttgaacaaaatctcctcttttagctgatgaacttattctgtagattctgtggaacaagcctatcagcttcagaatggcattgtactcaatggatttgatgctgtttgacaaagttactgattcactgcatggctcccacaggagtgggaaaacactgccatcttagtttggattcttatgtagcaggaaataaagtataggtttagcctccttcgcaggcatgtcctggacaccgggccagtatctatatatgtgtatgtacgtttgtatgtgtgtagacaaatatttggaggggtatttttgccctgagtccaagagggtcctttagtacctgaaaagtaacttggctttcattattagtactgctcttgtttcttttcacatagctgtctagagtagcttaccagaagcttccatagtggtgcagaggaagtggaaggcatcagtccctatgtatttgcagttcacctgcacttaaggcactctgttatttagactcatcttactgtacctgttccttagaccttccataatgctactgtctcactgaaacatttaaattttaccctttagactgtagcctggatattattcttgtagtttacctctttaaaaacaaaacaaaacaaaacaaaaaactccccttcctcactgcccaatataaaaggcaaatgtgtacatggcagagtttgtgtgttgtcttgaaagattcaggtatgttgcctttatggtttcccccttctacatttcttagactacatttagagaactgtggccgttatctggaagtaaccatttgcactggagttctatgctctcgcacctttccaaagttaacagattttggggttgtgttgtcacccaagagattgttgtttgccatactttgtctgaaaaattcctttgtgtttctattgacttcaatgatagtaagaaaagtggttgttagttatagatgtctaggtacttcaggggcacttcattgagagttttgtcttgaatgtcttttgaatattcccaagcccatgagtccttgaaaatattttttatatatacagtaactttatgtgtaaatacataagcggcgtaagtttaaaggatgttggtgttccacgtgttttattcctgtatgttgtccaattgttgacagttctgaagaattc

SEQ ID NO: 616 - protein, 974 aa, Homo sapiens; identical to SEQ ID NO: 614

SEQ ID NO: 617 - DNA, 29653 bp, Mus musculus
  misc_feature (1)...(29653): n = A, C, G or T/U
gaacacatgtacaaagccagatgtggttaaaaagccagatgtggtagcacacatctgtaaccccagcactcctgtgttgagaagggaaacagacagggactcacctgggagcacccaggccagcaaccctggagcacacagaacatccttagaaaagtgagctcttgggccaggtggtggtggcacacgcctttaatcccagcacttgggaggcagaagcaggcagatttctgagtttgaggcccgcctggtctataaagtgagttctaggacagccagggctatacagagaaaccctgtcttgggaaaagaaaaaaaaaaaaaaagaaagaaagaaaagaaaagaaaagtgagctcttgcatcgacagtttgtttgctgtttgtttttgagacagagtctcactccgtaggctggccttgaactcacagagacctgcctgcctctgcctcccagtgctgggaatgaagatgtgtaccacttgtcccaggcttgcctttgttttttgttttggttttgttttaagatttattttgtttatatgattacactgtagctgtcttctgacacaccagaagaggtcatcagatcccattacagccaccatcatatggttgctgggaattgaactcaggacctttggaagagcagtcagtgcctttaactgagctgtctctcctgcttccctaaatgacagttcaaacagctgtaagccatcaagtacttgctgggatttgaaccaggatactttgaaacagcagtcggtgctcttaactgctgagccacctctcctgcacgctggtttgggtttttttgtttgtcttttaaggtgctccaaagggcagccatccctgcctctcagcccctgctgaactggagaccaagcctcggttaccagcccttctagtcacacaaacactgtactgtctaggttacaggtatgccacagattcaggccatcagactatgacacattcagaaactacgtgtggcatgtgtttcttttctttttctttttttttttttttttttttttttttttgggttttcgagacagggtttctctgtataaccctggctggcctggaactcactttaaagaccaggctggcttcgaactcagaaatccacctgcctctgcctcccaagtgctgggattaaaggcgtgcgccaccacgcacgnnnnnnnnnnnnnnnnnnnnnnnnnnnnnnnnnnnnnnnnnnnnnnnnnnnnnnnnnnnnnnnnnnnnnnnnnnnnnnnnnnnnnnnnnnnnnnnnnnnnnnnnnnnnnnnnnnnnnnnnnnnnnnnnnnnnnnnnnnnnnnnnnnnnnnnnngtatcccaagagttccttgttctgtgtaactttaaatgctgagatttgggcttagtgagaaaccctgtctcaaaataaaagtggacagttgaaatgtggcttagcagttataagcaggcatagctccttccagaggacccaaattacattcccagcatccacatcaggccgctcctccagggaggttcgagccctctggccttcactgacaaccacatttacaggcacatacccacacagacatgtaattcataattttaaatataaaaatagcattcaggagtcaaagacaggcaggcagagtttgaggccaacttggttcacagaaggaatcctgggccagcctgagctacatagtgagacattgtcccaaataaataaccaaaaataatttttaaaaatgtaagtagagctgggcgtagtggcgcacacctttaatcccagcactcgggaggtagaggcaggtggatttctgagtttgaagccagcctggtctataaagtgagttccaggacagccagggctatacagagaaaccctgtacaaaacaagcaaacaaacaaaaatgtaaatagagagcaatagagacctaaagtcaacctctagtctcatatgtatgtccaggtgagtgtacccaacacacgtgcttatgccccatacatgcatgccccccccacacacacacacacggaaggtgaccagtgtaagtttgaggttagcttggcttacatagtaagttcctggccagccagggctacatagtaaataaaaagggaggaagaaggtgttgtctgaactgaggctctgaggactcaggaaggtgcggagtttctcttgtgcgacgcgttggaataaatcgtaaagctggcagcaaggagtatagctgggtggtgcagtatttcccaaactggtttagaaacaggacccattccctgagactctgtagagtcaggtttgaggaacgtgttttgagaaacactggcgggagataaagcaagctggacagagactgaactttgaaataggggcagtgcccaggactcaggatctcgggcaacagcctgaatagatcgggcccggaccctctgatgcatccccgcatgacgcacgcctcgtccgtaggtgcgtggtgctgaagctggccagcttgggcatgttctccttctccctgggtcagacggtgctgtgcataggcagaaacaagaccagctgcgagtcctacggctacaacgcttgcgactaccaggtggcctacagccccatccttccccacaaagccccacctcagactccttggtgctccctggatctcactgagtagctggacacggagctgctataccacagcatgcaccaagggggcgcccttcaccctgctatagttctcctggcgtgggagtcctcggctctagtctatccccaggtcgtgtctggctgcaaacggcccaccctagccgctaacccactcccaccgacacccccaccccaccctatccccccacccccggcaagcaatgggtgaggggagagaatctggaggagcttgaggatagtgatgggttccacccctttccccctctgcaccgcagtgctgggagaactcggtgggcgaagaattatataagttaatcatcttcaacttcctgctcaccgtggccttcgccttcctggtcagcctgcctcgaaggtgagctatatgggcacgccccagggaacggctggaagccacagccaagccaatagggatgacccgtgtgggtgtggctcgcatacttgcctggactgtacccaggtcacccccacccccaccccaggctgttagtggagcgcttctcgggctggttctggacttggctagaccgggaggagttcctggtgcctaagaatgtgctggacatcgtggctgcacagactgtcacctggatgggcctcttctactgccccctgctgccactactcaacagtgtcttcctctttctcaccttctacatcaagaaggtgagggggttggttcaggcggtcccctgggcaccctgaggctgcatcctgtttctgcgcctcccttctctgggcctcatactcactccgtggtctacaaacccccctggtcaatgctgttttcgctcacctccagtacaccctcctgaggaactccagggcgtccccgcggcgtttccgagcctccagctccaccttcttcttccacctggtgctgctcctaggcctgcttttggctgcagtacctctggcctacgtgatcagcaggtgacgaaaggctggtggctgggaggctggcccagtaactcctaccccagattctgacaagcctgtctgctcccatctctccagcacccactcctcctgggactgtggcctcttcacaaactattcggccccctggcaggtggtacccgagctggtagccctccagctcccacttcctagccagcgtgccctccgttacctcagctcccacgccttcagcttcccactcctcattctgctcaggtgactatacagcaggacagagggagaaactccaagggtttggctccttccccaggggtcgtgaacgcttgagcatctctagacagcgttctggagtgtaggagccagagaaatgggggctcaaagataggtaccaacacagccccgggtgaaccaacttgccttgctggggaactcggagtgtggggctgtgggaagaagtgggaggtgaaatatggtgtcttccgataaagcacagagacctgaggtgagacagttgagttagtgtgatactgcacacttgtaagtaatcctaacactcaggaggctgaggcaggaggattgctgtgaatttgaagccaccctacctacagagtgagctccaggccagcctgggctacatgacaaggccctgtctcaaagacggagactcggggaggggcaaggaagtcaggccggatgactgtgatctgagagttgactgacctggagtcctatctgccttaagcatcgtcctgacggtttgcatctcccagtcccgggcgaatgccagagccatccaggggctgaggaagcaactggtgtgggtgagtgtgcatcggcctgacccttgaggaatgtgtagctagctactctgaaggacggagctgacagggtggatttctttcttccttgtggtgggtgtacctccaggttaggaagggacccatggctcctgtgacaggcagcctactttagtggacacttggccttaggttatgggcgtggtctgggtaggagtaggaaggaggtgttggaggtggggccatgatgcttcctggtcataggttaggggcggggcctctagtggcctcctgctgcattgagaacagatcctggcagaggcgtggcctcaggttgcgttgtgggcgtgggttttgactacaacttctaacatctggtctctttcccctgcagcaggtccaggaaaagtggcacctggtggacgacctgtcgcggctgctgccagaactgagcccagagcccgggtcccctcactctcgagcttcgcgtccacgatccttctgtcctggatttccatgcccaggctcgcccggtcccaggacacccaggctggcaccctccaacaggctgagctcctcgagcctcggagcccccagtgcctcggttcctgcctccagatttcacttccccagccgcacagagctgtagcaccgaccccacgtcccttggctctgccgcagcttcctccagtgcctcctgcactctcagcccttccaccacctccttaggcccacaatctctgcccccccccccccgccgcccccgcccaaaccactgcatacagatggctcctggtcctctagcaaggttctccaaagcaagccacaccctcaggaagaacatgagaatttctacctctattttattttatctcattccttcaatttttttattgagtgttctatagtgtacataacagtatgaatataaactcatggatgcaatttataaatatatatatatatgtatatatttggaaatacttgaatttcttggacaagagttgctctcagaaacctttgtatatttctctccatgaggctgcaagagctggtctgaacctgcatttctgtgcccctacaaaggtgaagccatgctctgcaaggagcatggctggggcttgaaccaaatatatgggctccaaagccacacttaactagggtggggctcaaaagccactccagagcctgagaatggcttgctgacattcagtaatgtctgggtcccttggggaaagcagatcaaggtacatggctgctgggttttataaaaagaaagggaggccagagatatgtgtggtggaaatggggtatggtgtggtggaaggggatgcctttgtgggccaatgctgaggcatcctttccccttgagggactagccacacgatggtatagtatagaatagagtttattcagggtatggggaggggagctgagagggtagtagagacagagaaaggaagagacagagagaccagagagagagaagaagaagaggaggaggaagaagaaggaggaggaggaagagaagaaaaagaaggagaagagagaagagagtagtagaggctagccatgagtacgtggagagagaggaatggatggggagagaggtgggtcaggagcaagaggagagagcaagagcaagaaatcaagagagggggctagtgagatggctcagtgggtaagagcacccgactgctcttccgaaggtccagagttcaaatcccagcaaccacatggtggctcacaaccatccgtaatgagatctgactccctcttctggagtgtctgaagacagctacagtgtacttacatataataaataaatctttaaaaaaaaaaaaaaaagaaatcaagagagaggagggggcgagcagtcccttttttatagtgagtcaggcacgcctgactgttgccaggtaactgtggggcagagcctagattaaatgccaacacctctgcagaacactgttctctcagccttccctgggagccacactgagcctctgaggggtgaaaattcacaccctgccaggctctcagtgccaggtacaggcctgcactctgagacctgtggagggtgtgctgtgggaggggggatgttcatggggctgcaaaggcggggcagtggtgcagcctgcagctgggcctgggattccttctctccttccctccctccacacattctttgagtttgagaagctttgaagttggaaactgcagtggcggctttgaacccaccacatggaaggcactctctatagagttctgaagctaacagatccctgctgactttgaggtgactttgatctggttgtagccagcagcctgggaacagtttctgtttctctttttttggggggtgggggtggggggagtggtcgtggtggtggttttttgttttttgttttgttttttgtttgtttttgttttttgttgtgtgttggttttgagacagggtctctctacatagtcctggctgtcctggaactcactgtgtagaccaggtctgtctcaaactcacagagatcctcctgtctctgcctcccaagtgctggaattaaagtctggctcccagccccaagaggacattttaaagcacccaggtccaagcagctgggtgcagagctgctcgcagagggaacccggggagatgcagcccaggctggcctggagcccctgaccctcttgcctctgcttgcctaggcaacagagggtgacaatcatgggcccctccacccagctgagacatctacagagactgccttgatttctgtcacagactctggagtcttcttgggtgaccgctgaagacttggccacttcaagccctcctgagacttcgctggcttcagaggcctgaccaccacatgacttccccctcccatctgtaaccaaacaccagttaaatgcttctaaatgccagggtttccatggcaggtacaggtttacacttggagacatgtggcaatgtaccataggaggtaaccctggagagtggggttcccattccccaggccaccaagacagggttcctggggcaatgagacctggaggggcacaggtaggctctggtgctcagtagaagggggggtcacaaataaaaaaattagttcttggtgctggagagatcagcggttaaaaatactgagtgttcttccagaggtcctgagttcaattcccagcaaccacatggtagctcacaaacatctgtaatgggatgccctcttctggtgtgtttgaaaacagcaacactgtactcatatacattaaataaatacatacatactttttttaaaatcctcattaaaaaaaaaaaaaactaattcttggggctggagagatgactcagcggttaaaagcactgactgctcttctgaaggtcctgagttcaaatcccatcaaccacatggtggctcacaaccacccgtaatgagacctgatgccctcttctggtgtgtctgaagacagctacagtgtacttatgtataataataaataaatctttggactggagcaagcagggactgagtgagtgaagttgaccgaatcaagcagaggtcctaaaattcaattcttagcaaccacatgaaggctcacaaccatctgtacagctacagtgtactcacatacatgaatactaaataaataaataaatcttttaaaaaaccctaattcttaaagaatggtaattttgtggggaactaagtcaaaacattctccccttcactgatttcccactggagaaacttaacaaagcgtgcgtgggcctggtgcacactgctgagtgtcagagctggctcaagggccttactgtaaggcacacacagcgggtgtccaggtgaccacctgcctcctttgctggatcttcccgtggcttttcactctgccctctgactatggagctacagttcagacagcttcctgatagaactcggccactgtagatcctccaagagtggcaagaggggcccaggctagagtggccttcctagagaacagggctggacaggggctggagtgcagtggccagtcaggctctgtggagcatctacacatgacacaggctgtgacctggcagcaggagtcctctgctgtgaagacactgtcaaagcaggcgtctcctgtgcagtcactgagcctgcccagaaagccacaggctagtctgcaggcctagactggggggggggggggtcacccatgtgggtgggtagctatgggtggcctcccatggggtagtatgatccagtgccagcttacctgcttcttcggttctctgcccctcggtccctgtgggtctggccctggtgtagccttaggctcggaaagaacggctctgctcagaccaccccagtattggtcgcatggtccacttccctttgtccaggtaaggctggatctaggtccttaagggacaaccttgcctttctctgaactcctttaaagacaagagtaaggcactgcaatggctgagtgggagaggagggactttcagattcctgcaggcaggttagcagacacaggtggagggaaaggggattcaccaagcttgggagggagagagagccaccagccatgtgagatcttgggtggagtggccattggcctcttccctgactgggtttggggaaattagaaatgtaactaaactgagggcagatttagggtgctgagcaaggggaaggtaactgggcaactgagttgagggcagaattagaggtgttgatctgagtgaagataaggacatgttagcctcaggaggcttaaaagtatccaaccattgagctaaaaagcatattaaaaataaactactgtgtatctgtcaaaaaaaaaaaaagagtaaggcactgggctacacactctcaggtgacagagtctcatcccacctgaggtctaacttggagacagaatgcaccagctatagcagaaggcggaagcaccctgaaagccagagagagagagactgtgggagggtctgagcagaatatcgatagctagacaggatctagctggggacacctgggtcacagctgcatgcttgtggcaagtgccttggctaaaaagacgttactgatggtgaggactcggtgtgagaggatccagatggataactgtgacctccacccctacagggcagggtgggagaggaggagtttgagatgtgcgaggaggagggatccacagggagcagctgcattgttcacagggcccaggtcctcccagggggcaaaattcacctggtatgtggtgttcagatggatctcaatatgatgtgaacctcccctccctgcctcttaacaggaatctactgattctccaggtttcctggataaggagagcccttgtgttaacattagccccacgccagtgccccaggataatcacacatcccaaactcagtagacacacgcgcttatcccctcctcccctgcaggtaacagggggagaacacagatatccctggaaccagccctgtaaggtattggggcccctggagagccacaaccttcaagttatctcctagctgcaggcagccacccgaggagcatccaggggccttggggtggagaggccagacaggaagctttggacagcctgagccatacacagccccaacctcacagacgcatggcgctccttcagctgctcctctttgccatgctgggtgagtctcctgcagacatcacgggaagggccttgagagagtaggctcagggaatggagtgtgaagagagtccaagagagaaagagacccaaaggcggaagcaccctggaagccagagagagagagagagagagacacggtgagagggtctgagcaggagattgacagcagacagatgtgctatgctatgcagatgtgaccttgtttagggtatcatctgtcatttggattccactggtgtatgtagtatgtgtggtgtgtatgtgagtatggtgtagtgtgttctgtatgtgtatgtatgtgtgtatggtgtgatgtgtgtgtggtatagtgtgtttgggagggtgcccatgcgcacgtgtgcatgtccagcactcaggaagtagagacaggaagatcaggattccaaggtcaccctcaggtacgtattgagttcaaagccagcctggagtataggggagaccctgtgttaagtaagataagataaaaactccagatcagagatgctaactggtcccaggggcctcactgtcagatatcagcctgggcaggaagctgtctggacagtctccctcctctgcagggcttcctcttacccctcccctctcctcttttacagctgcctgtggcttctcagaggagcagacagaaggtgagtagcccccacactggggggagaaggatctagctggggacacctgggtcacagctgggtgcttgtggcaagtgccttggctaaaaagactgatggtgaggacttggtgtgagaggatccagatggataactgtgacctccaccccacagggcagggtgggagaggaggagtttgaggtgtgtaaagaggagggatccacagggagcagctgcattgttcacagggcccaggtcctcccagggggcaaaattcacctgttccatcaagtcccacagctctgcctaataggtgggatgcagagaaggctggggaactctagtgtgcacttctgggacaggaggggcttgctgagggagctggagacctcagggaatctagagattaagccactttgctctgacagcagttgagagtgagtgtcctctgtctgtctgtctgtctgtctgtctgtctgatctatttatctatctatacatatatacctatgtatgtataactatatcatgcacacatacacatatatatgcacagataaacagatagatccctcctgtgttccctctctcttttcggcttcctgtccctcctttcttctcctttctccttccctcccccttcccctctctctttttctccccagtagtcccggtacagagccaggaaggagaggtttcagggacaggtcgcagccctggaccgctccattcatgccctgctccattttcctctttgcctctcacctccttcccctagatggacccctttcatggtcctcgccacttctccacctcctgcacccttcaaggtggaggcaggcgtttcctccctgtctccaccttgcatccctgggcatccccttctgttctgctgaagggtggtgttgacgcagatctcactcggatgaggcacagaccaaactaccatttcctcattttctgtaaaaaagaaaaagtttattagtgtcacagttaaaaaaagagctggtggctgagtctcaggaaagtacccaggcagaggcggtcctgccttcctgtcctctcagcccatggctgcagctctgctaatgtatcctgtgccagatctctgaaaagctggctgatcccttgttccctcacaaaccctggaggatggcgtttggccaagtttagaaagaaaacccaagagccaggcgtggtggcgcacgcctttaatcccagcactcaggaggcagaagcaggcagatttctgagttcagttggaggccagcctggtctacagagtgagttccaggacagctagggatatacaaacaaaccctgtcccgaaaaacaaacacaaaaaaagagtacccatgggtgtggtggttcaaatctacagtctctgcactggggagacagagacaggaggatctctgtgagttcgaggtcagcctggtccacatagtgtgttccaggacagcctgggctacacagagaaaccctgtctcaaaaaacaaaaaccagggctgaagagatggctcagcggttaagaacactggcttctcttctagaggtcccgagttcaagtcccagcaactacatgatggctcacaaccatctgtaatgagatctgacccctcttctggggtttctaaggagaaagacagtgcacatacataaaataaatacatacttctttaaaacaaaacaaacaacaaaaacctcagcagctctccccacaccagctccgtgaggagacgtgaggagagagcccggccttgttctcccctctgggagcaagctgtactttctgttgctacagtcagcacatatgcaaaccaagcttctattcccggcctccgacatggaaacgagagggactgggtttcttttcatttttacagtcaactcagtgtctctcctgaaagaaagagacaaacaaacaaacaaacaaacaaacagaaccataatggggaaaacaaacaaacaaacaaacaaacataaccgaaatttagcctagaactcatttcttcagcgaggcagagttcagccccaaatatttcgtttggaccccaaagagacctgttgtccctaaagattaaggtggtaaaagtcttgccagaagtctgcctgacagagttcagaaaggatctaactttagcattggatccactaactcaaattggaaatctattttgatttaaaaaacaaaaacaaacaaacaaacaaaaaaacaaaaaaaccctcccaaagaggggtacttagcaaagttttcaaaaagccccggaagtatgttctgttggtgttgggaacaggcagctggacacaggccagtcatgtgctgctgtggggtgtggagtgggtccctagcctcagtactcagctggagtaccagcagacacagaattcccctgaaacagtggtaggaattaggatctgagaaaaagtgtgcattgtggtcagatggcctggggattcccaggagatgtctgtctgtaagagtctagcatgccttctctggggggcgggggtccttctaaacagggggtccagtagagcaagagcaatgtatatagtctgggaggtagattacctcctcctcttcctcctcctcctctccacccccccttcttcttcttttttggtttctctgtcctggaactcactctatagaccaggctggccttgaactcagaaatccgcctgcctctgcctcccaagtgctgggattaaaggtgtgcgccactatgcctggctcctcttcttcttctttgacacagggtttcattgtgtagtcttggctgtcctggaatataagaccaggttagcattaaacttatagagatctgcctggctctgtctcccaaaggctgagattaaaggtgtgtgtcacatgctgtgtgtgtgcatgtgtgtgtgtgtgtgtgtgtgtgtgtgtctgtctgtctgtctgtctgtctgtctgtctgtgaaccacatgcaggcggtacccacagaagccaggagagagcttggattccataggcagctgtgagccactgtgtgacaccctcttaactgcagggccttcttcccagccctgcctgcttctactgtgcttttaaaggtttattgttgttaattttacttatatgtatgtatgtgacatgtatgtactttgtgagtgactgccacttgtacaggcatgcctgagaaggccagaagaggagccagatcccctggaattggacttagaggcagttaggaactgcctgctgtggggcctggcagcccaacgctggtcctctgcaagagtggcaagcgtccttaaccactgagccatctctccagctcctccaaacaaaacaaaacaaaaagtatacttatatcccagtttccctcgcgtctcggcttctcagacctggagtcatgttaccctggtgctgtggcagctgctgggcacatttctttcttttgacctcactggaagtcacagtccttgcacagatcttgttccagtgttaggttctgaagatgtctccacctcttggtagccatgccagagttgccctgacaggcctgtaaggatctgtctgaggctgactttgattctgtccggatgtgtctagaactacaattgcgaatcttttaggctaggggtaatggataattcttttagctcctcctgcccccttttatggtgctggggacagatcctagagtctttggattgatagccttatatcctatcactgatatacaaacaaacagaaccataatagggaaaacaaacaaacaaacacaaccgtgatttagcctagaactcatttcttcagtgaggcagagttcagccccaaatatttcgttcagccccaaatagtccatccacaacccttaagcttatttctttcaacagctggtttgcttatgtgtatatgtatctgcatgagtttatgtgaaccaccctgcagctgtcctcagagggccaggagagcgtgtggacccctgagacctgaagttagttggttgtgagctgacctgagttgggaaccaaaccccaagtcccctggaagtgctcttggccactgagccttctatccagctccgattatttaactctctgaagaattgtcaacctggagggtttttgtatgtgtgtgtgggggggggggggttcaagacagggtttctctgtgtagccctggctgtcctggaatttactctgtagatcaggctggcctcaaactcagaaatctgcctgcctctgcttcccaagggttgggattaaaggcgtgtgccaccactgcccagcctaacctggagtttcttttaggcgtctgattggcttggtttctttctttctctgaccggttctcctcacaggcatcaccattgcctacaaagtactggaagtttatccccaaagccggagggtgcttataacctgcgatgcccctgaggcgtcccagcccatcacatactctctcctggctagccgaggtatcctggtggcaaaaaaggttgtgcatgactccgtgccggcctccttcaacatcaatatcaccatcaagtccagcccagacctgctcacctactcctgccaggcaacctcgaactctggcacctatggacccagcagcaggctccagatgtaccaggaactgtgggctagtaagtacagagggtgtgggctgctgaggctggggggatacagatcagtggagggcatagggaaagaggagattagaggagaccaaagaagaggccagcagagtggacaagggcagactgtttgcctccaaagctatactctatccatgatgaccaaggacacagtctccaggcaggagccagaaggcacagtcaggcctgccatggctggcaatcaagggactgttgttagttaccgcacccactcccacgggagacggtcagcttctccacagccactgtgcaaactgaagttctctgaggctgagggccttgcttagacaacctgcaagtggccacaactggtttcattcccaacactacccactccagacctttctttcttccctttccagcacagaggccacttccttgttaatagaaacaaggaagtattgttagcctctatgagcccagcatccctaacccttaaaagcaccacagtgcacagggttgggcagcacttaatcccagtgcttgggaggcagaggcaggtggatttctgagtttgaggccagcctggtctacagagtgggtactaggatagccagggctatacagggaaaccctgtcttgaaaaaaaaaacaaaactaaaaacagagagagacagagagcgaaagagacagagagagaggaggagagagagagagagagagagagagagagagagagagagagagagagagagagagagagagagagaagggtgagatctctttgtgagctggctgtggagttatagacaagtttctcaacatctgggcctcagttgttttgcctgtgaaacaaaaagataacagggccaccccagggggcttaagggcttgatagaggttgtgttctaacctaatgaggctgagaccaggcatggaacaggtagcctactggtcagtggggatgctgagaacatctgcctgagtaccccagctcctgattcttgtcctgaaggagcttcttggatagagagataaccctgccgtcctgctctgtatgtagctcacacctttaatccctgagccagaggctgtcagtccggggcagcatcctaccaccgagctccatcctcaacctagcttaaagatttattttccttttatgtgcatgagtgttttgcctgtatgccagtgccactgaggccagatgatgacctcagagcccccagaagtagagttacaggtcactgtgaggtgccatgtgggttctgggaaccaaattggggtcctcggagaacaaaatgtagctttgttgttttgttttgtttttgttaaaagatctatctacctacctatctacctacctacctacctacctacctacctatctatctatctatctatctatctatctatctatctatctatctatctatctatctacctacctatctatctattatatgtaagtacactgtagctgtcgtcaggcactccagaagagtgagtcagctctcattaccaatggttgtgagccaccacgtggttgctgggatttgaactcaggaccttcagaagagcagtcaacgctcttaaccgctgagccatctcaccagcccttgttttgttttttgaggcagggtttctctgtatagctctggtactcactattagaccaggctggctttgaacacagaaatctgccggcctcttcctcccaattaaaaggatgtgacaccactgcccgatctgtttatttatttagaattatgtggtatgaacaggtgtctttggaggccagactccaaagatgtcctagagctggagttaggtggttgtgagctacttaacatgggtcttgggaatctaagatggtcctctacaaaagcagtaagcactttttcagaggctgagccatctctctaggccccactccaccatttttcttgtttgtttgttatttttttgctccagactcttgagagcttggatttcaggcatgtgctgccatgtctggccagcacttgtcctctttaggaacttaaattgaaagcaggcgcctgagcaacctgactgctctctctatcttctcagatagactgcttggtgttagcttggtgatgtgggacttagctcttgtggctccattttttattttctagcatggctcccacaggatcttagtccaaaacaatttaaaataataacttaaccacaccaggtggtatggtggtggtgcacacctttaatctcagtgtgtgaaaggcagaggcaggcagacctctgtggtcaaggccagtctgatctacagagtgaattccaggacagtcagagctatggagcgagatcctgtttcaaaaacaacaacaacaacaacaacaacaacaacaatttctttaaagcacttttttttcccccctttggttttgtttttgttttttttgagacagggtttctctgtgtagccctggctgttctcgaactcactctgtagaccagagttctggaagaggaggaagaaaagttggagactggacagacagtcttggagagtgacctagagagcaattctaaagaaagtgaggaggacccagactggcaagtgctgcaggaggatcaggaagatgtaaactcgaaaaggagaggagaagcagaaagtgggactcggggaaataaagggactaagaaagtgcgttttgcagaagttgtagaaaagagcagaagctcttcggaagatgacatagaacagcaggagagtcactctgttgaaagtggtgaaaagtacatccctcctcggctgaggaacgaggaggtaatagatgtccacaagaaagaagagctagacaggctcaagaaacatgttaaaggcctaattaacaggttgagtgagccaaacatggcttctataagtgggcagctagaggagctgtacatggcccacagcaggaaggacatgaacgataccctgattctcctcaaggacacacttagcaacttttagatcgtttacttgtgtctggagactttcaattttatcacacaactccttcctttcattcatcattttttccacagatactaagagcagccagccagtaaaatcattttccgattttttccccatcttgtagaaagctttgtgcactgaatcacctaattcattaagaaaatcaagggcattagcttctttaagttcggaatatagtttcaaccatgggtcttcaaaattctctgagctcccaggagggagagaatctggagaggtttcactagttgaaagtgctggtggatcaacaagccaattccagtattttaaaagattcatcctcgtacttctgttactctagaaccactcctggtaccaacttctgtattagtcagggttctctagagtcacagaacatttggagcgagatcctgtttcaaaaacaacaacaacaacaacaacaacaacaacaatttctttaaagcacttttttttcccccctttggttttgtttttgttttttttgagacagggtttctctgtgtagccctggctgttctcgaactcactctgtagaccaggctggcctcgaactcagaaacccgcctgcctctgcctcccaagtgctgggattaaaggcgtgcgccaccactgcctggctctaaagtacatgttaaagataaaattgtatagtgtatactataagaagtctggaagcctagacattcggtgcagaggacactctggctggggagaaggtagcagtcacactgagtctctgggttccctgacgtaccaggaggagaatgtacaggggttatgaaaagcttctccccacaccagtgctactctcttccaccctatcagagccagtgtctcagctgcaggctgacttcgtcctacgccatggggactcgggccccactgtggagctgtcctgcctggcatcctcaggcagcccccccatcacctaccgcttggtggggaatggtgggcgtgttcttgcacagcaaaggccacttcatggaaaaccagccaacttctccctcccgctgtcccagaccactggttggttccagtgcgaagctgaaaacgatgtcggtgtggacagcagtgcccgcatcccgctgccccgaggtgagctggtccttcctggcctggagcagggagttgtgaggtggttggggctgaatctggccactgcgcagggcagggcaggcctaggggttgccgcacgccttctttgcccctttcatagcagaggcccgagccaagctggtgaccaccctcgcaggggagctgcccctgacacccacctgtattctggctggcagcctcgtctccatagccgttattgcttccaggatgctgagctcgaccgggtaagccatgggagcttagtgtgggcgagaggctgaccatctctgtgaccagccagtgtcctgagtgggaacagcaggttagtcttgtgagactgggtctgtataacaaggcccaacctgaagctgcttattaaagccaaaggcctatggtatctagcaagttccttacaccctcactgtggttcccagccgacacctggtgagggatttctctatgggtctcatggggcctctagagaccagagtgggccaggagttctacttaccacacagtcccacctgtcagcctttctgcagatgtgagaccttcctggttcccctctcccaagcctccacctctcacacgtacagtggccagggcatttgtgtgctttggctccaagcaccagacatctccatgcacacccagtaccggcctttgggttgtgaccacttctgtccttgaacatctcaacttggtacctgctggaccttatggttcatcctcccaagaccatcttttccagaagccagacacgtaggagagcatgtcacctgagactcattgtattcctctgtaaaatgggtacagaggcctaactcctactgacacatgaccagggaccaggaagtagcctcttggtgattcggtgcacttagtgggtgcacttagtgggtgcacttagtaggtgcacttagtggggtgagtgagctcactggcgtacccggcatcacatgaccgggtgaacctgtctgacctggactaactcccttgtcatcaggttgtgaccggaagacagagccatgggcttgcctccctgccctgtacaagaacccaccaatggagcaaaagagagcctgaggtgtgggggtagaaaaggggggttcagggctggagagatggctcagttacagcactgactgttcttccagaggtcccgagttcaattcccataatgtacttctacacataaaataaataattctttttttgttttgttttgtttttttgaggggtttctctgtatagccctggctgtcctggaactcactttgtagaccagactggcctcgaactcagaaatctgcctgcctctgcctcctgagtgctgggattaaaggtgtgcgccaccatgcccagcaaataattctttaaaaaaaacaaaacaaaaaaaaccttaaaaaagaaaggggatgcagctcagagtatcaaaagtagtgcaccccaaaagggccccagaaatctagagcattagtgtgaacgaggcccaaggggatagaactatcgtgtgtgggattcctatttcatgactggctgttagtgagcagcggttgctacaagagggcatcagagcgactgaggggggtgctcctgctctctgacgcactgaagcccagcttctttagtttctggtcacaaccccatgtggggttgtgtaactgaagaagggggtgctcatcaactattgggcaacagtagaaggtttctgtgtgtggtggctcatccctgtgatcccagaactcaggaggtggaggcaggaggatcaggaggagttcaaggtcaatcctggtccaggagtctggtcccgaagaatgggacaataacaaccaaaagagaaatgaaaaactgagctgctggccagggatgctggcacacacctctggttccagcatgtgggaggcagaagcgggaggatccctgtgagctagaggctagcctggtctacaaaatgtgtgccaggacagtcaggctgcatagtgagactctgtctcaaaataaaacgaaaatctgagaagggtcttgtgagatgggtgaaggtgtttgctgccaagtctgggatcctgagttcaatcccagggacccaccctgtgaagggagcaagcgctatgtcttacaaggtgtcctttttatgacatgtgtcatctcgtgtgctctacccacccaccccaggcacaaaccaattacatgtaatgatgtaatggcaaaaggttggttttggttttggttttttgagatagagtttctctgtgtaggaaagagagagagagagagagagagagagagagagaaagagagagagagagagagagagagagaaagggaggctttgtaggaaagtcctgacagccagttctccttcatcaaacactcatggcgtgtatgaacagattttaggaggtagccctgggctcacctaccagcggcttgtcacaggctctgttagtgtggggagggtgcaaatagacgcagatagactgttagaaggcccagtctctcttgtgcctactcctgtcttctcccgagtggtgacccttctggtggggcaggcttctgcctcagtttccttattgtccagcccccctcattactgaggtgagtctgtctcattattcattatccattgaagtgactgtggtaaagccatcttgtcatgactccattctgtgtcacttctcagccctctacacccctcaacagccatggtctccttgggaacaaatttgtgttgtcaacagaaggatatctggaggcctcttggcggccaaggtgaagccctgggttgacacacgaccccttccgattaagcatcaggttccctttctaaatgttattgggggacagggggagctggagtctatgacctagtgatctcatttgttttaatttttaaaattacaatcctcagtatgtgtgtacttgagactagatctcagatagctcagggttgtcttgaactccttattctcctgccctctttctcttcctgagacaacagccaccaggtactttgcagcatgtgatcacgatgtctagaaatctgcccttcagagccctttggctttcaggcttagctccagagcaaagagtagccagaactgtgggggccatagttattaattactacagtagtccagaggttggaactgggggcctctgatgtgctaggcaagagcttatgccccagtcctttggtctggagcagaatggtgaagtgacatccaggtatttacgagcctggattctggattggtgggatttgggtgtctggagggcttatgggagaggaccttcaccagggcactgtgtaagtaagagtaaagtgggagccgcctaggatgtctcttcttggggactctttgatcctttctggatgaactcagtaggacatatttcccaggggtgagcttttcctcccccttccgcaccctggcgcctcctgcgagctccaagttttgctgccaacttccacgagtttggaggggctacttcccggcggttggccccgccctgtcggcggccggacccgcccccgtgggcggggcggggcaatccggctagttcccggccatccgcggctcggtggcgaaagcgacatggagagcggggcctatggcgcggccaacgcgggcggctccttcgacctgcggcgcttcctgtctcagcctcaggtggtgacgcgcctcgtgagcatggtgagtccaccagcgaggacccggagccgggcgtcctggctaccagggcccgtggggccgcgggccgcaaagcgcgacaggtggcggcggctgcgcgtcctgggcctttcggagagcgcggggccccgtgcccctccgcgtctctgtcccctccagcccgtgggttttgtcgcctgttccactccggaccttgtctccccaactccgggccgggccccgccgcaccctggaccactggtccaggccgctctggtgcgggacgtccccgaagttctccggggaggcaggcctgtcgccttgttggcattgggagggaccggagaggggcacggcacagcaggtggccggcacgccgcggctcccagcctagggaattcacctggaagggactttctgcagccacgtggggtgcgaggagggggattggcctggcactctgaaggagagtttccttccctctcagaggctagcaacaggtctgctttcccaccaaatgcactcccttcccagaagcggggcgagcccccttgtaccaggcgtgcgggggcagctttccataccttgggatgaaaacactgaaaactgagactttagctgccagattgagggtggccccactgcgcccagggggtctgggcctggagccttggaggtgccctggctccccggaatctcccagcctagcggtggaatctagtgactccgtcctgggttgtaccctgtcagtcaggatggcagtgccaggagccctgacccatactccgcgcccagtcctggagttccggcttcatccacagctgggggcggggcttgtgactgccagttccacaatcctattgagagcgtccccgcaggatcgctctggtcctgcaagtctggaggcagccaggtgcccacagactcagttgcatctgccgccttgacgtgggcttggcggtggccttagggtgtggggaggaagcgaaatgactaggacgattccaaaggagctgctttccaaactttggccagtctctgctggtgactttcccacctctgtcctggctcctgcgggatctgagtctggctgtggatctgaccaccccaagaaccttgctctgaggggaaccgttgtgggggtggagactagtagttctctggaggggaggggccgacgtgccaaagaagccggaagtccttgtagggagaaggctggctgactggggagtctcttgctttagggggagtcttggagggaaatagggcagctgttgaagggtgttctggaagatattggttgatgctgtagagttgacttggggcagggtgttggggtgagggttagacgaaacactttgagtttcacctccgtgattttgtgtcccatcctatttaaaactcattcaaatgggaggtggttatcagcattgaggcagctgaggcaggattgtcatgaatttcaggccagcctgaacttgagtgagatcctgtcttttttatttctctttacttatttttattttgtatgtatgtttgcctgcatgtatgaaggtacaccaaccacgtgcatgcctggtattcagaaggtggttggttatcttgtcctctggaattggagtcacaggtggtgatgagctaacatgagggtctccaggtcctctgcaagagcagtcagtgctcttaactgatgagccatctctccaccctgagattctatcttaaaacagccaataaggacaggtgtggtggtacaggccttgaatcccagcattctattctggaggcagaggcaggttctctgaattccaggacagctagctaatggcatcctgtctcagagaaagaaaggaaaaccctgaaacttacagatgcacacacgacctcgcgggctggagacgtacgtaggtcagtggggtgagcttaccaacaagtgtgaagccctaggttccagttgccagcgagcaggatggggtagggttgggaggagtccaagcaggcatccaacatatcccagcattgggaggtggaggcaggaggcaggatcattttgaattacaactaaatgaaactccttcacccaaaacaaacagaaaaccaaaccaacaccccctccaaaagaaacccaaatcttattcaaaatggagatggacggattctttttttaaagactttatgtctgtgagtccactgttgctgtcttcagacaccagaagagggcatcagatctcattacagatggttgtgagccaccatgtgggtgctgggaattgaactcagaacctcaggaagagcagtcagtgctcttaaccgctgagccatctctccagcccaggtggattcttctttgttcttagtcacaaccctaagtaaggtcactctgtagtcaggcagctaggggggtcacctcgtctcgtaataaatagcccattctgtccccagccccttgtggtcaggaactgctttgatgataccctggccacagtctgcctgtcacctcagccccacaaagccagaaggggttgaaacagcagtctcagatggggacatcagcagaaagacaagagacatcctgatgtcctgctaggatccccctctctaggccctcagggggtctgtacaggcaatggccaacaggcgtctgccactgcccatggcatctcctctcccccaggtcttggccttgatcgtgttctcctgcatcttcggcgagggctacaccaacattcacacatctgatcaactatactgtgtgttcaaccagaatgaggatgcctgccgctacggcagcgccatcggggtgctggccttcctggcctcagccttcttccttgtggtcgatgccttcttctcccagataagcaatgccactgaccgaaagtacctggtcattggcgacctgctcttctcaggtatgcctgtggcactgctataccagggcttcggtactgttgggagggggtgctgacagcagctgagggccatgaaactcacctgaggcttctcctaggtcctcctgttccctgggatggcacacaggctttctgacttcagaaatcaggggtgttggggcataagaaacacagtatcaggtttcccgactcatcaaccccaccaagtagctgacccccttagccctcacatccctctgtgtctataggttacacagcctacggccctagggagagtcattctctgtccctcctggaccctggggatccaggctgtccctagggccaactctctcccttatttccctagctctctggaccttcctgtggtttgttggtttctgcttcctgaccaaccagtgggcagccaccaaacctcaagatgtccgggtgggtgcggactcagctcgggcagccatcaccttcagcttcttctccatcttttcctgggtaggtggacggggagggcagtttggaggtttgggtgtggactgaggtcccctgctgtgcccataccttgggtctcctccacctgcccacagggtgtgctggcttccctggcctaccagcgctacaaggctggagtggatgccttcattcagaactacgtggatcccaccccggatcccaacacagcctatgcctcctaccctagtgcctccgtggaaaactaccagcagccgcccttcacccagaatgtggagactactgagggctaccagcctccccctgtgtactgagcagccagggacaagaaggcagggaaggggtggttgggagagggccgcccctctaccctggacttctctcaagggttgctgctcacaatgtagtcccttgcctgttacagttgacagccaaagagtccacgcctttctgcctcccagctgcagacagacagagcacacctgaagtgcccatgcccagcggggcttcgccgccgcccacccaatcctcaagggcatttttgagaagatggttttgactagatctttttatcccccaccatagtactgtagataggacccagggcttggatttgcttaacgagcacagccatccagctgtgtgcccagctccttgttgcttttagtaaccccgatccccttctcagagagccagaagcaggtgcctgttagtgctaccatgtttttgacccatgctagtttctccactgctggagaccatgggagccccaactctttccccaaagccaagcttggggatcctcgtgcctgtctccccacgtcctcactcaggttcaggagccagctctctgctgtgtcttctggggtcaccactgtgccaactgtccccaggctgcctgactgcctgccaaccgtgggacaggcagagggacaagatgccacttccttctttctcccgctcctggcaggagggacgggatttgcctggagataacacccagctttatgtaaatactaccaagcagcggttagatactagtggggagggcaggaacccctgcactgaatgtattggagactggtggggatggccctgccctcagattctatagactagtttggagatggaataaatggtttttctcagtgtgttgtgctgggtggcgcctcaggctaggggtggagatacactttggaaggtattgctttgagacaaggcctcaaacttacagagccaaggatgacccaccctctgacttcccccaagtgcttggtttcaaaccctggacttcatgccaggcaactaagtcagcttccagcctttcaaaggtaacataacccaggcttcaacttgagacaaacctcctgcctcaccctggttctagttctacaccatgactcactttgtagaccaggctggcctcaaactcagaaatccacctgcctctgcctcccaagtgctgagatcaaaggtgtgcaccaccactgcccggcttacaccatgttttttgttgttttgttttagacagggtcttactgtgtagctcttggctgtcctggaactcagagacccacttggctctgccccttgagtgctgggtaaagcttagaccatcatgcccagctagatgttttttgaacttggggtggcagcttccccagtggggtctcattcttcatgctgccttccactgcatcctaaaatagctaccacgtcagcttgtaaaatggattgttctggatagcttgccagggttctgctgcctgccagggcccctgggtgctgcccctctgaggttgactctggcccctcttgacaccttccagggacctggcaggcagtggacccatctctcaggaagcagcataaccctgaggtaactcttgtgcaatgacaaggctgtcgatggtggccggcggtgtctttcaaaatctgaagcataagctaacagcccggctctgaactgtgggcctcctctgcagaacatgcattaagcagttaatgagttagatggcaggcaagctgggcacagcaccagcggcacactggcaccttagacccaggtctctagtcctcaagggtgtcaccccacccactttccaaggcctatctgagtatctgagctgttttctcaactcaagctatcaaatgtctgtctcataaaacctgaccaccccctaacccccatgccagctagaaacaccatctcctgactctctagcaggttctttgccattttttgtcacgaaaccaaccagatagaaatgtgggggactgttcttcttgggctgtggtgagaccattggtactacaaaacacatttctacccccaagtcatgtgggtgccggttgcaagttagggaaacccaggctaaggagaaacacgttctcattagtagtaaactttaatattgttcattttgcacaagaaaagtggctcactaagagctgaggttctgaggagagaatgtttaggcataaatgggggagctgtgagaggcctggagccttggtgagggtggggctctgagactgaaacccagccaccaacaaggaagaaactagccccaccagtgtcacaatgctggacagctctgtcctcacctttggctgaacacgggaccgctagccaccaggcagggtctgggctccagtctgcattgaggcatcttggcaatcaagaagggaactgaaaacggcttcagcgagtggcagcctgttcaaggtacattgtccattaggaatggcaggcccgcgctccccctgctctctgagagtccaacctgggtaggagctggcaggcctcaggtcccctcagttggcagagttgtattgtaggacttgctgagaggcaaagagcttcctgacaaccaaggcctctcccggctgccccagcaccagacagttcttgttgtctgagccagcagtctgggctgaagacttcttaaagtagcacaggcggcacacggagtgatacttgtcggctccgccaatcacctccacctggtgggagggagatgtgagggtgggactcagaagccagagcctaagcccaccccactccttgggcagaagtaagtgtgtgtgtgtgtgtgtgtgtgtgtgtgtgtgtgttgtgtgtgtgtgtgtgtgtgtgtgtgtgtgtgtgtgtgtgttgtgtgtgtgtgtgtgtgtgtgtgtgtgtgtgtgtg

SEQ ID NO: 618 - DNA, 1148 bp, Mus musculus
cctcacagacgcatggcgctccttcagctgctcctctttgccatgctggctgcctgtggcttctcagaggagcagacagaaggcatcaccattgcctacaaagtactggaagtttatccccaaagccggagggtgcttataacctgcgatgcccctgaggcgtcccagcccatcacatactctctcctggctagccgaggtatcctggtggcaaaaaaggttgtgcatgactccgtgccggcctccttcaacatcaatatcaccatcaagtccagcccagacctgctcacctactcctgccaggcaacctcgaactctggcacctatggacccagcagcaggctccagatgtaccaggaactgtgggctattctggaagaggaggaagaaaagttggagactggacagacagtcttggagagtgacctagagagcaattctaaagaaagtgaggaggacccagactggcaagtgctgcaggaggatcaggaagatgtaaactcgaaaaggagaggagaagcagaaagtgggactcggggaaataaagggactaagaaagtgcgttttgcagaagttgtagaaaagagcagaagctcttcggaagatgacatagaacagcaggagagtcactctgttgaaagtggtgaaaagtacatccctcctcggctgaggaacgaggaggtaatagatgtccacaagaaagaagagctagacaggctcaagaaacatgttaaaggcctaattaacaggttgaagccagtgtctcagctgcaggctgacttcgtcctacgccatggggactcgggccccactgtggagctgtcctgcctggcatcctcaggcagcccccccatcacctaccgcttggtggggaatggtgggcgtgttcttgcacagcaaaggccacttcatggaaaaccagccaacttctccctcccgctgtcccagaccactggttggttccagtgcgaagctgaaaacgatgtcggtgtggacagcagtgcccgcatcccgctgccccgagcagaggcccgagccaagctggtgaccaccctcgcaggggagctgcccctgacacccacctgtattctggctggcagcctcgtctccatagccgttattgcttccaggatgctgagctcgaccgg

SEQ ID NO: 619 - protein, 379 aa, Mus musculus
  VARIANT (1)...(379): Xaa = Any Amino Acid
PHRRMALLQLLLFAMLAACGFSEEQTEGITIAYKVLEVYPQSRRVLITCDAPEASQPITYSLLASRGILVAKKVVHDSVPASFNINITIKSSPDLLTYSCQATSNSGTYGPSSRLQMYQELWAIEEEEKLETGQTVLESDLESNSKESEEDPDWQVLQEDQEDVNSKRRGEAESGTRGNKGTKKVRFAEVVEKSRSSSEDDIEQQESHSVESGEKYIPPRLRNEEVIDVHKKEELDRLKKHVKGLINRLKPVSQLQADFVLRHGDSGPTVELSCLASSGSPPIYLVGNGGRVLAQQRPLHGKPANFSLPLSQTTGWFQCEAENDVGVDSSARIPLPRAEARAKLVTTLAGELPLTPTCILAGSLVSIAVIASRMLSSTX

SEQ ID NO: 620 - DNA, 39844 bp, Homo sapiens
  misc_feature (1)...(39844): n = A, C, G or T/U
taactgggcatgatgaaagactaggacacacagtcctagctactagagaagctgaggtgggaggatcacttaagcccaggaggtcaaggctacagggagctgtgatcgcgtcactgcactccagcctaggcaatggagtgagaccctatctcaaaaaaaaaaagcaaaaacagataacatgcatgtgatgatgtttcgtttagacaatcacctatttggtctggtcatgcattgtgcagtacatatgtgtggcacgtgtttatgacatgcaagcttgtgtcagtgggcttcaatgtccataggcggcggaggaaaggaggagctcgcctgcagtcaggatcctgaaaaggccacaggcttctccaccgcagggcttgctgcatgtgcctctccacaccaggcatgagggaacatggctggactgtgcagtgtttctcaaactgatctaaaaacagaacccttggccaggcgccgtggcccacacctgtaatcccagcactttgggaggccaaggcgggtggatcacctgaggtcaggagttcgagaccagcctggccaacatggcgaaaccctgtctgtactcaaaatacaaaatttagtcagaaatcgcttgaacccaggaggcagaggtggcagtgagccgaggtcacaacactgaactcctgcctgggtgacagagtgagactcggtcttgaaacaaaacgaaaacacagaaccctttttcccatgaatcgcctggagactcggactctgagaacgcactttggaccacattgccacagacagagcaggttggaaggaggctgggcccaggacacaacatgatcccactcggacatcagccacacctatagcctgggtagagcccggtgcccatgtgcctgggcccctccacctgacaaggtccctgcccccaggtgcgtggtgctgaagctggccagcttggggatgttctccgtctccctgggtcagaccatactgtgcattggcagagacaagagcagctgtgagtcctacggctacaacgtttgtgactatcaggtggctggcagcccggcggggcctgtccctcccttccttctccccaaaaagctcacctcaaactgtgcagagccctgttcctgcccctttagtcacctttgagagaagctgtgagcagggctgcctgcaccgccgcacacctccagggggcgccactgctgccacatggtgtagtgtggctgccctggctgtggggcttcctgctctaatcccatcctcaaggcctgggtttcaacctaacgattctatcagacaccaggcaaggcacctgcaccacagaaaccctcacaggaggctaagggaaggaagggccggggtggccgtgagtggtgacgggtccccttcccctgcaccccagtgctgggagaactccgtgggggaggagctgtacaagctgagtatcttcaacttcctcctcaccgtggccttcgccttcctggtcaccctgcctcggaggtgagccccggggtgacacctccagaagggcgggggtgccgcgagcatgttgggggtggccagtggctacagccaagggtgagcgggtccagtgtggagcccgggagtaagtggcaggctgtggccatgaccaatacagcccacgcatctgtctggagtggtgagtacctggaccctcccatccctgcaggctgctggtggaccggttctcaggccggttctgggcctggctggaacgggaggagttcctggtccccaagaatgtgctggacatcgtggcggggcagacggtcacctggatgggcctcttctactgccccctgctgcccctgctgaatagcgtcttcctcttcctcaccttctacatcaagaaggtgacggctcatggctggggggtatggggttcgtgcctctgggtggatgccttgagctgggctcgcctcctgctcctgctcctgcccccttccctgggtgtcagccccctggggtctgcataactcgctgactcctggttgctattgcttgcgcccccagtacaccctcctgaagaactccagggcatcttcgcggcccttccgtgcctccagctccaccttcttcttccagctagtgctcctcctgggcctgcttctggctgcagtgcccctgggctatgtggtcagcaggtgaggggaagaggaggggggcacccagaggctggcaggggcagtttctcacccaggaccctgatgccagccccacttggccatctctcgccagcatccactcctcctgggactgcggcctcttcaccaactactcagcaccctggcaagtggtcccggagctggtggcccttgggctcccgcccattggccagcgtgccctccactacctgggctcccacgccttcagcttccccctcctcatcatgctcaggttctcagggcagccggggccatgggaggggacacctggagggggaggtccttccttccatgggggtggtgagcctgtgcacccccaaccaggagccagacgcagaaagccaagggaagcaggggcctctgaaaagcaggaacctcctgggcccaccctctgggctgccatggggattgcaggatcactggggaagcaccgtgtctgggtggctgcagctgctgagctattggtattgctgtgccagaggggaggggatgaggggctctgcgaggaaggagaggagggtcccatcctcagatacagcagtgtgcagtgagaagaccccagtaccgcgtattgtagagattgaggtggggagagaggaagtcagggagaggcgcctgtggccccaggggcaactgaccacgaatccccttcccacccaagccttgtcctgacggtgtgcgtctcccagacccaggccaatgccagggccatccacaggctccggaagcagctggtgtgggtgagtgtcctcggggctggtgaggggacagcagcttcagtggaaacccttccctatgtgtggccgagggcctagaacacgtctgagcgggtcaggtgggttcttcccactggagggcgtggcctcaggctgagagtgaagacggggaaggggaggaagagaacagctcgggctcctgagaccaggagccagacctggtaagtacatgaccttaggggctgggcctttgcctgtaatcccaacgctttggaggcccaggcaggaggatcggatcacttgaagccatgagttaaaaccagcctgggcaacaaagcaagaccctggtctccaccaaaaataagtaattaattttttaaaaggagaatgtggccgggcgtggtgactcacgcctgtaatcccagcactttcagaggccgaggtgggtggatcacctgaggtcaggagttcaagaccagcctggccaaaatagcgaaaccccgtctctacttaaaaaaaaaaaaaaaaaaaaaaaaaccgggcacggtggttcgtgcctgtaatccagcactttgggaggccgaggtgagtggattgcctgaggtcaggggttcaagaccagcctggccaacatagtgaaaccccgtctgtactaaaaatacaaaaaattagctgggcgtgatggtgggcgcctgtaatcccagctactagggaggctgaggcaggagaatcgtttaaactcaggaggcggaggggcggaggttgcagtgagctgagaccgccccattgcactccagcctgggcaacaagagcaaaactccgtctcaaaaaaggaaaaaaggataacatggctgagtgcagtggctcacgccgaggcgtgaagagtgcttgagttcaggagtttgagaccaggctgagcaacatagcaagacctcgtctctactaaaaatcaaataaatgagctgggcgtggtggcgcgtgcctgtggtcacagctattccggaggctgaggtgggaagatcgcttgagcctgagaggtccaggctgcagtgggctgtggtcttgctactgcaatcctgcctgggcaacagggagacacccagtttccacaaaaaaaaaaaaaaattacgactttaggcttggggccaggggcttaatggagctgagggaggaacagtgacctggctaaggcgtggcctcagggtggggcctctaccgggggcgtggccttgggctgcttggggacggactcttagcgggcgtggtctagatctgcatggggtgggaccctagtggggcgtggtctcagggtgcgttgggggcggggcccttggaggtcgtggtctcgggcggggacgtggaaggagtggcatctggctgcgttgtggacgggactcctgagggcgtggtctagggctgcatcggggcgggaccctggtggggcgtggccctgggagggtgtggcctcgagcggggcgtggcctcgggcggggcgtggcctctggctactttgggtgcgggctggcccatgggccgcagagttgctgccgctgctgtcctcacacccgctcgtgggaagcagcgcctgtcgcaactcgccacttgttctcctcacagcaggttcaggagaagtggcacctggtggaggacctgtcgcgactgctgccggagccaggcccgagcgactctccgggccccaagtaccctgcctcccaagcttcgcgcccgcagtccttctgccccggatgcccatgccctggctccccgggccaccaggccccgcggccgggcccctccgtcgtggatgccgcgggactgcgttccccttgccctggacagcacggtgccccggcctccgcccgcagattccgcttccccagcggcgcggagctgtaaccccgacccctgcctccccgaagcctccctggggccccttcaggcctccttactccatcttccagacccctggcgaccaccgcccctctcagtggctccagggcctccctcagaggtccccaaagatggacacacaaccccaggggcagcaggaaaaacatatgggaattttctttctatattttaatctcatccctttaaaatgtctattttttattgtgttttttataatatacataatctattagtatagtatctcttgaatgcgattttttctagaatgtgttctgctgatttgttttagagccatgagtgcaatttatacacatacatctattgggaatgctcagaagttgtttactgatggaagtgccttcagaagagtccgggaaccacttcctaaggaaggaaagagctggccacagttagagcaagcctgcctggggccctgctctgtgttccagctgcaaactgcctgcatcatcccttcctgttactcttccttcacctgagacagtcgaggccacagcgtcagccagggccagagctgggatttgaacccaggcactcgggctccagagccacactgccccagtgtggggcttagtggcggctcctggccctgactgaggggctgactgaagcctggtgagagcgtgctgggtcagcctctccctggcgggaatcctctccgtccagtcttctaacctagcagcctcacgtccacagagctgccttgtgaaactcagcagagccctggcttcctgcagagccgtgttctcccagcctgcttcatggctccctggttgagccaagcttgcggatccgtggggtgaaggtacccgcaccgcctgggccttagtggtatgtacgggcctgcatcgtgagcagcgggcgggggcccaggcaggtgaggcagctggccacaagggcagggcccggcccccctcccaaggctgtgtctgatattcttgagcctgttcgagtttccttttccaagcctcctgttctcccacccccacccctgccatgctgcagtgactaaatctgtggttctcatccttggagaacacctgagtagctgctacaagctggccacagcccagcgactctgatgtggttgggctgggtgtggccagcagccagggcatcgggacttttcgaagctcccaggtgactcaccggcagctggggatgagaactgtcaggagggaaggtcagaagtcccaggatgcacttgaaaagcctctagctccaccagtgaccagctcctggctggactcctggtctggactcagcatcagggaggctctggcctctcgccctcagggctgggggcttcttcacatggtcatcaaagacttggccagttccgcctctcccacggccgtccttgtctcacccagcatcacgacgcatcagttcaccaacaaacacgattcagtgctgctagtgctgggtcctgttctgggggctggtgatgaggccaagagggaaagagggagctctgtgttccatcgagggggcgacaagcctggaccagatgaaagtgactcatgttgttaattagcggcttagggccaaaggtggcccctggaccagtggcctcagcatcacctgggaaaaggttagaaatgaacattcccaggccccacctcagcctcctgaatcagagcatccctttggcaaaccatactgagaaacaaccacgtgcatcaccaagcgctgtgaagaaggcaagctttgagaccttgaaggaatcatcaaactctgggcctcggtgtgctcacccagggcgagacaaagacgccatgctcctccaagtggcctccaagattaaatgagcaatgactttttgtgtgtgtgttttttttttttttggggggtggggacagagtctctttctgttgcccaggctggagtgcagtggcaagatcttggctcactgcaacctctgcctcacaggttcaagccatcctcctgcctcagcctcccgagtagctgggactacaggtgcccgacaccacacccggctaattttttgtatttttagtagagatggggtttcaccatgttggccaggctggtctctaactcctgacctcaggtgatccacctgcctcgtccccccaaggtgctgagattacatgtgtaatccaccaaactcggcccatacagtgacttttgaagtgtccccatggggacctagaagtgcagtggcggctcctattacaatgtggtcactggcctgaaggagccaaatgggagatgatggggagtggacctggggccccctgtgatcaggaccacccaggaagacagcccagggggcctcgagcgatgggcttcttcccacaggagggctcttggagccagtgacaggcaggaccttggagaaagggaggctttggacaggagctgagggcagagagggggcctgagcaaagatgtggtaaaggggccacggtggaggctgggaagctggaaatctgaggcctctagactgggatgcagggcacacggggccagtgcgaagacggaaccggtgctctggcagcgggtgccgtgggctaggatgactttctgtagatgacggagctgggggccatgacctaacaaggggctctgccaggagcttagaagtcctgccgggcagggagggactctctggggcttattgcaatagatgcagtaaaggtctcaccaggtgggagagcccacctaggtggggtgtcccagccacccccagccttggggactcctgggccctcccctgcccagccctgagagactgccctgtctttctgtgcccctgcaaccccgctatcctggccagggcagcccagagcagagtcccacccgcaggacctttctggggacacagtatgggggaggaaacgcggagacgctgggaagagcatttgttacagaggacagtggcctctgcgagcaaaaatcacagaacatcagcctgaagcgggtggctagagagcttttgggggcccccaaactccacacagggtgacctgggggtgaccttggaggcgtggctgctgtgtcctggcttactctgcagtctggacagaggggcagcgcagcccagagaactggtcagccagaccggtgcacaagtgattcctgggggcggaggggtgcaggagagatgtttgggtcccccaaggcctggggaaaatggcccatgagtctgccttcgctctctgaccccagcttccccacagactgggaagaggaagagctcctcatgagctgccttaactcaaggttcccctgaacaccaccacgtggagaaaaagagtgagtttccctggcctccaggcaagaggctgccagcagcccagggcctgggcagccagccagctccccagtgacctctggctcccttcagtcttcagttcccttccccacccgccttcagcagaagtgagaacagactttgggaagggaagggagttttactaagaaactaagagaaaatgctcttgctccccagctgggagaaaccgaaaacagagaggccggtgggtgcacaggaggcagcctccatccccgggaccatgggtagcaaggtgcagaaacggactcatgccagctgggagagggggccaccgaggggtcaacagagccagtctgcagtgacctccaggacacctgcacctgcctccccaccatccttctggccactccctggtcagcagggccactccctcagaccagcttcccaacacacccaggcctccggtgcagcaagtgcctgggaaaggctgagaggagagctgggccggggctgtgagtggcctcccttggtcaggtgttcactcctggacggtgcccaggggcagagagtgtgattgaccggtcaggagccacaggtggcagcagctcccacaggaggcaatggtcacctggtggcaggggacatattcctgaaggaggcagccagaaaaggcattccccacacaaagtgtgggaaactgagccgggccagaaagtgacaggctggtccagcagccccaggctgagcttgggcacaaagccgggtgcagtggcccacagcggagctggcagggccccagcctcaatcccttgcgcccttacatctctctgtgttccggggaatgcctggccccagccctggcctcggggctctgggaggccctgctcacccccaccctccctgcatgtgcaggaggctctgtggctgaactctgcacacacactgcctgcgatgcagctgggtctgctgctggccaaggccagcactggggccagttccctggggaatgaccatccatgtgacctcccaccaccctcagtggggcctgagggacttctgaagggcggtgcttgggcacaccacgctccgggacccaggactccaggacccatcacactccaggaccaggggcctcgtcggtctggggtttcattctggggctgggtgcagccttggcctcccggctgtgaaccatcatgggtggggctgccttttctcagcccagcaggtccccagctgcttggaaaggccccagtgattacatgagggtcacctgggtcatgtaggacgggctcctcctctcaaaatgagaagactcacagccttcattccccttgccgcgtagcatggtgctcacgggctccagaagttacagcgtggacatctttttttttttttttttttttgagatggaatctcactctgttgcccaggctggagtgcagtagcgtgatcttggctcactgcaacctccgcctcctgggttcaagcaattctcctgcctcagtctcccgagtagctgggattacaggcgcacgccaccacgcccggctgatttttagtagagatggagtttcgccatgttggccaggctggtctcgaactcctgacctcaggtgatccgcccatccaggcctcccaaagtgctgggattacaggtgtgagccactgtgccccgcggagcatggacaccttctgcccaccacgtgagcccgggatcctgcggctcagaggtgactgctgagtctaagccctggtctggcttcaaggtccaaactccttccacttctctggggattgagggggagtttgctgtaccgggcctgccggggctctctgggccccgccctggtagctgaggccctggggtgctgcggcctccaggttatctccccactgcaggcacccacccagggagcatcccaggggcctcagggtgggggaggccaggaactaggaggttctcactgcccgagcagaggccctacacccaccgaggcatggggctccctgggctgttctgcttggccgtgctgggtgagtccaccagggacgtgatggtggggctgctgctggggccttgaggtcttgggctcaggtgggggtactgggagcacaggagagatgaggcctgaaggaagggcacctctggaaacatggacagagagggaaagatctgggcttgagtctcggaccagcccctaaacttgctgtatatgtggtccagggatttctgcaccattctgggctcactacttacccatctgcgaaatgggcggatgagaggcgatgttgtggggggaggggcgcaaaagagcttttgtgagtgatggtgccagctgagtcctggggcctcactaccaagaatcagcctgctcctccctcctggcttcagcaggtgggtctcgaggctgtctctggtctcccctccacaccaggccctctccttatcgcccttacctctcttacagctgccagcagcttctccaaggcacgggaggaaggtaagtggcatagcctgctgcagggagaagtcccccagctgggaccctggtgtcagaacccccatggtggagggcgcctcggctgggaagggagttactagtggggaggtgtgtgctggaggatggctggacagttctggaacactctcttcaccctgcagggccctaggagtgatggagatgggcaggccaagcaggccagtgtggggacctccggggcacacaggcagggaagttgctcagcttccagcctttggctgggctgtttggagggaagattccctgggcaggtgcatcctcatcactctgccccaggtccctgatcgggagcagaagccccccctgagaccctcacagctctgcccggtgggcgaggccccgtggagggctggggaattctggtggggcctgggaggttgggattctctgaccaggaggagggccgtgagaggatggtgaagttaaggctcccccaggggcctgacatacacgaggctgccttccttatagaggcaggtggggagtggagagtgtctgggacccagctgggtacaggaccagggaggaggggacgctggggaaggtccctgacagcccctagcctggcctgcttcctcatctttgcctgctccatctttctgcctgcactttcttgccccatccttccctcccctcccctcatgtccattaaggtgaggatggacagtcacctccctatattgtcccaactaacccttgccccttgttgctaggccatcaggttacagagcagggccttccccctctattttgctaaagggcaggtacagggtaatgatgacgccattctcacttgaatgaggcccaggttgaaccattatttcctcatttgctttaaaaacggatacattgttggtgtggctgctaaaaagagagcaggcagctggggctccgggaagtacctgtgcagggcagttccgcctccccctcttggctggctcccgacttctctgattcttgccaaccaagtcctgctaactaaactcctaagagactgactgataaatcatttattcattcaacaaatacttgagcacctgtttggttgcaggcacaattccaggccctgagaatgtggcaaggcactgaaacaaacccctcctgtatcttacattctagtgggggttggggggacagatgataataaaaataagaacattcagtggcttatgcctgttatcccgcactttgggaggctgtagccaaaggatcagttgagcccaggagttcaagaccagcctgaccgacacagtgagacccccatctcttaaaaaaaaaaaaagaaaatggctcgatctcagcttactgcaacctctgcctcctggggtcaagggattcttccacccagcctcctgagtagctgagattacagatatgcaccaccatgcccagctgatttttttgtataaagaaaatatttttttaaattagctgggcatggtgggcggtgcacctgttgtcccagctactcgggaggctgaggtgggaggattgcttgtccgggaagtgaggctgcagtgaaccgtaatcattaacagtgcacttcagcctgggtggcagagcaaaaaaagcacattctaaggtatgttagttagaatgttctagagaaaagcaagcagggtagaaggaaagggaacaccaggtaggtaggggaaggagggcagcatttgcaggggagggtggagtttgggaaggggccgtgcagcaaggacccgaaggagccgaccgagcaggaagtacctgggcagggaccctgtgtggccagaacacaggaagcaaggggcaaagggtattgaatgaggtcagaggcatggtgtggggttggccggggagggccctgtggggcgcagccataggaggtttggaggggaaaacgcaatctgatttacccttggccgaggtcatttggacactgtgtggatggagatcaaaggcaaaatccaagagagccattaggctactcgggatccagaggagagactgggcaatgcgggagaggcagggagatggggtggacatacattctggaggccagcagcagctgctggcagatggcatgggatgggatgggatgaggacagccatgaaagatggcgccaagccgggcgcagctgctcacgcctggaatcccagcactttgggaggccgaggcaggcagatcacctgaggtcaggagtttgagaccagcctgaccaatatggtgaaacccagtctctaatgaaaatacaaaaattagccgggcgtggtggcgcacgtctgtaatcccagctactcgggaggctgaggtgggagaatcccttgaacccggcaggcggaggttgcagtgaaccaagatcgcaccactgcactccagcctgggcaacagagagagactctgcctcaaaaaaaaaaaaaaaaaaaaaaaaaaaaaaggcgccagtccttggcccatctggaaggactggctaaataaagtgcagcctggagatggcatattatgcagctgaaacagcttcagtgggagtggaaagctgggtacacgtgaaggacctgagggatcaggatattcgaaagatgatctctgcgtaggttggctttttgttttgttccattttgcttttagacacagggtctcgttctgtcaccaaggctaaagtgcagtggcacaatcaccgctcactgcagccttaaccgccagggcttaatcaatcctcctgccccagcctcccaagtacctgggactacaggcacacgccatcacacccagctaatatttaatttaatttttttttttttttgagacggggtctcgctctgtcgcccaggctggagtgcagtggtgcaatctcggctcactgcaacctccacctcccaggttcaagggattctcctgcctcagcctcctcagtagctgggactacaggcacatgccaccacgcccagctaattttttgtacttttactagagatggggtttcaccatgttagccaggatggtgttgatcgcttgacctcgtgatctgcccaccttggcctcccaaagtgctgggattacaggcgagagccaccacgcccggaagctaatttttttttttttgagacagggtcttgccatgttgcccaggttggaatgcagtggcacaaactcggctcactgcaacctccatctcccaggctcaagccatcatcccgcctcagcctccagagtaactgggactataggcatgcaccaccatgcccagctaatttttgtattttttgtagagacagggttttgctgtgtttgccaggctcgtctcagactcaagctcaagtgatctgcccgcctcagcctcccaaagtgctgggattacaggcatgagccaccctgcctggcctaatatttcaaatttttttgtagcaattgggtcttcctattttgcccagctggtcttgaactcctggcctcaagcaatcctccctctttagcctcccgaagtgcgggggttacaggtatgagccactgtgccagtgtgttttgaaatccccaagaattctggcaagtatagcattaagcatggtaggaaccatggacaggcatcttcaaggagggataggtgttggtagataattgtaacccagaagacagagtggaatgtatctgaagacataactgctgtttagcaaggagaggggagaaaagtttagggaaggggaaatgtcaagaaggtgttgtccccctttgtcctagccccatgacatgaaggctgccgggatccacatcgcctgggacacctgaaggggtagacagggctctgggaaggagggatctggtttccattagatgtagaggatggagggtgttggttggaaggttgaggatacaggggattttgattccggctgagcctacactccaaacggcacagaggaggccggacacagtggctcacgtctgtaatcgagcactttgggaggccgaggtaggcggatcacttgaggtcaggagtttaagaccagcctggccaacatggtgaaaccccatttctattaaaaatacaaacattagccaggcttggtggcaggcgcctgtaatcccagctactcaggaggctgaggcaggagaatcgcttgaacccgggaggcggaggttgcagtgagcctggatggcaccactgcactgcagcctgggcgacagagtgagactctgtctcacaaaaacaaaaacaaacaaggccaggcacaatggctcaggcccataatcccagcactttgggaggccgaggtgggcggatcacctaaggtcagatgttccagaccagcctggccaacatgcggaaaccctgtctctactaaaaatgcaacaatcagccaggtatggtggtgtgtgcctgtaatcccagctactcaggaggctgaagcacaagaatcgcttgaaaccagaggcggaggttgcagtgagccgagatcgtgccactgcactccagcctgagcgacagagcaagactctgtctcaaaaaaaaaaaaaaaaaaaaaaagcaaaagacaaaagacaaccaaaaaacaacaccaacaaggaaggaaacacattctctgacagtgctggaagctgcattccaagactcagagtctgcagggctgggtcctcccaaggccccgcgggagcacctgctcctggctcctgtcctggtttctgggggttgcctccctcatgccattctcccggtgtgtgtctgagtctcctttcctcttctcctcaggccccaccctaatccagcatgaattactggagttaatatttaacatgagagagggggagccatctgtaaaaacctgatttccaaatatgttcccatgggcaggtcctgggagtcaccattggaacctatctttttggaggacataattcaacccttaacggacggcggcttattcaaagtcagatctcagagcccctccctaggtctaatgagttgcaacctccagggttgggactggaatttctaagcttcctgttgtcacagagaccagtctggagaggggtagcacaatctggaagggccttggagtcactcagagcaccagcaccatgtccgggcctggacatgagccctccacagtttccctgcagtgaccccgtgcccagcctgggcttggcttagcttcctgtcccgagggcagccctgtcgtcactttatcaaattttgagtgtgccatcccattatttaaatgctcttgcagagcagatgaattttatttatttatttatttatttacttacttattttgagacagggtctcgctctgtcacccaggctggagtgcagtggcgcgattacagctcactaaagcctcaacctcctgggctcaaacatcctcccatgtcagcctcctgagtagctggtgcataccaccatgcctgcttaatttttttttttttttttgagacagggtctcactttgtcacccaggctggagtgcagtggtgcaatcttggctcgctgcagcctccaccttccaggttcaagagatcctcccacctcaacctgctgagtagctgggattacaggcacatgccaccatgcccagctaatttttgtatttttagtagagatggggttttgccatgttggccaggctggtctcgaacttctgagttcaagtgattcacccaccttgacctcccaaagtgttaggattataggcatgagccactgcacccagccaatttttttttttttttcttagagacaggatcttgcttttttgcccaggctggtctcaaactcctgggctcaagnnnnnnnnnnnnnnnnnnnngcctccaaaagctctgggattataggagtgagccaccacacccagacaagcagaagaattttgaattaaatgataggccaggcgggtggctcacgcctataatcccagcactttggaaggctgaggtgggtggatcacttgaggtcaggagttgtagaccagcctggccaacatggtgaaaccccatctctattaaaaatacaaaaattagccaagcatggtggcatgcacctgtaataccagctactcaggagggtgaggcggagaatcacttgaaacagggaggcagaggttgcagtgaattgagatcgtgccgctgcactcaggcctgggagacaaagcaagagcctgtctcaaagaaaaaaataaattaaaaaaaaaatgatagaccatcctttattggcaggctgatccataaactaaataatcaaaaggaaaaaaccacacaagtcttgagaggatataaagtgagtgtgcggccggggacggtggctcaccctgtaatcccggcactctgggaggccgacgggggtggatctcctgagctcaggtgttcaagaccagcctggccaacatggagaaaccccagctctactaaaaatacaaaaaattagccgggcgtggtggtgcatgcctgtaatcccagctactcgggaggctgaggcaggagaatcacttgaacccaggaggcggaggttgcagtgaaccaagatcgtgtcactgcagtccagcctgggcgacagagcaagactccgtctcaaaaaaagaaaaaaaaaagtgaatgtccctggtacagtgtactttcaaaatggttcctgtctgtgaatttatgcaaatcaagcttctattaatgaagactgaaatggaaatgaagagagagaagtttttctttccatttttgtaagtcaagatcgtttcccttcgcaaagggaacaaaaagaaagggtgatcgcgtgtcagccctggacgcccacttccccacgtgaggcaggcttctggcccctgcgatagtttctggaccatgaagagaaggcctcttggccctgagggtcaaattgactaaagaatcagcagaggcatctgcaagaggatgccccagagggtgccttcacctccagatacaccttcactttcttcaaatcgaagatttttccatgaaagcctgtttagggaaaaaaaaaaagtattccttctttttttttttttttttttttttttgagacacagtctcactctgtcacccaggctggagtacagcagcacaatctccgctcactgcagcctccacctctcaggttcaagtgattctcatgcctcagcctcccgagtagctgggactacaggctcgagccaccacaccgggctaatttgtgtatttttaatagagacagggtttcaccatgttgcccaggctggctttgaactcctggcctcaaacgattcaccctctcagcctcccaaagtgctggaatgacaggcgtgagccactgtgccaggcctgaaaaaaaaaagtattcttccccatctaaaaaggagagtctggctgggtgcagtggctcatgcctgtaatcccagcactttgggaggccaaggtgggtggatcacctgaggtcaggagttcgaaaccagtctggccaacttggtaaaaccccatctctaccaaaaatacaaaattagacaggcgtggtggcatgtgtctgtaatcccagctactcgggcagctgaggcaggagaatcgcttgaacccgggaggcagaggttgcagtgagccaagattacaccactgccctgaggcctgggtgacagggtaagacttcgtctcaaaaaaataaataggtggggcgcagtggctcacacctgtaatcccagcactttggggggctgaggcaggtggatcacctgaggttgggcgtttgagaccagcctaaccaacatggagaaaccctgtctctactaaaaatacaaaattagccaggcatggtgacgcatgcctgtaatcccagctactcaggaggctaaggcagaagaattgcttgaacctgggaagcggaggttgtggtgagacgagatcacgacattgcactccagcctgggtaacagagtgagactccatctcaaaaataaataaataaataaataaatataaaaaggagagttatcatgaaattttcaaaggggcacagatgagaaaataattgttggtgtctgtgcagccctgggcaggggaagacatcctgattctagaaggctgctgccggttgtctagaccagagttgtcaacctcagcactcctgacatttgaggccagaccattcttcgcggtgggggctgactgtgcactgtaggatgctttgcgacatccttggcctctacccactaaatgtcagcagcaacccctatttttttttttttttttttgtggagatggggtcttgctgtgttgcccaagctagtccatctcccaatattgacaaccaaaaatgtccccagacccaaagttcccctggaggcaaaattgctcctggttgagagttactggtctagaatgaaacatgcttagtggtcacacactctagtctattccagttctctgctcaatcagcagtttcctcattgcagggtggtttccagagcagacatgcccagccgagcaaaggcaattcatgacgtcgatgatattcagatttcacagacccttctttctacccctcccccaagcactgccccaccacacagtattctttttttctttttaatttttctttcgattaaatagaggtggggtctcactatgttgcctaggctggtctggaacccctgggcttaagcaatcctcccgccttggcctcccaaagtgctggtattacgggcctgagctactgtgcccacctgatacacactattctttttcttttttttgagacggagtcttgctctgtcacccatgctagagtacaatggcaggatattggctcactgtaacctctgtctcctgggttcaagtgattctctggcctcagtcttctgagtagctgggattacaggcatgtaccaccatgcccagataatttttgtatttttagtagagacggggtttcttcatgttggccaggctggtcttgaactcctgacctcaggtgatccacctgcctcggcctcacagtgctgggaatacagatgtgagccaccatgcccggcctacacactattgttgaaatgcaaacaggtccccgccattggtataatacaaccctctccctcaaacccctattccagaaacatttttgtttaatcccaattgctgtcttaaagaatcagtaatggccaggcacagtggctcacacctgtaatcccagcactttgggaggcccaggcaggcggatcacctgaggtcaagagttcgagaccagcctggccaatgtggcgaaacccagtctctactaaaaatacaaaaattagctgggtgtggttgtgggcacctgtagtcccagctacttgggaggctgaggcaggagaatcacttgaacccgggaggcggaggttgtagtgagccaagattgcaccactgcactccagcctgggtgacagagcaaaactccttctccagaaaaaaaaaaaaaaaaaaaaaagaatcagcaaagacagcatcaggcccactaggaagatctcagagatgttttccacaatgaaattgactccaggatttgcttccaaaacagagaagtcactcgcaagcagaaagcagatacctggcgtaggtgggtgaaggcctgctggaatgcgctgacgggctggttttgatctgggtctagggagaagagcactttgggtgccgtgagcaggctggtctcctgcaggagcctcgcattcttcaaaagtccttttaattaattaatttttttagaaacagggtctcactctttcacccagtctggagtgcagtggcacgatcatagctcactgtagcttcagtctcccaagctcaagtaagtgatcctctcccctcaacctctggagtagctgggaccgcaggcgagcaccaccacacctggctaattttgtttatttatttatttttagagtagttctcactgtgttgttgaagctgatctccgaggctcaagcaatccgtccacctcagcctcccaaagtgctgggattccaggcgcagtggccaccgtgcctggacacattttgtttatatagaaaaatattctggaaagaaacagcctaaacccaggaggtagccctttttctaatattttctttttttagaggtgaaattcacataacaaaaagtcaaccatttaaaagtgataattggccgtgcacggtggctcacgcttgtaatgccagtactttgggaggccgaggtgggtggatgacttgaggccaggagttcaagaccagcctaaccaacatagtgaaactccgtctctactaaaaatacaaaacttaggccggacacggtggctcacacctgtaatcccagcactttgggaggccgaggcgggcgcatcatgaggtctggagttcaagagcagcctggccaacacggtgaaaacccatctcaggtgcctgcgtactaagacctgtgttcaacagcggcggcggcggcggcggtgggctcggaggctcacagccagtggacagggttgagtcagtgagttcgtgcgagttggaatcgaagcctcttaaaatggcagatgatttggacttcgagacaggagatgcagggcctcagcgaccttcccaatgcagtcctcagcattgtgtaaaaatgactttgtaggccgggcgcggtggctcacgcccgtaatcccatcactttggaagaccgaggcaggcggatcacaaggtcaggagatcgaaaccatcctggctaaaatggtgaaaccccgtctctactaaaaatacaaaaattagccgggcgtggtggcgggcgcctgtagtcccagctactctggaggctgaggcaggagaatggcgtaaacccgggaggcagagcttgcggtgagccgagattgtgccactgcactccagcctgggcgacagagcgtgactctgtctcggaaaaaaaaaaaaaaaaaaaaaaaaaagaatggctttgtggtactcaaaggccggccacgtaagatcgtcgagatgtctacttcgatgactggcaagcacggccatgccaaggtccacctggttggtactgacatctttactgggaagaaatatggagatatctgcctgtcaactcataacatggatgtccccagcatcaaaaggaatgacttccagctgattggcatccaggatgggcacctatcactgctccaggacagcatggaggtgcgagaggactttcgtctgcatgagggagaccttggcaaagagactgagcagaagtacagctgtggagaagagatcctgatcatggtgctgtctgccatgaccgaggaggcagctgctgcaatcaaggctcccagggtggcggtggtggcagcagtgatcctcccaagaggccccctcccccaggctggcttggctctgccctggtcctaggctgctggactcctcctacacattttttttttttgagatggattctcgccctgtcgcccaggctggagtgcagtggcaccatctcggctcactacaagctccacctcccgggctcatgccattctcctgcctcagcctcccgagtagctgggactacgggcacccactgccacgcccggctaattttttgtattttttagtagagacggggtttcaccgtgttagccaggatggtctcgatctcctgacctcgtgatccacccgccttggcctcccaaagtgctgggattacaggcgtgagccaccgcgcccggcctcctcctacacaatttatttgatgttttattttggttttttgcatcacctcaatctgttgggggagcccctgcccttcacctagctcccttggccaggagcaagcgaagccgtggctttggggaagctgccctcctcttccccctcacactacagccctgctcggggagaagggggtgggtgctgcttgtggtttagtttttgtttgtttgtttttgttttttaattcaatctggaatcagaaagcagtggattctggcaaatggtccttgtgccctccccactcatccctggtctggtcccctgttacccatagccctgagcaccaccccaaaagactggggaccagccccgtcccctgcctgtgtctctccccaaaccccttcagatggggagggaagaggaggagaggggaggggacctgccccctcctcaggcatctgggagagccctgcccccacgggctttacccttccctgcaggctctctccccgacacatttgttaaaatcaaacctgaataaaactacaagtttaatatgatttaaaaaaaaaaggaaaagaaaaaaccccgtctctactaaaaatacaaaaattagctgggcatggtggtgcatgcctggagtccccactacatggtaggctgagacaggagaatcgcttgaacccaggaggtggaggttgcagtgagctgagatcgtgctactgcactccattctggacgacagagcaagactctgtctttaaataaataaataaaagtgggccgggcgcagtggctcacatctgtaatcccagcactttgggaggctgaggtggccagaccacctgaggtctcgagttcaagaccagtctggccaacatgatgaaaccccatgtctactaaaaatacaaaaattagccaggcgtagtggtgggtgcctgtaatcccagctactctggaggctgaggcacgagaatctcttgaacacgggaggcgacagtgcaagactctgtctcaaaaaaaaaaaaaagtgataattcagcagcatttagtgcatccatagtgttgctcaaccaccaccgctatctagttccgagagattttcatcaccccaaaaggaaaccccgtatctattaggcagttactccccatttccccctcccctgggccccagtaaccaccaatctgctttctgtctctgtgggttctcctgttctgaactttgcacacacatggaatcatgcaaccgttgccctttgcgtctgcctttttgtttagtggaatgttgttacggctcatccctgttgcagcctgcatctgtgctcatttctttctaaggctgagtaatattccttatatggatcaaccacattctatttacccattcgtccattgatagatatttgggccgtttccaccatttggctgtggtgaatcacgctgccatgagcgtgtgtgtacaggtatctgtttgagtccctgttttctattatttggtgtatgtctaggcctggaattgttgagtcatatggtaagtctgtttaactttttgaggaaccactaaatcagtattttctttctttcttttttctttactctgaggtctactggtttcacttatttatttgtaatttttaggttcaggggtacatgtgcaggtttgttatagaagtaaattgcagccgggcgcggtggctcacgcctgtaatcccagcactttgggaggccaaggcgggtggatcacgaggtcaggagtttgagaccagcctgaccaacatggtgaaaccctgtctctactaaaaatacaaaaattagccaggcgtggtggcacgcgcctgcagtcccagctattcgggaggctgaagcaggagaatcacttgaactcaggaggcgaaggttgtggtgagcagagatcgcgccactgcactccagcctgggtgacagagcaagactccatctaaaaaaaaaaaaaagagagagagagagagaacatgctaaacccagcatcctttttctttttttcctgagtctccctctgtcgcccaggctggagtgcagtggtgtgatctcggctcactgccacctgccacctccgccttcctggttcaagagattctcctgccttagcttcccgagtagcagggattacaggtgggcaccaccacgcccggctaatttttgtattttagtagagacagactttcaccatgttggctacactggttttgaactcctgacctcaagtgatccgtccacctggacctcccaaacactgggattacaggtgtttgccaccgagcctggccaaaccagtaccttcttaaggtgcttgatcaatgtcggtttctttcttcctccttggaccttttcatctcccagaaattacccctgtggtctccattgcctacaaagtcctggaagttttccccaaaggccgctgggtgctcataacctgctgtgcaccccagccaccaccgcccatcacctattccctctgtggaaccaagaacatcaaggtggccaagaaggtggtgaagacccacgagccggcctccttcaacctcaacgtcacactcaagtccagtccagacctgctcacctacttctgctgggcgtcctccacctcaggtgcccatgtggacagtgccaggctacagatgcactgggagctgtggtccagtgagtgcggtggggggcacagggctgaggaggcaggtggggtgcagatcaatggggagctctgggagtggggattgtgaaccttgctggggttagagagagccagggtgtgagggtgtggacaaggacaggctgccacctccaaggccattctcagtcccttggggcctttaatcaggacttgctgtccctggctggggccctgagggcacagtctcctggcaggggcctgagggcacagagggaaagagcccgatggtggcagaaatgactgggccccagttgtcagctcggacctcaaggtgataaactaggcacgtttgtctgggcgcaaatcccagcactgtgggaggccgagacaggctgatcgcttgagcccaggagttcgataccagcctgggcaacatggcgaaaccctgttcctactaaaattacaaagattagctgggcgtggcggggtgcacctgtagttccagctactcaggaggctgaggcaggagaatcgcttgaacccgggaggcagaggttgcagtgagccaagattgcgccactgtactccagcctgggtaacagagcgtctccaaaaaaaaaaaaaagaaaaagaaacgaaaaaaaagttaggcacgttttgtgcattacttcgcttgatcttcacagcagtgtcaggggtggggtctgagcctctgggtctatagctatgtaagctaaaactctggggagttaagaaagttgccccaggggctgggtgtggtggctcacgcctataagcccagcattttgggaggcccaggcgggaggatcacttgagctcaggagtttgagaccagtctggccaacgtagtgaaaccccatctctactaaaaatacaaaaattagctgggtgtggtggtgggcacctataatcccagctactggggaggctgaggcaagagagtcacttgaacccaggagatgaaggttgcagtgagccaaggtcgtgctgctgcatgccagcctgggtgacagcgtaagactatctcaaaaaaaaaaaaaaaaaaaagtcgccccaggccacatggctggcaagtggccaaggctgctttcaaaccccactctgtccagctccaaaccctgccttcttcctgtttccatcctgatagtaactcaggtaaccttcttggtgggagctatggggtatgggaaccaggaagtgttgcccgacttagggtgggacaaggaatcgccccattcatcctttggcccgcaccctaagaacaccaggaaaagacagcctaggggagatgagcccaggatctgcagcccaacgggtccaaggttcaaatccctacacttactggctggggtcttgaacaactcattggaccgctgagcttcaactgctttatctgcaaaaggaaaataataacagaggccagtgaggtggctcacacctgtattcccagcattttgggaggccaaggtgggagaatcctttgaagccaagagtttgagaccagcctggaccacagagtgatactctgtgtctgcaaaaaaattattttctttttttgagatggagtcttgctctgtcgcccaggctgaactgcagtggcacgatctcggctcaccgcaacctccgcctcccagattcaagcgattctcctgcctcagcctcccgagtagctgggactacaggcccttgcccccatgccggctaatttttgtatttttagtagacacggggtttcaccatgttggccaggctggtctcaaactcctgacctcaagtgatccacctacctaggcctcctaaagtgctgggattataggcgtgagccactgcacccagccaatagcaattttttaaaaaattaatcaggtatggtggtgcatgcctgtcgtcccagctacttgggtggctgaggtgggaggatcatttgagcccaggagttggaggctgcagtgagcggtgatcacaccattgcactctagcctgggcaacagagaccctgtctctaaaataataataggtcctacttcaggggacctattaaatgaaagccttttagtaggtggcaagtgtggtggtgattactcatcagtaagaatgtctagagcattaggctcaaggcctgggggattctagaatcttctacatgacagtttttgtcctgaagtagcttgcctttcagtaaaaaagacgagactgaatgatagagttgccagataaattttacataggacatacgtatagtaaaagattattcattgtttatctgaaatgaaaatttaactgtatttttatttgctaagtctggcaatctgaaatacgctacacaagaataaaaccaggccgggcacggtggctcacgcctaaaatcccagcactttgggaggctgaggcagaagattgcttgagcccaggagtttgagaccagcctggccaacatggtgaaaccccatctctgcaaaaaatacaaaaattagctggatgtggtggtgcacacctgtagtcctagctactcgggaggctgagatgggagaattgctcgagctggggaggcggaggttgcagtgagcctagatcgcgccattgcactccagcctgggcgacagagcaagaccctgtctcaaaataaagtaagaataagataaaaaccaaatgtgaaattgtgtggtacacacggcaggtagggcagcagcccagacacaaggtggagggcaaactctagaaggcggcctggaggaggcggcagccacagctaagctcattaggcattttgtaatgaggagaacttactgaggaggaggggtttaaaaccgctcagccatgcctgtgctaccttctcccaccctgccagagccagtgtctgagctgcgggccaacttcactctgcaggacagaggggcaggccccagggtggagatgatctgccaggcgtcctcgggcagcccacctatcaccaacagcctgatcgggaaggatgggcaggtccacctgcagcagagaccatgccacaggcagcctgccaacttctccttcctgccgagccagacatcggactggttctggtgccaggctgcaaacaacgccaatgtccagcacagcgccctcacagtggtgcccccaggtgagagggcccttggatttccagaggggcagctggcgcttctgtgccgggagggtgctagtgtccaagacacaggtcgatgggaagtgggacagctctacccggccactgctgagagcagagagggcacaggaggcaaccatgcccaccctggcccctgcctaaaggaagcccaacccagctgcctccgccccctcccaggagggttgcccagggcacccaccatcgtgctggttggcagccttgcctccactgcggccatcacctccaggatgctgggctggaccacgtgggccaggtaggaaatgggtgctcgatgcagggaggagggagagctgctgatggcctgagaggtccaaccgggccctggctgcagagctcaggtggtggggcttgcagggcagggctgtggccagggcaaagagcggccatcaccgcttacgcatgactcgaaggtgtttatgaggacctactgtgtgccatgtgcctactgaggcttacacattcaaggcgttatcggaccctgaccagtgctcccaggtgccctgtaacacagtctgctggcctctgggagggcagtctcctaagttctttatggggtctgagcagggattgcagggatgatgcctccaggagaccaaggtggaccaggagctcctgccttctgtgagaaccaccttgggcagtctttccgaggtggtggcaagagcctggggcccagcctcccagggtcccctctccaaggccatggctttactaacatgtaaagtgaccaaggcctttgtagtgtctgagtgcaggcaccacaggcctgtgtgctctgcctgtctggctttggtggtggccagccctgcctctgtgaactcatctctctttgtttgggagacactgccgtgtcctggttctcatcctctgcccgtggcccaggcccttacgtggctctaccaggagtctgtccttggcactttcccatctcacttctaccaagtctgttctttccagaagccagactcgtgggtgagccatgtcacctcgccgagcctcagtttttccttctgtaaaatggggtacagccttcatttagtggggtgagtaagcctcatgtctcttctgctggggcactgatgtgcttggcaccataaaactcccagaggcaggccgggcacagtggctcatgcctggaatctcagcactttgggaggctgaggcaggcgaatcacctgaggtcaggagttcgagaccagcctggccaacatgaagaaaccccgtctctactaaaaatacaaaattagccgggcgtggtggtgcgcacctgtagtcccagctactcgggagactgaggcaggagaatcacttgaacccaggaggtggaggttgcagtgagccgagatcgtgccattgcactccagcctggacaaaaagagcaaaactccgtctcaaaacaaacgaacactctcagacgcctcgggaggggatggctgggaggtgagcctgcctgacttgagtctccactgctttgtcaaggtggtgaccagaagatggaggactggcagggtcccctggagagccccatccttgccttgccgctctacaggagcacccgccgtctgagtgaagaggagtttggggggttcaggatagggaatggggaggtcagaggacgcaaagcagcagccatgtagaatgaaccgtccagagagccaagcacggcagaggactgcaggccatcagcgtgcactgttcgtatttggagttcatgcaaaatgagtgtgttttagctgctcttgccacaaaaaaaaaaaaaaaaaaaaaagggtaactatgagagatggtggatatgttaacttgcttcgctataggaacctttgtgctatctatattatctatatgaatcccatcatatcaggttgtctaccttaaatatacacaaaaacatttatttaaaaaaaagaaaaaagcctgccagctgggattcttggagtgctggtggccttcagcaaacacagacactgttggtgtgagggcttcaggagggtcacagaaataagggggtctgtgtggccctgtcctcgcctctcaggtgctgtcacatctctctgggtgtagggagagggaggggggcacactgcgaaaaggcccagcccctcccccccacctgctcccctcttccctggagaggcaccccacctcctggtggcccagtcctatggttcaactctcacgtggtccagctcacctgggttgactgtgagccccacctggcacacctgctgttgttaatctgcacctgcaactagcaaaggggggtctggaattcttccgggttcagtcagcctgtgatcccacacctctgtctgtacaacctccgctccccactccaacacacacagagcctgccccagcctaccctgcaccagaccctctgtaccggtttttcttgggatggaggtagagagggacggaggcgagagggggctgaactggaactggattaaactttgccatctgcctgtcgccctgaaaacttcatttctgtttgcatgccatatatatatttttttatatgtggtcttttctttttttttttttttgagatggagtctcgctctgtcgcaatggtgcaatctcggctcactgcaacctccgcctcccgggttcaagcgattctcctgcctcagcctgccaagtagctgggactacaggcacgcgccaccatgcccagctaatttttgtatttttagtggagacggggtttcaccatgttggccagggtgttctcgatctcctgacctcgtgatccgcctgcttcagcctcccaaagtgctggaattacaggcgtgagccaccacgcccggccgatatgtggtcttactctgtcacccaggctggggtgcaaaggcgtgatcttggttcactgcaaactccgcctcctgggctcagacaattctcccacctcagcctctggaatagctgggactgctagtagctgccaccacgcctcgctaactttcgtttttggttttgtttgtttgtttgtttgtttgtttgttttgtttgttttgagatggactcttgctctgttgcccaggctggggtgtagtggctcgatctcagcacacggccacctctgcctaccggtttcaagcaattatcctgcctcagcctcccaagtagctgggattacaggcgcttaccacaacgcccagctaatttttttgttgttgttgtatttttagtagagacggggtttcaccatgttggccaggctggtctcaaactcctgacctcaggtgatccaaccgcctcggcctcccaaagtgctgggattacaggtgtgagccactgcgcccggccttgcacaccatctttttttttttttttttttttttttttgacacagagttttgctcttgttgcccaggctggagtgcaatggcacaatctcggctcaccgcaacctccacctcccaggttcaagcgattctcctgcctcagcctcccgagtagctgggattacaggcatgcaccaccacaccaggctaatttttgtatttttagtagagacggggtttctccatgttggtcaggctggtctcgaactcctgacctcaggtgatccaaccgcctcggcctcccaaagtgctgggattacaggtgtgagccaccgctcccggccttgcacaccatcttaagtgtgacgccacactgcccttcacagccttggggctctgcccagaccaggaggaatggggagggggtctttgaccctaccccaggcttagccccagagaggaggaaagagtggcaggccaggcagggaggggctccagggtgtggcctgggtttttcagtgggatgggggaggggttgcttatgagcctgggtgggttcttggtaggtggtgggcttcctagaggaggcggtgggagggcaggggcaaagagggtgagcggtcctcagttcgtccgtcttcccgggggactctctgaccctttctggtccgtgctgcggccggcgtggcccggagactagcccctcaaccccgaggtggggtggacccgggtgctccgcggccacagcccctccccgcctctagaagcgcagtcccgcggctcgcccgccgctcgcgagggccgcactttgccctcggtccctagcggcgcctggccacgcccccggcgggtggagtcgggcggggcgccgggcaggttcctctgcgttccgcggcggcggcagcggcggcgacggcgacatggagagcggggcctacggcgcggccaaggcgggcggctccttcgacctgcggcgcttcctgacgcagccgcaggtggtggcgcgcgccgtgtgcttggtgagcccggggagggcgggccgagggcaccctggggaccccctctccgtcgccaggcccggcggggcccctagcccacgagcgcgacaggtggcggcggccgcgtccggggcctggcggcgagcggggccggcgtccagcgtcccgggccccgccttcccgccctccacagtctgtcccgctgtcccctcccggtcccgggtcccgccacccaccccacccccagcctcgcgccccgacgcggggtgtccggatctccgcagggagcgggcccctgcctcgctggcagtgggaggagtttgggggcggctcccggacaggtggcccgcacgccgcgactcccagattggggagttcaccgggacggggttttccgaagccacgtggggtaagggagggggcggggggcgacccaacgcccggaaacagggtgtccttcccactcggggcaggccacgggtccgccttcccacccgaagttgagggaccccaagatgtaccccctccctgtaaggtgggcaatacctccaaaaccaggttttgtgtgtgtgtgtgtgtggcggggagggggcctgttcttggacagccagccctgaaagctggagggggtggcatgagggggcaggcagaggtgggcctgctgtgcccagaccatgcctgggcctggagcttctgaggtcctccagggcgcccacaccagctcccagccaggctgtgggatctgatcgcctctgtcctgggctgtgtccaagaatcaggtgcccagtgggtcgggatggcagtgccaggagtcctggatgggcaccctgctcccatcatcccggagatccggcttcatctccatctgggggcggggcctgtgactgccagctccagagccctatggagagctccctgggacaacagggcaggactggcaggggagagtcctggggccatcccagagggatcctgatgctcacagacctgtcccacacctgctgaggtggagcaggcgtgggtggtggccttcaagtttagggaggtggtatggggctcttcccaaggggctggagctcccctacatccaccctgggtcctccaggtgtctgagttcagagctgtatccacaggcctgagttagtccccttgtagtgccctgtgcatgcagggccctctgtggggtgggagacagactgggagggaccaggatgccacagaggctgcaagtccttgtgtggagacagctggccaggctgaaccagggagggttccaggggttccaggaggtgaagacacaggggcgccagcatggccttcccaagagggcctgtccaccttcaccaaggtgttcaggcagaggctgggtgctgtagaagtgacttgggctgaaggtgacgggggatgggtagtctttgtgacttggcctgtcttggttaaacctctttcaaggtgaggttgggctggggatggaaggactgcccttcatccatcaggtacctaagcagaatgattcctgcagcaggccgatggggcaggagcagcccctgcctaggaggtccctgcccattccccacccctccccggtccaggattcccaggggcaggccccctggtgcctgcagattctcatcctggggtgcatcaggaagcactttgctcatcagctcacctccacaagtttggaggggctaagatgtcagcctccaaaaggggacagcaggctgggcgaggtggctcatgcctgtaatcccagcactttgggaggccgaggagggtggatcacctgaggtcaggagttccagaccagcctggccaacatggtgaaaccctatctctactaaaaatacgggtgtggtggagggcacctgtaatcccagctactagggaggctgaggcagaattgcttgaacccaggaggcagaggatgcagtgagccgagatcgcactattgcactccagcctgggcaacaagagcaagactccatctcaaacaacaacaaaaacccaaaaggggacagcagtagtgggagaggccagcatctgtacaccccatcagggtccccgctgtgtgtgcccctcaggcggccaccagccctaccaggtcctcccctcccggcaggtcttcgccttgatcgtgttctcctgcatctatggtgagggctacagcaatgcccacgagtctaagcagatgtactgcgtgttcaaccgcaacgaggatgcctgccgctatggcagtgccatcggggtgctggccttcctggcctcggccttcttcttggtggtcgacgcgtatttcccccagatcagcaacgccactgaccgcaagtacctggtcattggtgacctgctcttctcaggtatctgcctgtggcacctccatttgatcttgggggaggcattaactctagggttccgcagctgggagggtctcggcctctctgggaggggcagggagcagctcactcctccagggcatttttaggaaagggttttcagctagtgtttttccgtgcttgaatggcaccagccctgcctggggtagctagaagctgagtggacctgcagcacacccgagcagatgggctttgcctctgccccttttgtcccctaggctgtctgctgtggcccaccctgccaaggcccgagtgtgggggactttggaggtggctcccggcccggcttccaagtcctcccctccatagtgtggaggctcccccgggaggtccctgccctacctgcccgcgtcccctcccagagtcctggaaagcccctccctttccatggaactgacgcttcacccgtcctcccccagctctctggaccttcctgtggtttgttggtttctgcttcctcaccaaccagtgggcagtcaccaacccgaaggacgtgctggtgggggccgactctgtgagggcagccatcaccttcagcttcttttccatcttctcctgggtaggatggccaggggccggttcttgggtcaagggtggtggaggnnnnnnnnnnnnnnnnnnnngtgtggaagggggggagcccccacccacctgtaccctgctgtgctccccctgcagggtgtgctggcctccctggcctaccagcgctacaaggctggcgtggacgacttcatccagaattacgttgaccccactccggaccccaacactgcctacgcctcctacccaggtgcatctgtggacaactaccaacagccacccttcacccagaacgcggagaccaccgagggctaccagccgccccctgtgtactgagcggcggttagcgtgggaagggggacagagagggccctcccctctgccctggactttcccatgagcctcctggaactgccagcccctctctttcacctgttccatcctgtgcagctgacacacagctaaggagcctcatagcctggcgggggctggcagagccacaccccaagtgcctgtgcccagagggcttcagtcagccgctcactcctccagggcacttttaggaaagggtttttagctagtgtttttcctcgcttttaatgacctcagccccgcctgcagtggctagaagccagcaggtgcccatgtgctactgacaagtgcctcagcttccccccggcccgggtcaggccgtgggagccgctattatctgcgttctctgccaaagactcgtgggggccatcacacctgccctgtgcagcggagccggaccaggctcttgtgtcctcactcaggtttgcttcccctgtgcccactgctgtatgatctgggggccaccaccctgtgccggtggcctctgggctgcctcccgtggtgtgagggcggggctggtgctcatggcacttcctccttgctcccacccctggcagcagggaagggctttgcctgacaacacccagctttatgtaaatattctgcagttgttacttaggaagcctggggagggcaggggtgccccatggctcccagactctgtctgtgccgagtgtattataaaatcgtgggggagatgcccggcctgggatgctgtttggagacggaataaatgttttctcattcagtctccagtcattggttgagccacagcctaggggttggaggaagactccactctgggtacacccttaggggctggctttatggaacttgtagtttgaacaaggcagtggcaatccgccccctccagcctgcctggctggcccccttccctctgtctggggtcgcattccgcacaagcctttcatcaacatcttaaaatagtaactgtgctcagcttgtaaacaagatgatttttctggcctgcagtgccagggtcctgctgctcccttcctagagtgggggtgggggtacctgggagttgtcggtgaatgcccctttcttgcactgaataggggtaccataggtaagaccaggtttctaccttcctccagggtcagcacctctggagccttcctgggacacggccttggccgtccagcccacccctcggagataaggcccatctctggaagaggtcaaggccctaaagcaacttctggcttcttcttttgagcaatgacagagggagctgtcatcggcaagtcccgattgtttaaaaatccccagtacgaactaacagggcactgctcccagcctcacccgatggctttggcttgggacacatcactagcgaaggggagagggaggctggggaggccctgggagtggtgaccctgcctgcacaggacacaccttaccccagcgatgcttgcccccaagtgagctgccaacagcccatctctgaggcacagctgagagatgtcttgactcctgaattaccaagagtttgtttcacaaacaaaacctgacctcacaggcccagcgggcaggacagtgcctcttccttccaactgggccccgggctcctctgtacacccatttttgtcctgacactggcccagacaggaaggcagatgatgttctgcttaggacacaccccatgatcatttctcagttcaagggttgtggttaagagatcagtattactacagaaagatctgggggccaggtgcagtgcctcacgcctgtaatcccagcactttgggaggccgaggcaggtggatcacttgaggccaggagttcgagaccagcctggccaacatggtgaaaactcgtctctactaaaaatacaaaaattagccaggtgtggtggtacacgcctgtaatatcggctacttgggaggctgacgggggagaatcacttcaactggggaagcagaggctgcagtgagcagggattgcgtcactgcactccagcctgggcgacagagaccctgtctcaaaacaaaagaaaaaaagatctggaagaaaatccccacccaaatcaagttggagctgtccatgagacccagggaaacccaggtgaaagagaaatgtgcgtccaccaaccagtgaattttcaattagttaatttcataagctacagcagaggcgtggaccctgccctctccacacttgaagagataagcccctgggatccaagtcccagcaaggttggtgccacccatcttggtgaaagatgctgttgttcctgtggaaaccatcaccagaggtaggaagggctttgagcccaaaaggaaacaagagggcgtgaatccaggccatcctcaggggagggtgggagcccatcccaggcagagaggcctaagcctcagtgtgggccaaggctcaaaggtgctggcacaggcttcccagggagaacagaaactcagcagtgaaagccgcagaggggaagaagcaggctgatgtcaacagcgtggggctctgtccctcaccccaaggagagggagtgtgccagatcccaggccaccaagcggggccagctccagcctgggcgatcgtcccagcagctgagagggaagctttaagcagaccagtgggtaggagaggagggagcatgcggcaggtggggcagccacacaaaggagagttcccagaaggccaaggtgtggtcaccctccacgcctcccgacttcctcctggagtggctgggcagcatgcagggcagcgtccagtaggcggcagtggcaggaagggagcgggcggccctcgcaggtccctcagttggcagggctgcattgcagaatctgctgtggggcaaagagcttcctggcagccacggcttcccctggctttcctggcactgggcagttctctttgttgtccggcccggcaggctggcctgaggccttcttgaagtagcagagccgacacacggagtggtacttgtctgctcccccaatcacctcgacctggccgcagggacaggggatgggtgaagggccaggacaggaaggaggcagagccatacccccaccccgccggcctgcagggaaggcaggtggagctacctccttctctgtgccgagcctcttggtataggcggcttcccggaagcactccatgcacaccgccgtcagcttcaccacgctctcggccagcggcaccaggttcaggatggccccaaatggctgcgctcccatggaaagacagagggcgctcagccaccttaccaggtgggtttttcttttaaaccctctgattcacaagcactgaagccaggagagtttgctctgaccttagtccttcccccaacccccagagcaccatgcccggctctgtccctttgccaattcaaagcacctgccgcaacagatggcacgcagtctgcacagaccatggagtcccttggctcagccaaggcctgagcagctcggccgtaaccctgtggtggctgagccctggtcacccagagctggtgtctctgtgcccatccagaagcctcttgccctcctcaatcccagctccagacctggatcagacgccttaccttcctctggaaggtcccatccagtgcagccacaattacggtcttcccggcgttggccatggcctcgcagaactccacgatgtcagggaactggaaagggcacgtggagaaagagtgtgagagcttccaccccagcagcagctccctggagccccagcgaagacgctgccagatctgacaactccggccatttggcccggagtaactcttaattctcccacgaggctccccaggccgggggactgtgtccacccgcacgccccccagcagacgacaggtacatccacaactgcgcagccccttccccctgcagccagcttccctccgagtccaggtacccaggactcagcaccggacttccacaccagctgtgctgtttaacactgcagtggccaaaggcctgctgccttgggctcggacaccactcttcgctggacccattatctgtgtgaccttggcaatgaattaacgtctctgaacctgtttccttttccttaagagcaaggaaggtcctgttgtttaaggatggaaggccctaagttatatacatgctcttcggtgaataggtgggcgctttgtgctcttgcctcccccgtttta

SEQ ID NO: 621 - DNA, 1000 bp, Homo sapiens
ccagggagcatcccaggggcctcagggtgggggaggccaggaactaggaggttctcactgcccgagcagaggccctacacccaccgaggcatggggctccctgggctgttctgcttggccgtgctggctgccagcagcttctccaaggcacgggaggaagaaattacccctgtggtctccattgcctacaaagtcctggaagttttccccaaaggccgctgggtgctcataacctgctgtgcaccccagccaccaccgcccatcacctattccctctgtggaaccaagaacatcaaggtggccaagaaggtggtgaagacccacgagccggcctccttcaacctcaacgtcacactcaagtccagtccagacctgctcacctacttctgctgggcgtcctccacctcaggtgcccatgtggacagtgccaggctacagatgcactgggagctgtggtccaagccagtgtctgagctgcgggccaacttcactctgcaggacagaggggcaggccccagggtggagatgatctgccaggcgtcctcgggcagcccacctatcaccaacagcctgatcgggaaggatgggcaggtccacctgcagcagagaccatgccacaggcagcctgccaacttctccttcctgccgagccagacatcggactggttctggtgccaggctgcaaacaacgccaatgtccagcacagcgccctcacagtggtgcccccaggtggtgaccagaagatggaggactggcagggtcccctggagagccccatccttgccttgccgctctacaggagcacccgccgtctgagtgaagaggagtttggggggttcaggatagggaatggggaggtcagaggacgcaaagcagcagccatgtagaatgaaccgtccagagagccaagcacggcagaggactgcaggccatcagcgtgcactgttcgtatttggagttcatgcaaaatgagtgtgttttagctgctcttgccacaaa

SEQ ID NO: 622 - protein, 265 aa, Homo sapiens
MGLPGLFCLAVLAASSFSKAREEEITPVVSIAYKVLEVFPKGRWVLITCCAPQPPPPITYSLCGTKNIKVAKKVVKTHEPASFNLNVTLKSSPDLLTYFCWASSTSGAHVDSARLQMHWELWSKPVSELRANFTLQDRGAGPRVEMICQASSGSPPITNSLIGKDGQVHLQQRPCHRQPANFSFLPSQTSDWFWCQAANNANVQHSALTVVPPGGDQKMEDWQGPLESPILALPLYRSTRRLSEEEFGGFRIGNGEVRGRKAAAM

SEQ ID NO: 623 - DNA, 26695 bp, Mus musculus
  misc_feature (1)...(26695): n = A, C, G or T/U
ctgagctatctagtaagctctaaaatcaatttgtttgtttgaaatgattgagctcagaatttcaggctagctagctaagctctctatcagttgactaatccttagccctccctcagtttttgtgttgagataaggtctcattatacagcctaggttgaccttgagctggacctccaaaggtgtaccagcattcctgactagtcctaatattttctaagacaactgtgactgtaaccttctctgtgaatccatagtgtggcatgacacatgcagtagcctcttcagagcatgaagtgagacaggtatgaagctcagctccaaatgtgatacaatatgtgatacaatgtgatacagtatgtacaaacaagcatcacaactagctgaaacaagaactgaactaaacaagcagcttagttaacttaaacagcaagcttaaagaatcatggaacttgaccctcaagtctgcatgcattacagaatgtgagttccttccattttatagaataaggtttcaacactgtaccacaatattcctatttctcaagcagttcctggcctggtatgtttgagaagactcaagactgtcctatacatggctcttcccacttttacttcagtctttcttagagcagtgaagtgcaaggtagtataagactggacagaagaaacaacagtagccactccactcacactcacgttaggctgacacaaacccgatccactcacgctcacgttaggctgacacaaacccgaagcatctacttgcctcttcactctccttggctgggctggccccatcgcttggctgggccccatcactggacacattctcctggtcatcagtttttgattttttactacattcctttaaaaaaaaaaaaaaggatgggggatgttagaaaggaaaattatttttcttttctctatttttatttatctatttttttcctttttagatcaagtctttctacatagtcctggctgtcctggaactcaccatgtagaccaggctgacctcaaattcacagaaagtctgcctctgcctcctgagtgctcagattaagatgtgtgctaccatatttttttttaatgagatagggtcttgataaattgcactgtctaactttgagctcctgcctcagtctctcaagcactgggatcattggtgtgtaccaccgagctcagtcaagaataatttagtgtgatgccaaaaaccaaaacatatcctgagcagtcgatcttacttctaagaaaccctttctacaaaataaaatcatccatacttatagaagggtacacataaacactcacaccctccatttgtattgtttgtagtagtaatgaagaacaggaagtgatctaacggtaatatatataagaacatttagatgtggctattacacaagattacaggcgattctctgaaaaaaaaaaaaaacaacgtatggagtatttggatatgatacaattcctgtaaaaaaacaaaaaaccaaacgagattcctgcacatgcatcacgtgtgaaggcaagtgaggcagctgtcagtcacttcagccacctagtggagcaggacaggagggcctgcctgccctttattccttctccacttcgttgtattgaagtttgttgttgtttaagtagaagagccgctcaaagcatcatttctaattactttattaatcgttcacttccacaacagggtgccgggactgagatcaatccccggccccagaacagtagcttccacggacagtcccggcggtgcactcgcctgcagtggacaacagccagctcgccgcccagtcctctgcagacaggtgatggctgtcagaggccgacataacagagcaaggtgcacccggctgagcccgaccctcaccaccgattccagccttggctttcgcccctagccccgccggacgacgcacccacctttcgtgtgcagtgctcacacttcatctggagtgggactggcaggaggccgacgcgcctaagctgtgaggagtaaggaagactggaacaccgccgcctgccgcccgctagcgacctgcgaccctttgttgtcttcttgcacggaggccccgccccaaggactgtagtagaccaatgagagagcctaagcaagatgagccacacccctgagccaatgaaaagagtgcaaggatggtatggcacgctcaccccgcctccgccgcttaagccaatgagagtgtgaggaagtggcaggtccctcccaggagccaatcagagaacgggggtggagcttgtccctcgactagtagttgcccggccgggacatatcctcctgtcagtttttgcctggttaaggactaatggggaaagttggcaaaggcgggcgtatgaggcaggaagagtgcgctgaccgagcggacgaggccgaatcgcggcgacctcagagcgccttgctcagtggccgcggcctggcccgctcaatcaagttagcgtcgtaagttctgctctactgcgtctcctggagggcggagccggcgccgccctctaccgccgccatgaccagccagcgaagcctcacgtaggccggtgcggcacaagtgcacatgcgcagcaggcttgctttgctttatgggcaatgctgctgagtctggcgtgtagattcaaagtaggctgaccttgaatcttggcgagttagcgcatgcctttagtcccagaacccaggagacagagcaaggcagatctctgagttccaggacggccagtactacacatgtacctgtctacaaacaaaatgacaggtaggatgagcaggcctattggcaattacccaacactcaggaggctgaggcaggaaaatgataaaattaaagccaacactgccctatactgctacacagtgagacctgtctccaaggcagattaaatgcattattcttttgttgtgttccaatcccctgggaaagaccaaagacagactcaattcaaatttaaattaaataagtgcattcttactcctacctgaaggacagcggctttagagccaaacagcatgctggaagaaggctaaaggaaagctttataaagtagatatcatagctgcacaccacctacagaatagggcaagttacataatatacaaaagatgtaccttatctatggaatccacagctgggcaagagaatcgtcctgtgtaataatgtacatataactcccctgggacagctaaagaaacttactatagtaccaggcatcccttaaaggccactgacctttgacctggaatgtcaataatagaatgagattataggataatggtttaccgagggaagtgtctctaataactgagagcagcctgtttctggaccagcagtaacagtgcccccaagttacagctggctgtcacatccccagccctaaattctctgaattagcttgttaaatggagtttgtttttcagtgccttctaaaagctgagtttaaacatatcattagaaatataagggggctagggagatgatggctaagagcactgcctttctttcagaggatcaaagttggttcttagcacctgtgactgactggctagaaacttcccgggctccaactcgagggatctagcgcctcttctggccaccggaggcaacagacacacagtgcatttgctcacatgctgccaaaacgctcataaaacaaaaagaaatatgaatttagggcccagtgaaacggtttagtaggtaaagcaaggtaaacccctgcaaggtgtcctctcctccacttgctactatggatgtgcgcacacacaacataaagaaataaaaatgttaacatcattgtgagtttaccttactttcagttcactaaaattattctcagtgatgtcgggagtacgggcagtcgcccgaggagctccaggtcctatcaccagaaccaaaacctgttctgtctcacagctatcttctggttctcttcctctctcctgtttcatgcaattttcccatgtacatggaaaaaatatatatgtatatgtgtatgtgtgtgcatttgtgtatatacttgcacacatacagatgttggttctctcctaccatcctggttccaaggatcaaactcagaaccaactctaggagctcagccattttgctgatcctcttgattactaactgcaaggttaggcaagactagagaagggaagacaggaatcataagactgtctagttgtctagttggggagtttcttttgtttctacattctttgagctacactcatatgaactgtcaacacattctttttgttctgcacgcttatatagctaaaactgtttttattctcaaaattctggtagaaataacttgatatcaagtacccttcactactgcggagagctgtgtaaagattactcttacacttaagagtctacaaatgttcaatgacatattatatctgatttggttatcctgctggaagccagtcagacactatgacccacaccttaatgcttagaagcagtaaccaaacattaacgtccacacccaacttgtggagttttattaagatggagtctcttgaggctggaggaatggcttagcagtttagagcatttgccattgcggaggacctgggttgattcctgattctgtgtattggttcccaacatttccattaactcctgtctccagggtatgtgacaccctgcttggtttttgttgttcttttggttttgggggatttgttttgttttggtttggtttggttttgagacagggtttctgtgtgtaacctggctgtcctggaactcactctgtagaccagcctggccttgaaatctgggatccacctgactctgcctcccaggtgctgggattaaaggcgtgcaccatgactggctggcagcgacgcactcttttgacctctgtgagcaccagacatacatgtggtacacatactacacacaggaaaaacatttacacacacaaaataaaatcaaaggccagctatggttttgcacttcttttatccaagcgctttggagacaggcggatccccacgaggttaaggcttgcctggttcacacagcgagttccggacaacccagaactaaagtgaggccctatctaaaaaataaacaagtaaatcaaaatagatcaaatatgtattctatattgagccacatacacagcctgcaagatgttttcttaggtcatactgaactcttcaggcatgtacttcttatttattattttttcagggttgtgtgacagaacttcctgatttgtcattatgtcacaacatacacatgatcctcatcccaaagagggagcccatgacagaccacagtatggatcccaccagaatctaacctggggaaacaatgagttctactgggttatttgcaggaatatgggtgaggggttatgagagtcaaagtgattcaaagtgcatcacaaaagccaaccacagcttgggtgacagctcacaaatctgggaccctggagcacatgccacagcttacaggtagctcaagaggttggagagtgtctcttttctaagtgtcccagttggtctaaccctcttccaggcagctggtctggtctgagagttttcttagcagctgatcttccttctgtctgagagagactttcagcttttgttgcttatatgtactttcctgataaaatatttatattgggggctggggagatggctcagcagtttagagcactggctgttcttccagaggacatgggttcaattccaagccctcacatggcagctcaaaactgtactccagttgcagcaattctgacagcttcacacagaatgcatgcaggcaaatgccaatgaatatataataaattttaagatgtttatattgccctgtgttgccattatagctctgcaagtggataattataaacaagttttgcataaccaacaccagtttctgagaggtacagaaattgttcagtttcattaagcataggtgttggaaaaacaaactacctacactgaaccaatagagcttgctttcaatctgccttctagactctcagctacactcaaagcaacggggtttgcttagtctcaggcaaatgctctatcgcttagctcaatgattttagcttactacataggtactgggttacatctccgagaggaaaggctttctcaatgagagcagtgcagctgtatgctgagggggaaagctttccccaatagttgcacagctctgagggaaaccaccaatgttgttaaactgtcgttacagtggaagtgttacagctctgaaaggagatcattctagcagtagggagccaaggactaccacaaagtaacccgacacaacaaacctcatcaagagatttgctgtgacagaacaaagagagtggttgcctatgcttggatgagaagtagattggagttgagcaggagacaggcttatatagggcttcttcggggaggagttttgccaggagcctgcccaggcagtttttctacagggcagtccagccatggaggagataaggtgagtgagtgcggaggtggccaggcagtcttgcccctgtgactgactggtaatcaggtgcttctttattttacaggtttcacagaacaaaagacaatttcacaaaacaatgattattcaggaagtatcgattatatttgatttttcactttatgtccagagttacaagttcagtcacaatcagaaaatacaaatagaacagattttatttttatcatcagccctataactccaatttaaagaacctaaagaatgtctcctccaaagcaaacacatttattacatgacagcctgctttttggctggcaatgtttgcagttttaaagcactccagacaaacaaaatatctgaactggtctttttattaataacaaatactaatacctaacttcttttattacttcatcacctatgctataaagtaggaaaaatttattttagtcaacctatgttacttactgagttagttctattcctccaagggtgtatcctgtacaaccccctatctttaaacttcattttcagaaagctctaagcatactgtaaagggaggccttgaatgtaacctattctcctggccagtcagagtttgtcagttgtctcggtttaccctgcaccaattacactgtttgagttagctcagggggtgatacaccaagaagtttcctgcagtaatggtcttatctaattatgtgtttatctgtgttttaatggtctccagagcataaggaaggcttacgcatacagccagataaggttaattttagaattttcctaagagagactggaatataatttttctcaggaaaagacacaaagtgaatcataatgcagaaagtccccaaggatgcagcacacagagaccaagcctcaaaggtgacagaatggcagtgatcacagcattcagctcagctcagctcagcaggaactgtgtcaagcagctgtgctggctttgtgactgtcactgtttccagtcgatgtggctgtgccagagctttccagggtggagatttccagggtggggattggtgaggtttcagttcaagcccagggattggtgggatttctagtttagggattagtggttttcatgctcaggaattggtggggtttgatagagttttcaaacccagaagtcggcttggatcttttggcctacaggtacaggcagaggtgtcacctacaacaaacctattaggggaaataaattattgctagactgtgtgatctccaaagttaagtgttttttaaaaattaactaaaagcagctagatatagtgacacacacctttaatcccagcacctaagaggcagaggcaggaggactctgagttggaggcctgcctggtctacatagtgagttctagtgtaacagggccccaggccttagcacaactgactcacgatggaggtaccattcaagctgtaatctcggcacacagcacagtcatggctaacattatgttcatggctaacgctaatgttatgtttacagtttaaaatctctgggctttttgagaactgcaaagcaaaattagacttccaaatgttaagggctgttaaaggttactttttaaatttctgtttctgcttcggtaaataaagcttgttttgcataagaggaccttctgcttgtactagcacagaatgtaacttgtggtttttgcctttataaacccctgactgaggtgactggggactgcattcaggaattccgagtcctgggtgtagacctggtgccagtctataaataaaagcctcttcttaaactgggcagttcccagcactcaagagacagaggcaggtagatctctgtgtatttgaagctagcctggtctacagagtgagttccaggacagccaggttttgaaaaaaaaaaaaaaaaaaaggagagggagagataaagagaaagagaaaaaaagaaaaaaaaagagaataaatccagctttaaactgagtatagcagcgtgtgcttttaattctagcactcgcaagacagattgggccagatcccagagttccaggccaaccagaaatacatgcacacactcacacacgcacatcatacagacaagcaaaaacaacaaaaaacagggatcgagagttggctcaatagtaaagagtactagctactttcccagaggtcctgaggttcaattcccagcaaccacatggtggctcacaaccatttgcaatgggatctgatgccctcttctggtgtgtctgaagacagctacagtgtattcctatacataaaataaataagtaaatattagagagagactgcctcatccagttttctcagtatatactgtaactataaattgacaaaacttcaagggtcatgctgtgtacttttataaagtcattataaaattaggaatcccataacaagtagatctaaagagaacggtaaagtaatggaaatctctgctccagcatgccgtcctagcacccacagatcatcgtaggtatgttggaggcaaactacaaaataggaacatgtgatccaggttttacgtcactagttattgtgtgttaggtctgaaagaaaccggggacaaatggctaactgaggtgcctattgaccatcaaagtagatgatggccatgctctcagcaagtacctgttacagagtcctgactcctcagctcttgcccactaccctagacctctctaaccctgcccaagcccctgccttcccttcccttccctcccctcaactcccctccccttcccttcccttccctccaacttctctttgcctataaaacccagacatcgtgactacgtgctgacatctgacatcgtgactacgtgctgtctgccctcttggtcttttgtctccatctcgcctctcttcatctcttactctgcccctctctctttcctctcatggctctattctgctggacatgttcaaccagacgcttccatatgtgctttccctcacatttacaataagaaactcgtcaacaatacctaggagtggccatgtccccactttcatttattgtgcatcttttgttagattgacctcgggtagtcagatcatgtttgctataccttaggcatctggtgaatatgacctcttatcatttcctgaaaattacagatctagccaggaggcggtggcacacacctttaatcccagcattcgggaggcagaagcatgaagatccctctgagttccaggccagccagagctacacagagaaaccttgtctggaaaacccaaaaaaccccccaaaaacaaacaaacaaaaaaacccaatccagatccactcactccccaggcttctaaaccacgcccatatcctgcttaactaggaaacctccttgagtgacatctttcttggttggccaaggggctaaattcaggtgccctacctgtccctgtccccaggagtgtgaagcacaaaggcacaacccccgactgcgtaatcactcagtctccacccctgggaggttcccacccagctcttatcccggaagtctgcggaacagaagtccggaagttcgaggggctgttctctcccactcattctcctacaagtccctcgttgtccgcataggtgcgtgtcctacaacttttcgggttccgacccgccgagccctgtgcgggtcatcgcttgcggatctggaccaggcgcaaggcaaattgaggaagccgggcgtgtgcactccggaggaggagccagcgtaacgggccgctagtggagcttgttggtaactgaagccagagggaggcaagttatgtgcctaactaggattcttgaggatgtagggtatgaagcttgattgcccctgggaatccaaggagccactcagaactggggccttgggtgttaatctccagacgtcctgccgcagtgtcccattaattcggcgcatttgggccattgttaggtagtctggcgtcaataacagggatctgacagcttatgaatgtagagactcatacacgatggtactttcacttcccgttcttggtgggaagagttgtttctggaagattcgggtaaggtgccggaagcctgagttgtgtgtgtgtgtgtcggggcgggggagggggagggggcttactaatggaacaacttaaagataagagttcagtcaagaaaagggttcacaagactgggggcttggaagtgagttcagaccaacaccaaatttgtgagctgtgtagccccgatgcccatacataattgtgagttaagtgggctcataagagaaaggtgttcggggtctgctgtggaccttcccctggcctcctgactggactaatgaggtgctgcctatgtgcactggttgcaggcttcagttgtgtttttccaagcctggtcggctgtgcagtagagcccaggttccaagaatgtatatgcaggtggagacacgcaccagcacccgcctccatctgaagagggctccaggcatccggtcttggtccctgctggtcggtaaggcttcccaccccccaccccacccccaatctaaaaagcgacgtaaacagcttctttgtgttctattagaggttctcaatacaaggccttgataaagcatgtttcattaaccctcagggtgccttttctttcagatggcatgcaggaccgacccccttgcatgctaggcacactctaacactgagataccctccctgccttgcaagctgggcacacttctttaacactgagatgccctcccagcctatctgctttttatgaggtcactatagttttccttctgtgtgacaggtgatcatgggttcccatctttcctcttccctggctcagacctcttcataagcgcacttagcctcttcctccatcgctgcctgtcagaaggctcttgtatctcagggacaggtgcacttgtgttggctgggctgtacagtctgaggtgaggcactagctgtggcttcagcagcatctctgcagtctgtccttatgatatacacatgcttttctgcatgttatgctcgggtgttgttataattctgtaagtagtcttcatccctcatcccatgtaagcaatacctacctcagggtcatttgtgcgtttgtcatttgtttgcagacaagtctggtgaatgccatgatgggatatcttgctttttatttaattttatttttaaactatgtgtgtatctatatgggggttctatgcaggtacgtataggtgcctgtggaatccagaagagcattagctctcttggagctgaagttgcatgaggttgcgatggcctgacatgggtgctggtgctgagtactgaactgggtcctctgcaaaagtagtatatactcttaatcagtaagccctcttttccagtccccttctcctccgttttgaaacaaacatcttagctggctcaccaactctgtactaggtagcctctacctgttgcccctgaacaagctgtgctaccatgagacagctatagcactgtgaagaaatgggtcttcccttggctagttaacaaggtactctctccctctctctacaggaatattatccactggcctggctgctgcctattacagtggaggtaaagtatgttctccccttcagcttccttgcacttggaaatgaacaaaaagcagtcttggtgtgtgtggctttggggtggccttgtgtgggagatgatcccaggccatgtcttgtatcttaaatctcttactgtgttacaaagtcctcttgtaaagctctttagcatttgcctgtcaccttgcagggaggatgtgtcccatctccatggcaaggctgtatcgatctacccatcctctaggtggaattaggcagagtttggggcttaagtagctccggtgacagaagcacattacctaagcctctaatctgagccaaaagaaaggttgggctgggaaggaccacctatggacatcaccttggctcctgagctaatgagctgatatactgtctgcttgcagatagtctgggctggaagctcttctatgtcacaggctgcctatttgtggctgtacagaacttggaagactgggaggtaagatggaacagtaggacccttcccgttcagaagcacctgccccagctcagaggcattcagttacctggactcagcccttcccttgattttgcttgtaaacatctctggacttttctagaaaagctactcacaacagttttcactaaggttctatgtagtgtgttttgttatgttgcaggcttgcctcaaactcaaaagaaagccaattgcctcaaccttctgatgggcataaaacaccccacttggcgcacagtagcgccccccccccccccgggttgttacaacaagtctgtatgtcccttggctgggctggttccacagggcagggacctgtgagaacattttgaagttcaggggtttggggcttcctctgaccacccaggtcctcactgtacacctaacaatggcagacaggaatctgagcctggggaaagtcaggtggtaccttttggggatgcccccttcccttagtcttggacttctcagaattcttgaagctgcctggcctgggcttctgctttttgcttaatggcctcattaccatcctgtccttttgttcttttatttacccagtacttagggttgaacctggggcctcatacctgctgggcaagattccccaggctggtcttgctctcaggaagagagaagagcacccattctatctgctttctctcatgtgtcccttactcacaaggagtacaagaggttaggcacagaaggtacctctggaagagtcctggagactttggatttccacctgggcaaattgcgtatttgtaccagtgtgggtggggctaatacctcagcataagctccgtcctctccctggagttctgtgtgcttagcatatattggtttgcaggaggccattttcaacaagaacactgggaaggtcatcttaaaaacattcagcctctacaagaagctgctgactcttctcagagcgggccacgatcaaggtaagacgtggggacctacagcttggtgaggcctggatggcttgggttcaagtccaactgctcaaggaatgagggtcctcagacatatcctggcttgcagggatagatccaggcagatattttgcatacttaaggacttagcctgtcaggaagaatggaaactccttggcagctcctagttgggtgagggtgacaagaggttactgtgccaggtagactagcaaggagccatcctagtcttcaggaaccacttggcctttgtcgattatcctgtacctggttgtcagctttgctagtcctgcagtgagatggtcagaggaaccctgcaacccttggacctctgggtttggaaggtagccttgttgtgaggtatcaggttctcataggtctcttccttatgtatccagcccagctattgtgcattacaaacatggaagtaaactgtgtgtgcatgcacaggcctcttagtaggcttttaacatgaagagttaagctacgaggcgttcaggtctctagcttatgtggagtgctggcagtgtatagctgaaagtggcatagatgaagaccagagctggtttgtggggtgtgagttgaacttccccttaggcagcttgttggaagcctggctcatctgagagccagtccccacaggctccaagccccatggccatccctcatgtcactgtgacagtgagatgagataggtttcccagtggctcttgggaatgcagtatcagccatgcattagttaagcaatggtttttctgtacacagaactaactggcagagctatcccactggagccagacaggttttccagccttaggtaaaatcaggcaaagaggatatcatgaagatggcagcttgggcttagggatccatccctgttgtaggactgctcaggaaagccagcatctgcctggaactgcagctgtcgggctctcctgagcatccttatccacaagttattctgggtccatcgtcctgaatgtggacgagccaatgcttttgtcaccaatgctcctcctactattcagcgggttgtcctgcgcacagcatagggtgagagcatagggtggactgctcatcagcaaacccttctgtccccagtggtggttctgttgaaagacatccaggatgtgaatgtggaggaggaaaaggtccgttactttgggaagggctacatggtggtgctccggtttgcaacaggcttctcccaccctctcactcagagtgcagtcatgggccgacgcaggtaagagtggtatggagcaagactgggatatctgtcccttagtgttttccagggcagcagagaagttagatgttgtagacagggtatggggctgtgcttaggagcagctttgccatagcttctatggggggaggcatcagaacagggttaggggagtctggtgagaataggaccaaggtcagagatactgggcctatttgggacccctgggggtgttgtaggtgtatcatagggggtgagacagtgtgggtcttttgtggtgtggtgtggaactgtaccctttgccaaggtgacctgctttcttgatgatggtctagtgatgtggaagccattgccaaactcatcactagcttcttggagctgcaccgcctggagagcccctcagaacggtcacagagcagcgacagtgaacctgatggccctggtggccagagttgacagtgtggactggctgcaggtaaatgccatccacttctgatgcatctccaaccgacttgacaattgtaagggtacaggcagatcttgggcacctgcctgtggctccttgggcagttctactatgggccacctgccttttgcttgtttatgcttctacactttgcagaaccttgggctagacctctgccacaacccagaaaggttgcatctatcaggatgcagggtgtggatgctacatctagggggggcaaggtctcagaaatgagtgccttctccagagttacactgcagctctgggttgggcagcacagcctggtctggataagctcacccaagggcaatctgaagcagaaaatgccaagctctcttcagcataggcctagtgcctgccttggagacaccttgccactccaggctactgtaagcaagactccattcctagtgagtgagacacctatatgcacgtgggcagacacactcctatgcacagtgatgtctgttccctctgaccatccctcaagatggacactctcagtggtcaggggcttccctgaaggcaactctggatgctggacacctgaccacagaactctcagaggaatccgagtgctgctgactacccagttccttcttagaccatgtgtctgagagcccagcagtgttggagcccagctgtcaggaatggaaggctctcccaacccagcctggaaagaaggtgctagcagaggaaagatcacctctcctggcatcctgcagcctttaagacctgggggatcccttacagaaacagtcttagcctttcgagccttgaaaagacctgaagaaaacaggcatgtggagacacagcccaataaatcccagtgttgagaactgcagcgggaagaacgttcaaggccagcctgggccatggcctcttctaagaaaagttggtaccaaccactaatggtccttttctgctcttctagtctccttctgggtggactcaagttgctcaaaagtacattgtttactaagttcccagcctggcctctaggcctggaagctgtggctctctggcctaacacagctcctcgaagcctcatacgcatacctcatcaggcagaactggggaattgaagttacatagacaaaggccttgaggccactgtacctaagccgagcatggtagttaggcaagaactatgaacaggtcttctgaagtgactgccactagttctgacttggggaatatggtcccttaaacatgccaaagtgagctttttaagtggataagttagagatttctctccccagatgaaacgtgaagtatagcttgttgggttttggcttgttgcctataggctcttaaggtactttagacaagagaggaaggtgtcttaggtgctgtcatagactcactcctgggtgacagcattcaattctctatggtggtaaaaagctgattagagtttctgctggtgggacttccacttctactggtctttttatttcagaagtaataaagctctacatgcaacttgcaaatgtgcctttctgttttctgctttgcccaaagttactgttcatacagttggagagcctgtctgcacaggtgtccggagctcagcaggaagagcacaggctccacatggctgggccagtgaaacagaaatcttggtggtgtccaggctgatatacagggccccagcctctcaggggttctgccctgtgtcccagcctgggctggtgggtggtggctgtcgggcagccgcctcacccaggtcctgcagcagatcctgcagtcgctgcagactcgggagcacattctcctccagccactcctctatggtgtccgggtagaagaccggctgcagggccacctccaactgctgcacgaggttgttccacctacttagaaggctgggggagacagcagccatgatttgacttgagtgtgcctgctgagactcaaggttacatagctacacccatatcctcagtccctggagctggtattattccatgcctccgtgtaacattgggacaaaaaaataaatggtcacatttcaacaatcaaaagcacactactgcctggcagtttttctcacaaccatgaacgggacacactattggcagcatgttacactcagtacaattgtactcttattacctgcttagagtcttgaactaagagaggacagtgcaggcagcctgggactccagccacagggcatgttaccagattgtaccaggaaatgacagggccagcatggaccccaggtggcctgattccaaagatgaggtcagcttgggcatgtggttgatactgtcttaggccaggaaccacttagattcttgctaatattaggggacgtgttactaagcagtagcctatcagtgcatccaagatctatagctgcaggacctggagagcctgtcttgccttaacactgatagccatggtcattgctactgtgtgtgtccgtaaaggggacaaggtgttccaggggctgaacacctgggaagatatgatggtggctacctgagtgcctccggctgtatgtgctggatcataactgggtgaacaagcttccgtctacgatggtaggggctgaaccagccagtgacatacctggagcaaatccagacagtgtcagtggagccagtgtggtttggagataactgggggcatggggggtggggtggctggcttaagaatctggtggtaatttttagaagtctttctagaaaagcctttgtgaagaatagtgccaggagacgtgggagccacttacctgttcctttccagaagtgtgtccacagagctgcgcaggtggagactaatttgtgtgacgagggcatggatgtcactgccagggaaggagccagctccctcactgccagagagtcacactgagaacagtggtctcggggggggggggggggaagggatgtcagggaccgtgggattaccttacagtatccgctatctccaggcttgaaaccccaaggaagcgttccgctctcagcctaacatcctcagcaaagcctcctgaaaccgtccacaggcagaagtgctcagagagaacccctgacctttgagtgctatgggcaaaaggcacagcatcttggggagccccagccaggccaggtggctgctttccagtgaacatgtgaaaggttgtagcagcacaatctgcaggagcccctggcctcaccacacagtccatgtacaagtgtccaggctcagaggcggagtagtctagagcacctgaaacaggatgtgagacaggacacacacacctcccagtcagcacaaaaggctgtctcaggaagccactgacagagggttcctggctctgcactgaggggtctgggttccagcataatcactcttcaaaaagagctaaagccaaccactaacatcagtgcctcttcagtgctgagggctggctgtgcttattgttcccttgtttttctacacactctagacactttacactttacacttttcttccagggggaagaaagctaaataaagtaagaccacttccacatctctcctgcaggccacagctgctaactgctttggggacccttctttacatgtggacgtcctttgagtgaggctgcatgggctatcactctgagcagtgcccatgcctgctttctgcaaccagttgtttcctcaggtcatctgggtgtaggagctctgggataaaggctcctgcagcagtgggggcacccagtcctggagagtcttcggaacacttaagcagcaaagagaatctgcatctgcacctaaagcatgaattagtttctttctttttttctttcttttctctctctctctctctctctcttttttttttttttttcttttttggttttttgaggcagggtttctctgtgtagccctggctgtcctggaactcactctgtaggccaggctggcctttaactcagaaatcctcctacctgcctctgcctcccgagtactgggattaaaggtgtgcgccacaactgccagctaagcgtgaacttcttatatacgttctctgaatctgtggggcatgtcctttctaacttcccaaactacctgaggctcaggctggggatctgggtacaggcaatcctggaccagctggtatttaagcaagtgggcagactagaaacatgagggccggcgagagctgtcggctgggacataccatgtacaagtgactgtaggcaggcagccagggatgggatccccaccggaagcagctcacacagcacagagaagtggtcgtacctatgtccaggagaagactattcagctctacagcccataaccgcttcagcctgatgaggacgcctgatttggggtaccctctcttatgttttgaggggttcctagactaggaaccactgtgggcaaactggtgtatcaggatttccaaagtgggtttcaagtcatggggattttgcattaggttggcaataatgccctggggaggagcctgtacaggggaaatgagctctgagcatctgggctctccacagtggatgcttggtatggagctcctgtagagccttttcctgtacagtccgcctcgaaaggcttcttctgtggcctgtatcccatctatccatctcatgcttttccacaaggctccaggttagagtgggcatcagatctccaggtctgggcagagagcctctacctggcctggcctgtttcttcagtcataaggggctagagagatgctcctcacctgaggtacatggaggctgacagatgggccagcatcactggtcattagttttcttttacctctgtgagtcactagtcacgatccaatgcatagaaagggtttcactctctgtgagagtcttggtttaactcacacctcaatatactctaccagaatggcaaatgcttggtaagtcttcaatgagccacctagaatcatctctgaggccaaccactgaaagcacgagcaactcctataaccacactagccagcctcagttggctgagcaccctgctctgcagtcacattttagagcctgtgaaggccccagggggacatctttccagcttttcctagtgtacttggctagaaccacagactgggttcatcctatttttcaaagcatatgacatcctaaaagaactgggactaatcttcacgtcctgctacacatgagacatatgtgtagcacacagtatcacacatggaacatgcagactccagaggctgcgtgcttgtggctcgaccactcaattgtctcctcagcagagttaatgaggcaaacacagaggcatggagaacatgatttgggaagatgagctgccatgttggatgacaggaactcttcctcacttcctaccccagcccctgagagcttacctctgccagcccgtcaggatgattccttgtagagcatcctttggtccactgcctgccacctgcagccacagctcatggtttctgatgtggtgctcaacagggggcagagcctgactagctcctgtggcccccttgaaggcactggcagcccacagcctctggaagccacactcctggtactttcctatgaggaaaactaggcaagaaagcaagcagatgagcatctctcacagagagttcctgcatacacagcctaaccagagcagctgagagccacgcctcatctagcagagaggagacaccaaccattcccacaatgcccgtggtttatcattcatcacgaataaacacttcaggaagagctggaaaggacctgggatgatctggagccagcaggggattccatgccaggacagggggctttgcataacctttctgttccatgctggaaaagctaggctaatgtggtgcccatatttccaggctaaatagttcaggttacagggttatgggagactgggaaacagtcatgcaggtacgtgtaccatgaggaatgtattgtgagcaacccgtactgacctttgccatggacatccaggtcagctccatagtcccagaggacaggctccaccagttgaggcaccccagatgctgccaacagagcaaggctgtgagtgtggtaaagcccactcaggtcacactcctgcttctcagacgtatttgttttgatataggagtctcagtttgtcacccaggctggacctgaactccaatcctcctatctcagcctcttttttttttttttttttttttttttgggttttttggtttttcgagacagggtttctctgtatagccctggctgtcctggagctcactttgtagaccaggctggcctcgaactcagaaatccgcctgcctctgcctcccgagtgctgggattaaaggcgtgcgccaccacgcccggcctatctcagcctcttaagtactgagattataccatgtgccatcatgctcttccctggcacattcctttaatgttaaagttaaacatgaaccatctcatcaggtctagtgggttttaagtacagcttgcagctgtgtttctgtgttttgggccagaaacatcagagctacaaatgatgtttgtagctgcctgcttttgtgaggagggattcctaaactcttctccaagctgcctgccttgctgccttggggcactggagtacatctctaactcattaatgtaaaacatatactggcctcacagaacataggtacagctggccctggatatctgcactggacctcagggtttagtggagctaggcaatgcatctaagtgccaatctcccaggctgtggaaggtactctcagctttcatctccaggctttgggccagtgtggcatcttcaaggctggccacagagtacacataggactaaagctatcagaagcgctggacatgccaatggcccctctgggcctgtcagtagccacgccaatttctgttcacactcctgcaaggctgtacagtgatttaaaggggacagaacccagcactttcactagagcatacattaagacctcacttccaaggcctctgaaacttgaggtcttaggcagccacatataacccccatccacacaggccctgccaaccttttagctgttcctgagggatgtcccgtagcatgtcatcccacaccaagggtgttacgccagggtgctgggtcagcacatggctggctactgcctgcatgtggctcaggcacaatttcgcatggctgttctgttcctgctgtagccactgttttgaggtttccccctcacccaagtagtagacctaggaggaagaaacaggatgggattgtatctggtgccatccttaggactacagggttcacacttgtcctgaatcttggggtggctgcaagtacagaggagagtagaaaggaacttagcttccttgttttccatgggaatactgcctttcttagactggattcacttagggcttctttgggttcaaagcagctttgctgagatgactaagaggcagacgaccttgttaactgactgaggagtgggtgctgggaattgaacccaggtcctctggaagagcagtcaatgctcataactgctgagccatcactccagcagccaccccccccccccactcccctgctttgagacaggatttcatgtagcctcggcaggattgtaattccctatgctataaagtctgctgggatacaggtatgtataatcacatcttactttcggatttccttagtttgagataccagggcccaagatgacctagaactcactatgtagtagcctagctggtctcaggtttgtgacgcttctctccacaatcctccaagtgctacgattacaggggtcagccaccatatcgaactctgatttacttttaaaactggaaacctcaaggtggaatgtctacaaacccaggcagaagcagcctttgtctcgtagcctagcccagccctgcccacatatctggaatcaagccagagaagcagagaagtagaggctagccattgggtgggcttggtaagagggaatgatgccacagatgccccagaggaacacttctcccaatagtgcttcaagatccaagtataacagcacttttttcctgtcaacacctcaaattgcacatctttggctacaactgtctgaaagggcgtgcatttgctcatggctagggctggctctgttctgtaggatcatcaggtatacaggataccttacttgggctctgcaggactgccctctgccactcaatgctcctctccagagatggcgtctccctaaataggcccagctcctcggcaatctctgcctttgttctttagtatgtggactatttcctttataaaagaatccatggtgacacaggcctataattctagtgtttggcaggatgagacagaaggaccaagagttcaaaccagcctgggggttgtaatggcaatgtagctcaaattttattttatttttttgggtggttttctgagcaaaaaattttaaattaagttaaatcaaaccaaatcaaaagaaaacaaacagggctggagagattgctccgtggctaagagcactagaagttcttccagaggatgcaggtttgattctcagcacttactaggtagctcacaaccacctgtaactgcagtcccacatgatcatgaccccctcttctgacccctgagggtgttgtcatcccacaacaaatgtacacaggcacacatgcaggcaaaatacccatacacataaactaagtaagtaaataaataaatataaaaagaaaagaaagaagccatgatgtggtacgcaattgtgaagaaaagcagcctcagaccttgtcactcacctcgtcacagccaatgtggagccaccggacatccctgtgtagctccagaatttgatcgatcatagcttgtaccaaggccagggactcagcctcgtgagggttcagggtgttggggaagagagccacttcacggagatgtgcaaatgctgcatgctttagcacaaactaagaacagagacggaagcaggttcttaaggatcccagtcccttgcgtgtccttggcgagcactccaagtttagctgcttnnnnnnnnnnnnnnnnnnnnnnnnnnnnnnnnnnnnnnnnnnnnnnnnnnnnnnnnnnnnnnnnnnnnnnnnnnnnnnnnnnnnnnnnnnnnnnnnnnnnnnnnnnnnnnnnnnnnnnnnnnnnnnnnnnnnnnnnnnnnnnnnnnnnnnnnnnnnnnnnnnnnnnnnnnnnnnnnnnnnnnnnnnnnnnnnnnnnnnnnnnnnnnnnnnnnnnnnnnnnnnnnnnnnnnnnnnnnnnnncagtgctcttaatatctatagccactccagtcctttggtttttttcctttacattttattttggaggagtgaatgaagctgcatcctacaagccattaaatcaataccatgtttgcctcttggttgtctgtcttacatatgagaaataattttggatactggtaaacaaaaaatggaaggtttccttccttcccaatgaagctgctttgaccagtgctctctggctgcttacagattgatgctgcagagaacaggagttcaggcagcactgagctgctgcctacccgtcaggccctgttgccccgcactggagcccaggcccagtctctgaacctcacattcataccagtaactgtcacccctcccactcacctccatgtgtccgaatgtctgcaccaaggggataacttccagctcactgagtctggccaggcgcaggatctctgtaacctcggacgggctggggtaataagagtacacagaggcttgtgtcagcctggtgcatgcgcaggcgcgatggagagctggaatgcccagagccaagcctccttctagcatggtgatcatgctcctgcctgagccatccatgtgctggtattataggcagttaccaccatgcctaactaaagaaccagcaaggaccgtatctacactcccctgacctgcctgtgtatgctaggtaagcactctaccactgagctatatccccagcttcattgattcagcagctaaaacgacactgcatagttgttttaatctcgatttctcttttttaaaaaagatttatttatttttatgagtacactgtagctgtcttcagacacaccagaagaaggcatcaaatctcattacggatggttgtgagccaccatgcggttgctgggaattgaactcaggacctctgcaagagcagtcagtgctcttaaccgctgagtcatctctccagcccccttaatcttgatttctatgagaggcttagtatcttcccacttgcttatgcattccaaggttaaaatcaaactatgaggagctggggagatcattcagtggttgaaatacctgttgcataagcaagagagctagagttcagattcccagatcccaggtaaatgctgggcgggcctggtagcctagctctatttccagtgctcagaaggcacagacgggggataccagaggaagctggcttgctagggtagccaaaatgctgtgttctggattcaaccaaagatgctgcttcagttaaagtagagagtgataaagacttggatgtcaactgcaggcttctacatgtactcataacatgcacacccacacatacacatgcacatccacacacatgtgaattcacacacacaccccccccacaaggacccccacgccaaaaataaaaaatgcaacccagtcccagctgccccatgactacttactcttccttgtagggtcagaatagatatttattttctcttttaaatggtttcctgattacctttaatgtacatgttttattttaaaatatgttctgccgggcgggtggtggcgcacacctttaatcctagcannnnnnnnnnnnnnnnnnnnnaaaataaaaaaattttaaaaataaaaataaaaatatgttctacatatgtgtgtgtgtgccatgtgtatgtgtgtgtaccatctgtatgtgtgccatgtgtatgtatgtgtaccacgtgtatgtgtgtgtaccacgtatatgtatgtgtaccatgtgtatgtatgtgtaccatgtgtatgtatgtgtaccatgtgtatgcaggaacctgcggaggtcagccgagggcactggctgtcctggacctggaattgcaggtggttgggagccactatgtgagtactgggaaccaaacccaggtctgtttttgagacaggatttcaatctgcagcccaagatggcctttgactttcaataatcatcctgttgttaaaagcctcccaaatgctgggatcataggtgtgatccactacacgtggctacatgtcttaattttataaccaaattttatacacacacacacacaaatgtgtatatatatatatatatatatatatgtacatgcacttaggaagacaaaaaggactgtaaaatgttagtttccaattatcccatccacagtaatgcccatgcctttctcccctcccccaccccctacttggcaccctcagctagctttgatacctgtatgcatgcttggccctcagcagcctcaggtggccctcatagggaaacatgt

SEQ ID NO: 624 - DNA, 2393 bp, Mus musculus
cagaagtccggaagttcgaggggctgttctctcccactcattctcctacaagtccctcgttgtccgcataggtgcgtgtcctacaacttttcgggttccgacccgccgagccctgtgcgggtcatcgcttgcggatctggaccaggcgcaaggcaaattgaggaagccgggcgtgtgcactccggaggaggagccagcgtaacgggccgctagtggagcttgttggtaactgaagccagagggaggcaagcttcagttgtgtttttccaagcctggtcggctgtgcagtagagcccaggttccaagaatgtatatgcaggtggagacacgcaccagcacccgcctccatctgaagagggctccaggcatccggtcttggtccctgctggtcggaatattatccactggcctggctgctgcctattacagtggagatagtctgggctggaagctcttctatgtcacaggctgcctatttgtggctgtacagaacttggaagactgggaggaggccattttcaacaagaacactgggaaggtcatcttaaaaacattcagcctctacaagaagctgctgactcttctcagagcgggccacgatcaagtggtggttctgttgaaagacatccaggatgtgaatgtggaggaggaaaaggtccgttactttgggaagggctacatggtggtgctccggtttgcaacaggcttctcccaccctctcactcagagtgcagtcatgggccgacgcagtgatgtggaagccattgccaaactcatcactagcttcttggagctgcaccgcctggagagcccctcagaacggtcacagagcagcgacagtgaacctgatggccctggtggccagagttgacagtgtggactggctgcaggtaaatgccatccacttctgatgcatctccaaccgacttgacaattgtaagggtacaggcagatcttgggcacctgcctgtggctccttgggcagttctactatgggccacctgccttttgcttgtttatgcttctacactttgcagaaccttgggctagacctctgccacaacccagaaaggttgcatctatcaggatgcagggtgtggatgctacatctagggggggcaaggtctcagaaatgagtgccttctccagagttacactgcagctctgggttgggcagcacagcctggtctggataagctcacccaagggcaatctgaagcagaaaatgccaagctctcttcagcataggcctagtgcctgccttggagacaccttgccactccaggctactgtaagcaagactccattcctagtgagtgagacacctatatgcacgtgggcagacacactcctatgcacagtgatgtctgttccctctgaccatccctcaagatggacactctcagtggtcaggggcttccctgaaggcaactctggatgctggacacctgaccacagaactctcagaggaatccgagtgctgctgactacccagttccttcttagaccatgtgtctgagagcccagcagtgttggagcccagctgtcaggaatggaaggctctcccaacccagcctggaaagaaggtgctagcagaggaaagatcacctctcctggcatcctgcagcctttaagacctgggggatcccttacagaaacagtcttagcctttcgagccttgaaaagacctgaagaaaacaggcatgtggagacacagcccaataaatcccagtgttgagaactgcagcgggaagaacgttcaaggccagcctgggccatggcctcttctaagaaaagttggtaccaaccactaatggtccttttctgctcttctagtctccttctgggtggactcaagttgctcaaaagtacattgtttactaagttcccagcctggcctctaggcctggaagctgtggctctctggcctaacacagctcctcgaagcctcatacgcatacctcatcaggcagaactggggaattgaagttacatagacaaaggccttgaggccactgtacctaagccgagcatggtagttaggcaagaactatgaacaggtcttctgaagtgactgccactagttctgacttggggaatatggtcccttaaacatgccaaagtgagctttttaagtggataagttagagatttctctccccagatgaaacgtgaagtatagcttgttgggttttggcttgttgcctataggctcttaaggtactttagacaagagaggaaggtgtcttaggtgctgtcatagactcactcctgggtgacagcattcaattctctatggtggtaaaaagctgattagagtttctgctggtgggacttccacttctactggtctttttatttcagaagtaataaagctctacatgcaacttgca

SEQ ID NO: 625 - protein, 211 aa, Mus musculus
LKPEGGKLQLCFSKPGRLCSRAQVPRMYMQVETRTSTRLHLKRAPGIRSWSLLVGILSTGLAAAYYSGDSLGWKLFYVTGCLFVAVQNLEDWEEAIFNKNTGKVILKTFSLYKKLLTLLRAGHDQVVVLLKDIQDVNVEEEKVRYFGKGYMVVLRFATGFSHPLTQSAVMGRRSDVEAIAKLITSFLELHRLESPSSQSSDSEPDGPGGQS

SEQ ID NO: 626 - DNA, 27693 bp, Homo sapiens
agcctcccgagtagctgggactacaggcgccccccaccacgcccggctaattttttgcatttttagtagagatgaggtttcactgtgttagccaggatagtctcaatctcctgatctcatgatccgcctgcctcggcctcccaaagttctgggattacaggcatgagccaccacgcctggcctatttcagtcttttttttgggacagagtctcactctgttgcccaggctgaagtacagtggtacaatctcagctcactgcaacctctgtcttccagggtcaagcaattctcctgcctcagcctcctgagtagctgggattacaggcgtacaccaccatacctggataatttttgtatttttagcagagataaggtttcaccatgttggccaggctggtctcaaactcctgacctcaagtgatccgtccacctcggcctcccaaagtgctgggattccaggcgtgagccaccatgcccgcgtacttcagtcttctttaaagcagtgatgtgcacggtgctgtgagcccccaaagagaaaaacagcagcagtagtttactctgggctgatacaaaactgaaaaatctacttgcctctccattttcctgggctggactcggtgcatcggctgacacattctcttggtcatcagtttttgttttcttactacattccttaaaaaagcaaaggaacattatcaatgaacttttacttcgtctcccttaagaaaatgtgcacattctgaccaatgaagctcatgtatttctatcctttcttttagtttatttatttattttttagacggagtctcgctctcacccaggctggagtgcaggggcgcaatctcggctcactgcagcctccacctcccgggttcaagcgattctcctgcctcggccttctgagtagctgggattacaggtgtgcgccaccacacccagctaattttatatttttagtagagactgggtttcaccatgttggccacgatggtcttgaactgctgacctcaggtgatccacccgcctcggcctcccctcccaaggtgctgggataacaggcttgagccaccgtgcctggccttctatccttctaacccttctagtgaaacaggtacttaaggacacacacacatctctattgtttacaataataaaaaagcagaagcaactgtagccttccccccacaggcgaattcccctggacacaggtgtacttagaataggacgcagccaccaccggggatgaacgacccatggaatgttaggaagcctcctgccacggcgtcacgcgcagaagtgccagccacagagcagcatccacaggagcccattccggcaataacagctacaaaacccccctgcgtgcgctgcgcggttgttgccatggcatggagacaaccgcggaaggcgccggtcagcagccgtcacccgcttccgcccctgcaccggctgctcggtgaccctcagaggggcaggttcgaaaacgcctaaaaccctctcgaaacgcttctgatcattcccgccacgaccgctgtttactcggactgtggtgcgcggcacgagaggctcggtctccgtgcgtttccgcgcttcgcgggcgtgggaaagatggacaagttcagggagaaccgcgaagaccgaacccgccctgcagagcgcagcggaccccgcgccggccgcctccacgccgagcgggcccagggtgccgaggccgggggcgccttgaagagccctgaagcgagcgagcgcgggcccggaccgccaacctcggccgcccagagccccacaggacaagcaccaggcgcgcgctccccggcccgcgggctcaccttgcgcgtgcagtgctcacacttcatctggagcgcggcgggcgggaggccgggcgcctcagcctcagggaagcaccgggagactgggacaccactgcccgccgcccgcggccctttgttgtcctcccccgacgcggcctcacccccaacggccgcgctcggccaatgagagcaccgggagaggacaagccgcacccctgggccaataggattccccacccttacggctttgcctaggccaatgacagtgtcgggaaggggcgggccaggccccagagccaatcggagcgcgcggggcggaccgcaggctcactccacgtacggcgccggggggaccgggtccttgcgccggtttccgcttctcgtgggtcctgcggcggcggcggcggccaagcggcgttcaccagggagtcggtgagcgcgcggactgtcccgaggccaagctggggccgttccagggtgctcggtccggtggtcacggggcctggaggcccctgggcccgcggaggccgcggccgggctctgtcagccagctcggcgttggacactcgccttactcgcggctcctaacggggcgggccgggggcacagccctcgtccgccgccattgccacttcacgtcgtgtcacgtaggctcagcggagtagcagcgcgcatgcgcggcctgcctgtcagtaaccacgtgatggacccggaagcccgagggcagatgctaaatgatggccgtttgacatttgcgtgtgttcactatggatagttttaccaagtacattgatttgggcccttacagctcacaaagtaaagataacacttactcctccaagaaattgatttcagctaagcaaaacattgatacagggctataatggaagtgttggactcataaacgttttatgaaatcagtgtgtgtgtattacagaaatcagaaatgagaagaacatgtctgggagagtgtgacataagaaaaataacttgtaggcgtatttaacagacagcagcagttctcaggattccccatgttagagccttccttcctgtcctctgagaaatgaaaatgaaatccaaagacccccaactgactacacgaaccccctactggctaaggagatcccagggttgccttgaaggcagttctcagccatgacagatgggaggtgagacacctgttattaaggccaacccttggctaactaccattaggttttcttggctaagagcttaacggaaaccagcgctttcgaaagactccaccgctgataacaactctctcatttgcagtttcggcccaattgaccagtattccttactgataagagacactgaccatggagtggttctggtgagatgacatgaccctcgtgaaggggcctgaagcttcattgtgtttatgtatgtttctctcttcaaaaatattcatgacttctcctgtagcttgataaatatgtatatttacacactgctcctcatagattcctgttccctttgcccctccctggaagtgtctgtttctggcttctggccagaggcagtgcttccctgtctgtcagaatggccaccctgcaggctgaaaccctttatgagaagtaaagctctcctttccagatttatgaatctcatcattcttcagcttgccattgcccatcgggttcttcctgcccactgcacagacaaaaagtcaattcatcaagattgcagcaggccaggaaaagagtttaattgacacctggcaggccacacaggagacagttactacccaaatcagtctctccaaaggctcagcagttaggagtttgttttttggttttttttttttttgtttttgagacggagtctcactctgtcacccaggttggagtgcagtggcacaatctcggctcactacaacctccacctcccaggttcaagcgattctcctacctcagcctcctaagtagctgggactacaggcacacgccaccacgcctggctaatttttgtattttttagtagagatggggtttcaccataatggccaggctggtcttgaactcctgaccttgtgatccgcctgcctcggcctcccaaagtgctgggattacaggcatgagccaccacgcctggccgcagttagggtttttatggacaatttggtgggcagggggctagggaatggatgctgctgattgactgggaatgaaatcaaaagggtgtgtggaaaacggtcctcaagcactgagtctgcctctgggtggggccacagaaaccaattgagtcctgagtagcaggttggggtgggttcactctgaaaaacatctcaaaaagccattcttaggtcctgcaatactgatattatctataggtgcaattcgggaagttgcaaattttgtgacctctggccacatgagtcctgagcagtgagggactgtagaaactaggcctgcattttagcagagttcaggccactcccacaatcctaaccttgtggcctttcattagctttacaaaggcaatttcagccccagaagtgggaggtgatagttttaggaagggactattatcatccttgtttcaaggttaaactgtaaattcctcccaaagctcctaaaattagcttggcttatgcccaggaacaactggacagcttggatgtccaaaggaagacggaattaactgtgtgaaatttctctgtcttttttttttgagacagggtctcactctgtcacccaggctggagtgcagtggcgtgatcacagctcactgcagcctcaacctccttggatcaagtaatccttccacctcagccccgcggggtagctgggactacaggctcacaccactgtgcatggctaagttttaaattttttgtagatacagggtctccccatgttgcccaggctgttcttgaattcctgggcccaagtgatccatctcagcctcccaaagtgctgggattacaggtgtgagccactgcacccagcctctatcactgccttaatctttgcaaaggcagtttcaagttgacacttcaaagttgagctcaggcatggtggctcatgcctgtaatcccagcactttgggaggccgaggcaggcggatcacttgaggtcaggagtttgacaccagcctggccaacatgctgaaaccccatctctactaagaatacaaaaattagccaggcatggtggtgtgtgcctgtaatcacagctacttgggaggctgaggtaggagaatcgcttgaacctaggaggtggaggttgcagtgagccgagatcgcaccactggactccagcctgggcgacagagtgagacttcatctcaaaaaaaaaaaaattattatttatagttttcattttgtatagctttttacaaatgcaacaatgaaattctggaagtcttaaccctctagattactcaaattcaagtcagcatctctcagaaaatatctcccctcaacttcagtttaaataaaaggataattttaggttgtcatttgtatagcttttttgttaatgttttacaaacataactggccaggtgtggtggctcacgcctgtaatcccagcactttgggaggctgaggtgggtggatcacctgaggtcaggtgtttgagaccagcctggtcaacatggtgaaaccccatctctactaataatagaaaaatttgctgtgtgtgatagtgggtgcctgtaatcacagctactcaggaggctgaggcaggagaatcacttgaacctgggaggcagaggttgcagtgagccagcaccatgccattgcactccagcctgggcaacaagagcaaaactccatctctaaaatacaaaaaaaaaaaaaatgaaataaaaacataagtgtaatatgtttgaaagaacaaattacggccgggtgtattggctcatgcgtgtaatcccagaactttgggaggccaaggtgggaggattgcctgagctcaggagttcgcaaccggcctggacaacatggtgaaaccccatctctaataaaatacaaaaaattagctgggcatggtggcacgcacctgtagtcccagctactcaggagactgaggcaggagaattgcttgaacctgggaggcagaggctgcagtgagccgagattgcatgactgtagcctgggcaacagggcgagactccgtctcaaaaaaaaaaaaaaaaaagaacaaattataatcacttaattttttttttatcaaatagccaatgtccagttttccccattgtctcatatttttttacagtttgtttaaatcaggatctaaataaggtctagtatgttttaatagtctatattacaattggttcatatgtttcttaagtctctttttctatgaacttacggaagacattgaaaagtctctctttaaaaataaaaacttgttctccctctccctctcctctcttctctcttctctcttcccacagtctccctctgttgccgaggctggactgtactgccgtgatctcggcttgctgcaacctccctgcctcgggctcccatgattctcctgcctcagcctgccgagtgcctgggattgcaggcatgcgccaccacgcctgactggtttttgtatttttggtggagatggggtttcgctgtgttggccgggctggtctccagctcctgaccttgagtgatctgcccgcctcggcctcccgaggtgctgggattgcagacggagtctctctcactcagtgctgcccaggctggagtgcagtggcgtgatctcggctcgctacaacctccacctcccagccgcctgccttagcctcccaaagtgctaagattacagcctctgcccagccgccaccctgtctaggaagtgaggagtgtctctgcccggccacccatcgtctgggatgtgaggagcgcctctgcctggccgccccgtctgggatgtgaggagcgcctctgcccggccgccaccctgtctgggaagtgaggagagcctctgcccggccgccaccctgtctaggaagtgaggagagcctctgcccggctgccaccccgtcttggatgtgaggagcgcctctgcccggccgccccgtctgggaggtgaggggcgcctctgcccggccaccccatctgggagcctttctgcaggtgtacccaacagctccgaggagacagtgaccatcgagaacgggccatgatgacgatggcggttttgtcgaaaaggaaagggggaaatgtggggaaaagaaagagagatcagactgttactgtgtctgtgtagaaagaagcagaccaaggagacaccattttgttctgtactaagaaaaattcttctgccttgggatgctgttaatctatgaccttacccccaaccccgtgctctctgaaacctgtgctgtgtcaactcagggttaaatggattaagggcggtgcaagatgtgctttgttaaacagatgcttgaaggcagcatgctcgttaagagtcatcaccactccctaatctcaagtacccagggacacaaacactgtggaagtccgcagggaccgctgcgtaggaaaaccagagacctttgttcaagtgtttatctgctgaccttctctccactattgtcctatgaccctgccacatccccctctctgagaaacacccaggaatgatcgataaatactaaaataaataaataaataaaataaaaacttgattttgacataacttgaggcgtacttagaagtggcagagttcaagctgggcatgatggctcatgcctgtaatcccagcactttgggcagccaaggcaggtggatcatctgaagtcaggggtttgagaccagcctggccagcatggcaaaagcctctctctactaaaaataaaaaaattaggtggacgtggtggtgtgtgcctgtagtcccagctacttgagaggctgaggcaggagaattgcttgaacccgggaggcggaggttgcaatgagctgagatggtgccactgcaccccagcctgggcaacagagtgggactttgtccagaaaaaaaaaaaaaaaaaagttgcagagttcctgatcttaaagttgtcatttttcaaatttgtaggttctatccatatccttctctttgtatatatcattttaaaaatcaggtcatttgcctgtaggatttcccatgttgtcaaaaagagtcaaactgaaaaatattttaagagattctgaaccaaatatgagtgaccaagggccagcgacacagcccttaggagatcctaagaacacgtacccaaggtggttaggctacatacatttttggaagacataagacagtcaatacacgtagatgtacattggtttggttcagaaaggtgtggcaacttgaagtgggggggcttccaggtcataggtagattcaaagattttctatctggcaattggttgaaaaggttaagttactgtctaaagacctagaatcaacagaagggagtttttaggttaagataagggtttgtggagaccaagatttccattaagcagaggaagtctccaggtagcaggcttcagagagaatagattgtaagtgcttcttatcagagttctccctgaagcaggaaaaagacctggaaaggaacggggattcgctacagaatgtagattttcttcacaagggacagctttgcagggctatttcaaaataagtcgaagaaatttaatgtggggtaaagtacttccatttcttccaaggcttcctatctgtcatgtagtcctataccagagtcaggctggaatttggcgtcattgctacagagtctactttgtcaacttcaagatctgtttttgttttgttttgttattttttattgagatggagtctcactctgttgcccaggctggagagcagtggcacgatctcggctcactgcaagctctgcctcccgggttcacgccattctcctgcctcagcctcccgagtagctgggactatgagcacccgccaccacgcccagctaatttttttgtgtttttagtagagatgaggtttcactgtgttagccaggatggtctcaatctcctgacctcgtgatctgcccaccttggcctcccaaagtgctgggattacaggcgtgagccaccgcacctggccacctcaagatctgttttaatgtgaatgctggtcagctgtgtgcctgaattccaaaagggaggagggagtgaggtatgtctgtctcccccttcccatcactgcctgagctagtttttcaggataacttgggaatgctcttggccaagcggaagggtccattcagatggttgaggtttcgaattgctgactgtatccttgtagaatcctttagtacagtcttgtcttccacatttccagtaattcactctagaagcttgttcacattcaggttaaattttttctggcaagactacttcatagtgttgtgtacttctgatatctaactgacctttttgcgatgttaattagcagtcattgatgacattgcctaggtccgttaattcatagggtgatgttttaatcctactgtttcttcttcatttattagcgggaaaacttctataatgagaaattcttctcatgcagtatttggttactctgctgtaaatttcataaaggcaggacaaatgcttgatgctttccttttattaaccaggccacaaactggggtgagcttaccagcatcctccaaaggtgaacagagttaaaaaatacattattatgaattacagactggagcatctgaggattttaaattcactcgaattcctgttcttattcatgctcaaatcttcttttttggcaatgagaaccgcttcagtttcgcttctatgttagcaagacgttcatagtccttggtaagttctttgctgtcggatacgtttccccgcacgtttctttttttcaagaaaactggcttctttagcaggaaccacccgcctcctcctgcggctccgcccggatcccggaaatccgctcggctccgccccatccaggaaatgcttgcggccccgccccaatcccgtaagcgcgcgcggccccgcccccaatcccggaagcgcgcgcggccccgcccccgaaagtcggctcggctccgctccaatcccggaagtgcgcgcggccccgcccccgccggttcgcgtctctctgctgcggcgcggggaccgctgtgctctcggtaggcggctgggctgggtgggctccgcacttccttcccgctccgtgccgcgcgtcccggcacccttaggcccactccgggaggggtctgcgtcctgggcccgcctgccggctgttccgtgtcccgccgtgcccgtcgcgggcggcctcgcgcctgttccgctgcaggttggccccggcggcgggagcgcccccgatccggacaaagaaacgagcgctcggtgcgactagcggcgcgggcggctttgccagcgcgcgtgtgcttgtgtccgcgagtgtgcgtgtgtgtgtgcatttggatgtggaatgccgggtgtttcgggagcaatgaggcaactgaggcccgggagggagcccagtcatataccagcatctaggattggtttgtgtgatttgaacccactattttttatttttttgagacacggtctcactctgtcacccaggctggagtccagtggcacgatttctgctcactgcagcctccacctcccggcctcaggtgatcctcccagctcagcctcctgaataactaggaccacaggcgtacaccaccacaccgggctgttttatgtattttctgtggagacggggtttcgccacgttgccctggctggtcttgaactccgtgactcaaacaatccgcacgcctcgtcctcccaaagtgctgagattacaggcctgagccaccgcgcccagcctgaaccccctacttaatgtcagaaatttgatttgacttcacagggaaagccctgagaaactaccagaacggggtccctggggccagtgttgggagcgtacggtgaagtggcagggctgctgcgcccgtgcggaactccgctgtggaagattagcccctttggtgactcgtcggttctggccgctttgggaccctctactgtgcagtctgaactttcagcaggtggaggagggcagagagagagctgagatcgttggtccatgccagtgcgagagccagtacggccggaagccatgatgggactttcagttcctttcttggtggaggccagcacaggggagagggggtgcccacagatgctagaagcttaaaggctgctgggggctagcggcctcaggacataaggtttccagacaggacggggcaggtggtgatgcagctgtagctcgtgagtctgagcgggaaacagcccccgcgcagtcggtgtcgctgtgaacggaaaagggccttccttacacaggaaacggggtctctgggggatccagtgacgtgcccaaccacagagaccaggtgagactggctgatggtgtctggggctgcaggtgacttagttgggggacctgctcttggcctccagactgggcctgatggcgtgggcgcctgcctgtgtgcaggcccaagggctcagctgcctctgtctgttcccagacccctcctcctgtagagagtggtgctgccctctcgggatgtacctgcaggtggagacccgcaccagctcccgcctccatctgaagagggctccaggcatccggtcctggtccctgctggttggtaaggctctccacgtccctccccagaaccccagaaccggaagcctgactttcaaaaaggatgaaaatgaaacaaaatattttctcttttttctattaccttgaaatctaatggctattttgtttctttgtatccattcaaattctatctggtgtacttggttttacagataatgcatgtctgttttgtccccttttaatcactaacacccagcgtatttaatatactctatgagcttttctgaggtcaccatattttcctttgtacttgttttgaaccacgtgatgggtgatcgtgggttcccatgtctcctcctccctggtcctcagacctcttcgtaggactcacagtccactaaccacgtgatgggtgatcgtgggttcccatgtctcctcctccctggtcctcagacctcttcgtaggactcacagtccactaaccacgtgatgggtgatcgtgggttcccatgtctcctcctccctggtcctcagacctcttcgtaggactcacagtccactaaccacgtgatgggtgatcgtgggttcccatgtctcctcctccctggtcctcagactcttcgtaggactcacagtccacttagcctcccgtcctccatcgctacccaccagtagggtcctgtacccttggggacagctgcacttgtgttgacgggacaccgtgtgaggagtggtgctggctgtacctcagcagctggggcccaccttttttgtgacacgccacagcctcctgtgtgttttgcatgacacgctgtgttgtaatttctttgtgcacagtcttcaggcctcaccacgtgctactggagtaacacccgtgtcagttatggagcctcacacagcagatgtgtctagtaaatactgtgaatagcgtatactgtgttttgcttttgttttctttagtaatgaggtctcgttatgttgcccaggctggtctcaaactcctgagctcaagcgctcttccttcctcggcctcccaggtagctgggattacaagtgtgtgatactacgcccagctatactgcattattgaaccagcttcctggctgtttcccctactctgaacctggtggtctgtaacccctgaccacagctgttcctacagtgggaagggcctgctcatcaggggctgtggctcctggtcccgctgcaccagggaggtggggtcttaccgggatcaataggcaggcagtcactttctcttcataggaatcttgtcgattggcctggctgctgcctactacagcggaggtaaagcaccccccgccccacccccccatgactgtctcagctgtttggaaaacagagaaaagaaggaaaaactgtcatttgtgactgtccatggggcggcctttaggatcggcacctctgccccttgattgctggcgggcaccgcgccctccatgcgctgctgttcttccgcacgcccatcctgcccagcgctcagcccacatttcacttcttttttttttttttttgagacggagtctcgctctgtcacccaggctggagtgcagtggcgggatctcggctcactgcaagctccgcctcccgggttcacgccattctcctgcctcagcctcccaagtagctgggactacaggcgcccgccactacgcccggctaattttttgtatttttagtagagacggggtttcaccgttttagccgggatggtctcgatctcctgacctcgtgatccgcccgcctcggcctcccaaagtgctgggattacaggcgtgagccaccgcgcccggccacatttcacttcttaagtcttctgtgtttttgggtcatcaaatattcccggagagatgctcttgaggatctaagatccagctgtgggatgaggtgtacttcccaccctgccacaatcactgggcctgcccagacgggcagaggccctgtgcgccccacctgcctctctcacgtggactctgggggtcagagctgggtggggtgtgccgcgtgtgggtcctgagtggccagggcagggtcagcagcacaggaagctgcccagggggtccttgcaagcgtgggctctggccagcgtctgggggaggctgtgctaggcggggcctcccgtgggcatgtccctggagctcacaggctggcgccctatgcccatctccagatagcctgggctggaagctcttctacgtcacaggctgcctgtttgtggctgtgcagaacttggaggactgggaggtaaggccggctcgggtgcgggacagagtccagggctgttcagctcctgggttttttgcaatgggaatgaaaggaggaggaagggccctgggtggcctagcgcctccccgtcctgaagcgttggtccctgcttggaggtctccgttcatcaggacatggcccctgcactcatatgggaccgttcttggccaaggaattccccgaaggcatttttctcttagaagctctccatgactatcttcaccaaagtgctttcttcccagagttgccacaatgggatgcgagtcagctttccccgtggccggccctcccacctcggagcccctcatgagtcctttcagcctggcccagtgctgccctctgacctccatgccctcgtttgctggttccactgcctccctgcacttgttttgcctgcagggtggagcaagcgcctgctgcacctgcccacctctccatttcccaacaggagtcgggttggctgccgatatccggctctgacagagcagcacctgtggcttcaggggtttgggttctgactgggagggtccccagccccccttcttgagtgtccaccctggtgagggtgggggtgaggccccagcggccacggggcccccgttcctggaggttcatggtggtcagtgcatgtcggtttccaggaagccatcttcgacaagagcacagggaaggttgttttgaagacgttcagcctctacaagaagctgctgactcttttcagagctggccacgaccagggtgagtcgtggggagcgtggggacatgggacacggccacagaggcggcgcacttgggcgtctgggtgactcacggggcctagaggggggcctggaagtgcctttggtccaagctcacctgcttggtgaccagggttgtgtcctgcccgctggaagcaggatcccacggatacgccccacctgctcacctgctcagcagggtcctagagcctcctgggttctttagaggtttggcccctggggagagtgggaggagcaggggtctgaggagcaggggtctggcagagcaggggtctgaggagcaggggtctggcccacccgggctcgggcagcctctgtttagctgcattctcctgtctgcctggcagccacttgtccgcaggtgcagtctggccccagcggcaggtcacaggacggggcagggagagccatggcagcccgtgggcgttctggagtggggccacctggcttcttgcgggccttggcgctgctccagctttcctgtgggttctactgggcctgcagtaggggctggatggtccgaggaactccccacccttgagcctgggcactggcccagctgtggtcagtaccagtttcctgtagatgctgccgcacagacagagagaggccccggggtccggccgcccatgcatagccccagaggggacagattctggcgaccagagttgctgggcagtcttgggtttagtgccgcaatgctgcacttctgacaggctgcttcctggatccctgcagggacctggccagggcattggccccaggtcacctgtggctttggggagagcagttgcagggctggcctgggctgtgggaggcagctgtgccgttttctgacagccattgggaccgccccagtacccgaagaggtggctgccctgagttgccacgggaaactgcagggtggccctggctcagcagccaaccttggggagacctggaggaacagtgcagtgtaaagatggcctcgcgctgagcgggtccccgcagtcggcactcccaggagaaccagcgggctgtgcatgtgacccgccagcctgcaccgcgggcacgtccttcccacccagaggaccctgcactgccttcagggccacagcagtcctccggggcccagcctcaggcaggaaacagcaaatgcttttgctgccaaccaagtgtggctgtcgctttcgatgatgccagtggcgctggtgcgactgccgggcagcatgtgtgggcggggatggctcggccactgaccgtctccccgcagtggtggtcctgctccatgatgtccgtgatgtgagcgtggaggaggagaaggtccggtacttcgggaaaggctacatggtggtgctccggcttgcgacgggcttctcccaccccctcacgcagagtgcagtcatgggccaccgcaggtaaggctgtgggactttgatctggctggagctgcagccgtagcaggtcactcccgttcctgactgcccagagctatggggcagctgggagaggagatgagtttgtggacgggacacagaggggcccacgggaagcgtgtgcaggctcaggggcagccccactgtgacggggaggctgggagcaggccaggaagtgctgggtccagtttgggagctccagggtctgcgggaggtaggtggtcgaggaggagactgctgtggggtctcacggtgccctatgccgaggtgacctgaccttcctcccgttgccggcctcgcccagtgatgtggaagccatcgccaagctcatcaccagcttcctggagctgcactgccttgagagccccacagagctgtctcagagcagcgacagtgaggccggtgaccctgcaagccagagctgacagccccactgtgcctgagcccgtgcaccgcccacaggacccatggcacattcccggtgtgcctgagcccgtgcaccgcccacaggacccgtggcacattcccggtgtgcctgagcccgtgcaccgcccacaggacccgtggcacattcccggtgtgcctgagcccgtgcaccgcccacaggacccgtggcacattcccggtgtgcctgagcccgtgcaccgcccacaggacccgtggccttggcttcagttggtgcctccagccgagttggcctattgcctgctcatgctgctgcttgcacactgcatgaaacagcaggccagaccaggacatccagactttctccatcgtgaggcctgggcctgcctttctgcagccggaggtctcgccagccctggactcctgctttgggccacagcaagacctcgggcgagtggagaggcggggccaggccgggcccttgtgggtgctgatgctgcatgttgtccccgacacagcgtcctctccctggtggacatccccagcggtcaggtgcttccccaagggcagtgaggggtgaacatccagggcctacctggctgtgcacgctgcagccacactgtggaagctgcccctccccgaggacccgcctcccttgctgatgccaggatctcggcgcatagaccactctgccccagcggtcgtcacagaaaggtctctctgttcctcacactcagcttcagcataagctgtgaggccagaaaaaaggtcagctcttctagtatcgtgcagtgcttaaaaaccgggagctccagccgggcgcagtggttcatgccagtaatcccagcactttcggaggccgaggtgggaggattgcttgaggccaggagttcaagaccagcctgggcaacacagcaagatcctgtctttgtaaaaaaactaaccaaacaggaaaaactgggagattttctgcagaaattgagttccagcctctctcgaacctgggaagacctggcaggagggggctgggctctcggctacagacttctccccaccccgtaggagctgaacgccaaccatcctgacccgccagtgctcttggtctcctgagtgtacccaggtcctcccaggtgcggtgtgcaccgagcgcgcctggcctgatgccctggcctgtgagctggggactcctgggccctgtgagcccctaggcggcaggcccaggaatggctgggtaggacagggaacacctttgccccacgtctggctgtgacctcggtgaaagccgacaggagagagatgggaccctcctcctcagtagtggctgccagtccctcgttgcaggacagggtcatcataaccataaataacccttcacgtgtcacctgcagcttccactctttatttccaaagaatcagtgtcacacatgcagatcacaaagcgggtctccctgtgctgcttccttctgtgttttctagtctctcccccaggggctgcccagggccctcaggaactgagtgtgggcaagacactgctgggccagagggcacgacgcccacgtgggcccgtattgcccaggccatttggcagtgcagagcccccccagcctccagcaggagccccctggcatgagctctcccctcaggggtcctgagcaacgtccctgccagggctggtgggtggcagcgggggggcagacacctcgctgaggtcctgcagcagagcttgcagccgctgcaggctggggtgcacgttttcctccagccactcctccacggcatccgggtagaaagccagctgcagggcagcctccagctcctgcacgagggtgctccactgtgccaggaggctgcaggtgagggcgccatgaacgcacagtctgcacacttgggacttgccctcagccccatggtcagtactgccctgtgcctcagttcacctgtgaaatggggctactgaccctacctcatcggcatgtcgggaggaacaagtcggtgacagctgcacatctgagaccagagggccttttacaactaggggctcaccctctgctctctagttgagggacatgtcagcaacagcagcagttctcagggaacccatggctgcacggcctataagagcccagggcctcacctgagcgctgcgggctggatgtgctgaaccatgaccgggtggatgagcttccgctggcggtggtaggggctgaaccagccagtgacatacctggggcaaatccacataggggtgtgccgcgggctaccaaggcagccgtggggcggctttgcagtaatacagaaaatgtttaagaatggggttgacatttctaagtcttatgtcccccagaaagtctttgtgaaggatgaggctgcctcctcctgtgcctgggagtggggggacttgtgaacctgcccctcaccagcacctgtccctacccccctcacccacacctgcctcccacccacacctgccccatgccttcccgcttacccacacctgcccctcagccgcacctgccccatgcctgcctgctcacctgcacctgcccctcacccacacctgcacgctcacacctgcctgttcacctgcacctgcctcccacccacacctgcccctcacccgcacctgccccatgcctgcccgctcacctgcacctgcccctcacccgcacctgcctcccacccacacctgccccctcacctgcacccaccccatgcctgcccccctcacccacacctgcccctaacccacacgctcacctgttgccctccagcagcgcatccacagagctgcgcagatggaggctgacttgtgtgacaagggcaaggatgttgctgccagggaaggagccggccccctccctgcggagagccctgctgagaacagctgtctccacgggcgggggaaggggaggggaagaaggggacagggagggctgcagggtgcttgcctaacagggtccgttttttccaggctggaaatcccgagaaggttctccactttcgctttaacatcttcatcaaatcctcctgaaatcacaaatgagcggggcggttggaggggcctctggaggaggggagggggctacattgggacctgcaggcctaggtactggggcagtgggcgggcggcaatggagagccactggccaggcccagccccgcgtgtgccggccccaaggggacctgggggcaaatgggcctgctgcttctctttaaacacgtgaaatacgttccttattttaaaaatcagaaaacagaagtaagactgtgttgccagcagcaacacccggacagcaagtggctcttcctgctgggcgcagcccgacccacacaggtgtccagggctcacgcagagtttgccactgtgttttacacaatcgatggaatattctagagcacccgaaacaaacccatgaggcctgcaggcaccagcgtggacgaatctccgacttggtgttcatggaaatgcttgctgcaagaggctgacggccagagggcaggagggaagtgccccagtcacgggtggcggatggggccgtgggcaagggacactgcaaataccgtcaatattaacacagctctttagtgtggggtacaggggtgtctgtttttatcgtttctgcccctttctaagcagttgagagtcagcaactgagaagtcaatctgatctcattctgcgtcctctcaccggccgcgtccccgtccctgggccgccgcgcctgcgggtcccgctctccgcgcgtctcggccatttttctttctgcatcagcaccacgcagtcgctaatttcccgtgtggcctgcgagtttccacacacacagctcctctggccaagccccctgccgaccccaaggggttccccggtgcctgcccctgcccatgggtcccgctgctccctcaggagacctggaagtgtgagtgctgggtccagggtgcggggccttccagggccgggcgcctgagccccacacctgctcggccaggtgggcaggacgtgtgtgcagcaaaggtggagccgttccccacctccgacctgcgtgcatttctgcggattcactgtgtctgaggggtgcctcccgcgtcactctccagcctgctttgggcttaggcctggagacccagacacaggcccagcctgggtggacttcagggcaggtgggtggctgagctggggcggtgagaccatcctccgactgtgaggaccaccacagtccagcagggtggttggagcactgggtgcttggcctcctgccctccgggtctttcggggaggggccggtggggcttggggtggccagaccagacataccgcgtagaagcaactgcaggcaggcggccagggacgggactcctgcgggcagcagctcgcacagcacagagtagtggtcgtacctgggtccatgagaggggcgctcagctccgcagcccgcccccagcagcctgacgcaggcgccctgacttcggacgtccctgctgttgttccagggccttaggctacatcagcgctgggggcagcccgaccccctcaacccatggggcccagggtttccaagacaggttctgtgcggcagggctctcatgtcaactccgttctagaaaccggacaagtgaagagcgtggggattccttgctgcaatgctctccggagccatgggaattctgggtggaccttgggtgggtggccggtcgttgtccctccccccagcacctctggcctctgagaaaagggctcctgcttctgggggctgcccttgacgcccccctcctagggcctccgggcccctcctgccccaccctctccctcggctgcctcctgtctggctggtgggggtggcagcttttccccaaggccccatgaggagggcgagagatcaggcgtggcaggcagcaggtcaggggcagcatctgtcccaagcgagggctggggggccttggcctggcctgggcttcccactgctgggtagggtgcctccacctgcccgtgcctcagtttcttcagctgtgaggtgggtgacagacgctgccccaggtgtgagcacaggcgaaggctgggcaatgcctgacgccacagccccaggctcgcctgaaggatgcgccgctgctctgggggaggaggagcctcgccccgctctatggacgatcctggtttatgcagacagagctgtatcccaacaggacagtgggaactatctagaagcttctgcagagccgctgccagctccggacatgcatggtggctgtgagctgcccctctagcaggctggcccaccaggctctgcggtccccaccatgaaattcttgactccatctcaatctgagctttgtgggtgagggcacggggcccctggtgggtctggcctccagccgttcgcctagcccacatcacctgcgccacctgccccccaaccctctaacttgagacgagacccaaggtcaggacttggccggcgaccaggggtttatcttagctctgcttttcacacagtgtcgtcaggggagcaggggcctgggagcgccagggtgatgccacggaggcccagctccttcatgggactaacaaggcccattcttgccaggcaggacccacagtcacaggatttttacagctgaggaagtgcttagatacctgcaggggccactcctacaacagccgacagtcctggcatccccacacccacgacagcatgtgccttctaggtcaccagagttaggcttccataggctacacactgaaatgtccaggacagttttctttaaatcatagagtaatacattttttttttttgagacagagttttgctctgtcgcccaggctggagtgcagcggtgtgatcttggctcactgcaacctccgcctcctgggttcaagtgattctccttgcctcagcctcccgagtagctaggatcataggcgcgtgccaccacgccaggctaatttttgtgtctttagtagagatggggtttcaccacgttggccaggctggtcacgaactctggacctcaggtgatccacccgtctcagcctcccagagtgctgggataacaggcatgagccaccgcactcagcccctagagtaataaattctgtcacactattggcccacccacaggtagcacagcttagtgtttacgtagacaagaccctgatatgagaaaaacggaaaacagagctgggcacgcctatgctggccttccgagggctccacctctgtcactgggcacctttcagtgaccctccctcaccacacttggccttgaattctttcctgtgtgagacccaagaaccttctcgtggggtccgaattgagacggcatttctagcaacagagtgaaatcctgaaagaaccgaaacccctcctcgtgccacaagcaagacacacacacacacacacacacagcctcaggtgcggcgcacacgggtagcatgggggctgggggccacgtgttcgtgaccctgaacacgggagcagcgtccctcagcggccgctctggcgtgcagggcccaaccccacgtggctgtttctgcagctcctcttggaggcccgggctgcttcccctttgaccaacctgggaaggcccttggcggacgctgcacaggccgacgtggtggccaccagagctgccctggaccctctgaggacagactggccaggacttacctctgccagccggtcaggatgatgccctgcagtgagtccgtgggcccgctgcccgccacctgcagccactgcacgtggttcctgaggtggtgctcaacagggggcacggcctggctgggccccgtggcacccttgaaggcactggctgcccacagctgcggaaagccgcaccgccggtacttctgcatgaggaggactgggtgagaaagcaaacaggtgagtggctccaggggaggcggccaacacggccctggacacgcctcccggggctgtacccagagccaacatgggagccgcctgagacagccaggcccgggtctcagtgtaggagactccagagtgtatgcggccggcccaggtcccagtcggggagactccagagtgtacgtggcccctggttcacctgctcactaggaaaacactggtggaacagggagggaggtgaggcaccggtgcacggtggccgtcccgaggcaccatgggctggggtctgctggggctgtgccctggcctctacccgtgcaggctccaggctgggcagttccggctgcagggtcacagggccagggatggccttcccaggcacatggccaggacaacacaccccccacaacttggcactgacccttgccgtgcacatccaggtcggccgtgtagtcccagagcaccggctccaccagctgcggcaccccggacgctgcagacagagaggacgtgaggttggtgagacacctggaccacactctcagcccctcggacccacctgttctcgttttgcttgaaagtgtgagcacagatacctttttaagacagacttggcaccgtgctgggttttgacaatgaatgccacaaccacacacagtgcctttccaagccagcgcccgctggagcgaccatgctcccactgctgctctaccaggccatgagccacaggcacagctggagcacgcggctgaatggaggtcactctaagtcatctatgtggccatgcatgggtggaagctgccaggccggcacggccctaggacaccctggctcccagctctgctatggagctcactgagcctcggggctctgtgtggaaccaggccaggtgtctgagtaccacctcttggcccagaaaggcgctcagcagctcgtcccaaagcctcaggcagagtgagcagggcccaggggctggaggagcagccagcgggaacctcggcccccagtcccagcagggatggccttggaggaggctgctgcgagtgctggacactcccaagccctctgggccaccaggcaggcctgtgctctcctgcccaaacctccacagcttctagggaaacgactcaggcctggcgtcaaggggatgcaggaggtggttgtggcgggtctgtgcggggctggggctcaccctggggcccacttcctacagcaccttctttctttgaagccgcaggtcttgggcagttcagtggcccaccccctcccccagccctgttggccgacctgcgagctggtcctcaggcaggtctcggagcatgtcgtcccacaccaggggtgtcacgctggggcgccgggccttcacgccgctggccaccgcccgcatgtgtgacaggcacaacttccccgtgctgttctgctcttgctgtagccaccggcgcgaggcctccccctctccgaggtaatagacctgcaaggaaggagcaggacggggttgccttggcagccgtgcacaccggtgggagggtccggggttcacgccgtgccctgacggagaggggccgctgcctgtggggaggaggccagggaggggctcggagcctttgcttaccacccccagcgtgtccctgtcttcctcactgagccctgaacttctactcaaggtttcctgtgaatgttcacagcagctcttctcacagccaacaaagcagagaccacaggggtccatcccccatgatggaccagcatagggcagcatcccccaccatgaacacggctcggcttcagcagacagccaagctctggcagctgacagcccggaggagcacaggtcatacactgtgtgactcggtacccgtggaatgcccagacgggcaaatccaccgagataggaagcagaccgtggtcgccggggcctgggggcaggtgcggggcttgccctggggtgattgcccacaccatgaatgtctggaagaggtgctgacgtttatacttatttatttattttggagacagggtcttgctctgttgcccaggctggagtgcagtggcacaatctcaatctcggctcactgcaacctccacctcctgggttcaagtgattctcctgcctcagtctcctgagtagctgggattacaggcgcccaccaccacacctggctaattttgtatttttagtagagacggggtttcaccatgttggccaggctgatcttgaactcctgatctcaggtggtccacctgcctcagcctcccaaagtgctgggatcacaagtgtgagccaccgtgcctggcctatttatttatttacttatttatttagagccggagtctcactctgttgcccaggctggtatgcagtggcgtgatctcagctcactgcaaccttcacctcctgggttcaagcgattctcgtgcctcagcctcctgagtagctgggattacaggcgcccgccatcacgcccggctgatttttgtatatttagtagagacggggtttcaccacattggccaaactggtctcaaacacctgacctcaggtgatccacccactttggtctcccaaagtgctgggattacaggcgtgagccaccacacccagcctatattttaaaatggttagaatggtaaagcttaagtgtattttacatactcaggtttccttcaaaaaaaggaaacttctggggctaaaatgttcagcttgggttccctgtgagccacagccctgcagaacctcccagccccgtgggcaccaaccccgcccctttcagttccacatcctgcccaggccctgactgagttggagtccagtgagtggcaggaggggcaagggtgggggctcactgggttggagggggcacatctctggcaccccctggggaccaccttttccattgggtgcttcagggtccaaatgcagaacttcctctcagcaacaaaagggtgtccctcgagttacaccctgacttatgctcactgctggtcctggggcgtgaacctgcccatcacccacaggcttccgccagcccagccgcccggggtggtctcgtctgacacgagggtgcctccctcgggctctgcaggctgtcccgtgccaggccgcccatccacccggagaagatgttggacgcgtctgacacgagggtgcctccctcgggctccgcaggctgtcccgtgccaggccgcccatccactcggagaagatgttggatggggtgccctgaggggaacaacaagcctgtctctaggcctcagtgcctggaagattttcctatttaaaaggacaagccatgataggggagagtgtcctgcacagagctggggtgacagtacccacctcatcacacccgatgtgcagccgctgggcgcctgggtgtagctccaggacctggtcaatcatggcgcccaccagcgccagggactctgcctcgtgggggttcagggtgcaggggaaggagcccacctcccgcaggtgggcgaaggccgtgtgcttcagcacaaactgcggagagacagagaagttcgcgttgggggcggaggagctggactgatctccttctgcccacctggggcttctgtttcaaatctacagataatacaaaaaaattaggccaggcagagagtctcagtcctgtaatcccagcaccttgtgggggctgaggtgggtagaatgtttgaactcaggaatttgagaccagcctggacaactggtgaaaccccatggaatctcgctttgttgcccaggctggagtgcagtggcacagtctcggctcactgcaacctctgcctcccaggttcaagtgatcctcccgcctcagccttcccagtagctggggattacaggcatgtgccaccacgcctggctaatttttgtatttttagtagagatggcgtttcactatgttggccaggctggtcttgaactcctgaccacaagtgattcgccttccttggcctcccaaagtgctgggattacaggcgtgaaccaccacgcccagactaaaaatatatatatatatagaaattttttttttttttttttttttttttctttttttttttgagatggagtcttgctctgccgcccagtctggagtgcagtggcatgatctcggctcactacaagctctgcctcccaggttcacaccattctcctgcctcagcctcccgagtagctgggactacaggcgcccgccaccacacctggctaatttttgtattttgttttagtagagacagggttccaccgtgttaaccaggatggtctcgatctcctgaccttgtgatctgcccaccttggcctcccaaagtgctgggattacaggcgtgagccactgcacccagccataaattttttaaaaaccaaatcggtttaagaaaaaaaagtggccaggtgtggtggcacctgcctgtggtccagctacttgggaggctgaagcgggaagatcactggagcctaggaagttgaggctgtagtgagccatgatcacaccactgcactccagcctgggcgacaga

SEQ ID NO: 627 - DNA, 2141 bp, Homo sapiens
ctccgtgccgcgcgtcccggcacccttaggcccactccgggaggggtctgcgtcctgggcccgcctgccggctgttccgtgtcccgccgtgcccgtcgcgggcggcctcgcgcctgttccgctgcaggaaacggggtctctgggggatccagtgacgtgcccaaccacagagaccagacccctcctcctgtagagagtggtgctgccctctcgggatgtacctgcaggtggagacccgcaccagctcccgcctccatctgaagagggctccaggcatccggtcctggtccctgctggttggaatcttgtcgattggcctggctgctgcctactacagcggagatagcctgggctggaagctcttctacgtcacaggctgcctgtttgtggctgtgcagaacttggaggactgggaggaagccatcttcgacaagagcacagggaaggttgttttgaagacgttcagcctctacaagaagctgctgactcttttcagagctggccacgaccaggtggtggtcctgctccatgatgtccgtgatgtgagcgtggaggaggagaaggtccggtacttcgggaaaggctacatggtggtgctccggcttgcgacgggcttctcccaccccctcacgcagagtgcagtcatgggccaccgcagtgatgtggaagccatcgccaagctcatcaccagcttcctggagctgcactgccttgagagccccacagagctgtctcagagcagcgacagtgaggccggtgaccctgcaagccagagctgacagccccactgtgcctgagcccgtgcaccgcccacaggacccatggcacattcccggtgtgcctgagcccgtgcaccgcccacaggacccgtggcacattcccggtgtgcctgagcccgtgcaccgcccacaggacccgtggcacattcccggtgtgcctgagcccgtgcaccgcccacaggacccgtggcacattcccggtgtgcctgagcccgtgcaccgcccacaggacccgtggccttggcttcagttggtgcctccagccgagttggcctattgcctgctcatgctgctgcttgcacactgcatgaaacagcaggccagaccaggacatccagactttctccatcgtgaggcctgggcctgcctttctgcagccggaggtctcgccagccctggactcctgctttgggccacagcaagacctcgggcgagtggagaggcggggccaggccgggcccttgtgggtgctgatgctgcatgttgtccccgacacagcgtcctctccctggtggacatccccagcggtcaggtgcttccccaagggcagtgaggggtgaacatccagggcctacctggctgtgcacgctgcagccacactgtggaagctgcccctccccgaggacccgcctcccttgctgatgccaggatctcggcgcatagaccactctgccccagcggtcgtcacagaaaggtctctctgttcctcacactcagcttcagcataagctgtgaggccagaaaaaaggtcagctcttctagtatcgtgcagtgcttaaaaaccgggagctccagccgggcgcagtggttcatgccagtaatcccagcactttcggaggccgaggtgggaggattgcttgaggccaggagttcaagaccagcctgggcaacacagcaagatcctgtctttgtaaaaaaactaaccaaacaggaaaaactgggagattttctgcagaaattgagttccagcctctctcgaacctgggaagacctggcaggagggggctgggctctcggctacagacttctccccaccccgtaggagctgaacgccaaccatcctgacccgccagtgctcttggtctcctgagtgtacccaggtcctcccaggtgcggtgtgcaccgagcgcgcctggcctgatgccctggcctgtgagctggggactcctgggccctgtgagcccctaggcggcaggcccaggaatggctgggtaggacagggaacacctttgccccacgtctggctgtgacctcggtgaaagccgacaggagagagatgggaccctcctcctcagtagtggctgccagtccctcgttgcaggacagggtcatcataaccataaataacccttcacgtgtcac

SEQ ID NO: 628 - protein, 221 aa, Homo sapiens
MWKPSPSSSPASWSCTALRAPQSCLRAATVRPVTLQARADSPTVPEPVHRPQDPWHIPGVPEPVHRPQDPWHIPGVPEPVHRPQDPWHIPGVPEPVHRPQDPWHIPGVPEPVHRPQDPWPWLQLVPPAELAYCLLMLLLAHCMKQQARPGHPDFLHREAWACLSAAGGLDGLLLWATARPRASGEAGPGRALVGADAACCPRHSVLSLVDIPSGQVLPQGQ

SEQ ID NO: 629 - DNA, 1964 bp, Homo sapiens
acccctcctcctgtagagagtggtgctgccctctcgggatgtacctgcaggtggagacccgcaccagctcccgcctccatctgaagagggctccaggcatccggtcctggtccctgctggttggaatcttgtcgattggcctggctgctgcctactacagcggagatagcctgggctggaagctcttctacgtcacaggctgcctgtttgtggctgtgcagaacttggaggactgggaggaagccatcttcgacaagagcacagggaaggttgttttgaagacgttcagcctctacaagaagctgctgactcttttcagagctggccacgaccaggtggtggtcctgctccatgatgtccgtgatgtgagcgtggaggaggagaaggtccggtacttcgggaaaggctacatggtggtgctccggcttgcgacgggcttctcccaccccctcacgcagagtgcagtcatgggccaccgcagtgatgtggaagccatcgccaagctcatcaccagcttcctggagctgcactgccttgagagccccacagagctgtctcagagcagcgacagtgaggccggtgaccctgcaagccagagctgacagccccactgtgcctgagcccgtgcaccgcccacaggacccatggcacattcccggtgtgcctgagcccgtgcaccgcccacaggacccgtggcacattcccggtgtgcctgagcccgtgcaccgcccacaggacccgtggcacattcccggtgtgcctgagcccgtgcaccgcccacaggacccgtggcacattcccggtgtgcctgagcccgtgcaccgcccacaggacccgtggccttggcttcagttggtgcctccagccgagttggcctattgcctgctcatgctgctgcttgcacactgcatgaaacagcaggccagaccaggacatccagactttctccatcgtgaggcctgggcctgcctttctgcagccggaggtctcgccagccctggactcctgctttgggccacagcaagacctcgggcgagtggagaggcggggccaggccgggcccttgtgggtgctgatgctgcatgttgtccccgacacagcgtcctctccctggtggacatccccagcggtcaggtgcttccccaagggcagtgaggggtgaacatccagggcctacctggctgtgcacgctgcagccacactgtggaagctgcccctccccgaggacccgcctcccttgctgatgccaggatctcggcgcatagaccactctgccccagcggtcgtcacagaaaggtctctctgttcctcacactcagcttcagcataagctgtgaggccagaaaaaaggtcagctcttctagtatcgtgcagtgcttaaaaaccgggagctccagccgggcgcagtggttcatgccagtaatcccagcactttcggaggccgaggtgggaggattgcttgaggccaggagttcaagaccagcctgggcaacacagcaagatcctgtctttgtaaaaaaactaaccaaacaggaaaaactgggagattttctgcagaaattgagttccagcctctctcgaacctgggaagacctggcaggagggggctgggctctcggctacagacttctccccaccccgtaggagctgaacgccaaccatcctgacccgccagtgctcttggtctcctgagtgtacccaggtcctcccaggtgcggtgtgcaccgagcgcgcctggcctgatgccctggcctgtgagctggggactcctgggccctgtgagcccctaggcggcaggcccaggaatggctgggtaggacagggaacacctttgccccacgtctggctgtgacctcggtgaaagccgacaggagagagatgggaccctcctcctcagtagtggctgccagtccctcgttgcaggacagggtcatcataaccataaataacccttcacgtgtcac

SEQ ID NO: 630 - protein, 221 aa, Homo sapiens; identical to SEQ ID NO: 628

SEQ ID NO: 631 - DNA, 1986 bp, Homo sapiens
ctccgtgccgcgcgtcccggcacccttaggcccactccgggaggggtctgcgtcctgggcccgcctgccggctgttccgtgtcccgccgtgcccgtcgcgggcggcctcgcgcctgttccgctgcaggaaacggggtctctgggggatccagtgacgtgcccaaccacagagaccagacccctcctcctgtagagagtggtgctgccctctcgggatgtacctgcaggtggagacccgcaccagctcccgcctccatctgaagagggctccaggcatccggtcctggtccctgctggttggaatcttgtcgattggcctggctgctgcctactacagcggagatagcctgggctggaagctcttctacgtcacaggctgcctgtttgtggctgtgcagaacttggaggactgggaggaagccatcttcgacaagagcacagggaaggttgttttgaagacgttcagcctctacaagaagctgctgactcttttcagagctggccacgaccaggtggtggtcctgctccatgatgtccgtgatgtgagcgtggaggaggagaaggtccggtacttcgggaaaggctacatggtggtgctccggcttgcgacgggcttctcccaccccctcacgcagagtgcagtcatgggccaccgcagtgatgtggaagccatcgccaagctcatcaccagcttcctggagctgcactgccttgagagccccacagagctgtctcagagcagcgacagtgaggccggtgaccctgcaagccagagctgacagccccactgtgcctgagcccgtgcaccgcccacaggacccatggcacattcccggtgtgcctgagcccgtgcaccgcccacaggacccgtggcacattcccggtgtgcctgagcccgtgcaccgcccacaggacccgtggcacattcccggtgtgcctgagcccgtgcaccgcccacaggacccgtggccttggcttcagttggtgcctccagccgagttggcctatccagactttctccatcgtgaggcctgggcctgcctttctgcagccggaggtctcgccagccctggactcctgctttgggccacagcaagacctcgggcgagtggagaggcggggccaggccgggcccttgtgggtgctgatgctgcatgttgtccccgacacagcgtcctctccctggtggacatccccagcggtcaggtgcttccccaagggcagtgaggggtgaacatccagggcctacctggctgtgcacgctgcagccacactgtggaagctgcccctccccgaggacccgcctcccttgctgatgccaggatctcggcgcatagaccactctgccccagcggtcgtcacagaaaggtctctctgttcctcacactcagcttcagcataagctgtgaggccagaaaaaaggtcagctcttctagtatcgtgcagtgcttaaaaaccgggagctccagccgggcgcagtggttcatgccagtaatcccagcactttcggaggccgaggtgggaggattgcttgaggccaggagttcaagaccagcctgggcaacacagcaagatcctgtctttgtaaaaaaactaaccaaacaggaaaaactgggagattttctgcagaaattgagttccagcctctctcgaacctgggaagacctggcaggagggggctgggctctcggctacagacttctccccaccccgtaggagctgaacgccaaccatcctgacccgccagtgctcttggtctcctgagtgtacccaggtcctcccaggtgcggtgtgcaccgagcgcgcctggcctgatgccctggcctgtgagctggggactcctgggccctgtgagcccctaggcggcaggcccaggaatggctgggtaggacagggaacacctttgccccacgtctggctgtgacctcggtgaaagccgacaggagagagatgggaccctcctcctcagtagtggctgccagtccc

SEQ ID NO: 632 - protein, 186 aa, Homo sapiens
MWKPSPSSSPASWSCTALRAPQSCLRAATVRPVTLQARADSPTVPEPVHRPQDPWHIPGVPEPVHRPQDPWHIPGVPEPVHRPQDPWHIPGVPEPVHRPQDPWPWLQLVPPAELAYPDFLHREAWACLSAAGGLDGLLLWATARPRASGEAGPGRALVGADAACCPRHSVLSLVDIPSGQVLPQGQ

SEQ ID NO: 633 - DNA, 20266 bp, Mus musculus
catacccatacatatacataccttttaaaaagcaaagtgctttgtgaaactgagtcatctgctaaattagctatgtgtcttaaggtggcttttgttgttgttttacatcttctgcgcagattttgagttgtctgaggtgggaaggcacgtcagtccctatcatgctctacgttggggcacagtctctcttccaccccagctagcccttctgaataagtgctgaaagcagtgcttattccttcttggctctgcacttccagcaaatccttccctatgaaaaacagtcatggcacgtttagctagtccagcatcaggctgtccacactctgttactggcctaaaggtatgctcaccagaccaggacctagaactttcagggtggagatggccccgaacaccatgactacacaatacagagtgacaatctttagtttaagaaacaggcatgatggggttagaagactcagattcaagtcttgtcccaagtctttgtactcctgtggcattagccacaaactcaactgtgtcaggtgtggtggtgcatggcttggatcctagctctcttggatctctaagtgggagcccagtctggtctccatagtcagactctgtcttaaaacaacaacaacaacaacaaaaaccactaatgactcctgagccctgcttactcactctgggcatactgttgtatctcacagaagcagaaattacatactggatgagaaagtacttggtaggttgtgaggaactacacaaagatacgtggtaaggaagactggttccaatatgcccaacagtccccctgcattctaacactccatcctccaaatctctaagctggtacaacacattaaaagctaataaaaatatccttcaagtataatgttaaatacttcatgttgggcatggtgacacatgcctttaatcccagcattcaggaggcaaaggtaagcagatctctgtgagttctaggctggcctgctctacaaagcaagttccaggacaccgaggctgttatatagagaaaacctgtctcaaaaacaccaaaaccaagcaaccaaccaaccaaacaaacaaacaaaaaacaacaacaaaaaacttccatatgcatatagtgtaaatgaaacattcatttataaatgtgactcaacgtaactttagaagttcatcaccaatctagtttgcaaatttcttaatccaagactgtgctcttaaagcctgtttctattcttggaattcagccattgagtgagtgataccgatgcactgtttaggagtcaggccacataccacccagaaacttcaattttgagaacataatcaagttcgtgaatggcacattacttacatctgtgacattgtggcaggaagtacagtaatatttgccttcatcggtaaggccccaggagacagcagcacactgagaacagcggtctctgaacgctttctgtggaagatagaaatctgttattgtcaggccaacacactgcaccatggttctgagctctacttccagtgttcctggcaatttcatccccccaaattaaaaaacaatcaaactaaaaatacacagacagtatctataaataaggagaattttgtctctctctcttttttaagatttgtttattattataaataagtacactgttgctgtcttcagatgcaccagaagagggcgtcagatatcattacgggtggttgtgagtcaccatgtggttactgggaattgaactcaggacttttggaagagcagtcagtgctcttacccgctgagcccatcttgccagcctgagtctcgtctctttagtagcatgaaatgcagtaaccattccataaaactactgaaatatacagagtgagaacaagaaagaaaggtggacagggctagattggaaacaaagatataggtaaactctctgggagagctgagggagaaaaggatgacccaacgtatggatgatcaaagcaaacaaagattgaaaacactgttgactttttctttggggcactgaggcagatgtgtcgagttttgatttattcatccaaccatataaagggtatcaactgtatgagtactaaacgtttaactgggtgcttaggggttctactggaagcaaaaggagcatatggtccacttatggtctatatggattataattttaggtttatcaatgtattatctagacattattacatttgtcatggatacagatagtatctactgtctaccttgagtccctctatcattattctgtcagtgcacacacagagaactggttcctaattctttggtgtttgacttatgggtcagctactgaatacacccatcatgttcacagtgcagcagcttcctaaccactcttacagtgaggtgtgggcacgtgtgctggatagttttgtgtcagcttgacacaaactgaagatatctgagatgagggaagctcaattaagaaaaatacctccataccatcaggtggcaggtaggccagtaaggcactttcttaatcagtgattgatgagggagggttcatcccattgtgggtggtgtcacctctgggctggtagctctaggttttacagaacctggtaagctgaccaaatcatgaggagtaagccagtaagcagcacccctccatggcctctgcatcagttcctgcctccaagttcctgccctgttctttagatgatgaacaatcatatagaagtgttagcccttttctccccaacttgctcttttggtcatggtgtttcatcgcagcaatagaaaccctaagatagcaagcacattagaacgtcctcggcaagggtctggtatctgtaccctagacaggctgacagggattacttggaggcaacccaagttccaggtcctgctcttcctcacgcgcaaccagcatcaaagggagctttgctggatggtctcctccaaggagccacgggggtggccaacccacaagcccacagtttcatcctctttctggcccacggtccctctgaacaaacactccacccaatcccacccgcaacctcccagagcggacaagcagccaggttccggggcccaagtggccaccgccccctcgctccgccccctatgcgggtcaccgccccgagccgacgcctgccccgggcgctgctcctcctcctcctggctgtccctggctttttgagttagggaacgcgagtgggagctgcacgcgttcctctaggtccttaccacctcctccacattcatcgcggctccgctgcagacaccgttacccaaacagtaagcgccacttccgggagagacggggagagcgctccggtcggaaacacagcctctgcctttgcgttccaggagtcttctgtgctgcccttgtgggactcaagacccaggcttctggcaggcagtacaggaccaggaccaggccccagtgacagagctcaggcctacgaggattttctgtggttttgtttttgtggctctggctttcccggaactcagctcagactacactggccttgaaccccacctgcctctgcttcctgagagctgggattaaaggcgtgtgccatgacttccggcttctgggttttacaaaatgtgttctcagtgtttgaacacaggttgttgaactagaactgggtgtctatttgaatttttttttttaacttcccagatcctaggaaccaaaccctcctattgcatgctcgccaagaactccacaccactgaacatccccagaccaagatttctaatcataactatttctttcttgtaccttcacctcctcctgtttaaaaagtatatgtttgcctatgaatataattatgtctcgtttaataaattcttaatacatttatctcttgttccctcattgaacacactaatcccctgcttcattccataaactaaagttgttttagattttcctgtgaacaaaataagtctccacctttgtgaacatttatatctgtttatttagttgtttttgcttatttgtttccagacagggtttgtctgagtagtcctgtctgtgttggaactcactttgtagatcaggctggccttgaattcagagacatgtgtttgcctttgcctcctgagtgctgggattaaaggcctgtgccaccagagcctgacatttgttttagatactaaaaattctttccaggggcagtagagaagagctgagatggatttcagatgataaggtccccagcagggtaggctgggatatgtcaaggatcctgcagcactctggagaacaaaggaaactcttgatattatagatgttagagggaaaggatctccaagcccagaggagagagggtctctgcaatttgcaaattaatgaaggtactaaaaataaagggtcataatttagaaagctaaacctattttgcctcctcccaccttgggactactacgtgctaggagtttagtagtttacagaggtactaaataaagtgaggctaattgactttaatatcaatactatggtaggaagagacaaaaataagaaaatcatgggtttggagagatggttcagcagctaagagagcactggcatctcttgtaagatttcagtttgattcccagcacccacatggcagctcacaactgtctgtactctagttcctggggatcaggtgccattatctactgacgtgggtaccaggcacagacatggtgtacacatacatgcaggcaaaacatttacacacataaaataaaaatgaaatagggaagaataaggaagacatgttaaatgcagtgagaggggtggtctggaaaggtctcactgaagaaggatctttaatgcagatacacattttttgtttgagaatctgttttatgaaaaaccctaagccagtacatttaaattttctttccaaacagggttgctccgtgtagtccgggctgtactggaactcaacctgtagaccaggctgaactcagagatctgcctgcttctgcctcccaaatgattacaggcttgtgccaccactgtctgcctacatttgaatgtttcaaaggaagctactttttttctttaagaaaacaacattagccaggcggtggtggcgcacacctttaatcgcagcacttgggaggcagaggcaggcagatttctgagttcgaggtcagcctggtctacaaagtgagttccaggacagccaggctacacagagaaaccctgtctcaaaaaaaaaaaaaaacccagaaaagaaaaaagaaaacaacattatttaaaaatatacaagaagaaatagaaaaatctgaataatctgatagctacttcagaaattgtcttagggctgtgacgtcactcagtggcagtgtgcttgcctatcatgtggaagaccatgagctcaagctctgagactggaaataaatgaataatagaaacatcagcaagacaaagaaaagacaaaaagtgttgacactcctctgctcaggaacggacttacagaaccagaattctatatgaatcaataatgaacagttaaaaatgggcaagagacaagacagtagagtatggtagtgctgcaggtcttttttttttttttttaaagtttttttaattaggtattttcttcatttacatttccaatgctatcccaaaagtgcccccatacctccccctccgcatcctgcttcttggccctggcgttcccctgcactgaggcatataaagtttgcaagtccaatgggcctctctttccaatggtggctgactaggccatcttctgatacatatgcagctagaaacaggagctctgggggacaataatagtgggagacttcaacacactactttcatcaatgaacaaatcatagaaacagaaactaaacagggacacagtgaaactaacagaagttatgaaacaaatggatttaacagatatctacagaacattttatcctaaaacaaaaggtaatgctgcagctcttaatcacagctcctctggaggttggggcaggaggatcataagttcaaggccagcctgggcaacttagcaaaatcaaagtaaaaacagagctacagagggtagatgtagctcagttggtggatcatttcccaagcaagcacaaagccttccatttagtccccatctctgtgtaaaacaagatatgatgccatacatacatacatacatacatacatacatacatacatacatacttgaaatcacagcactcaggaggctgaggcaggaggatcatgagtttgagggttacctaggctacataatgacaccttgcctcaaaaaaggagaacaaaatgcacatggggaagagcagtgatggagagagaggggtaagttctggatataagcaaaaggcaaacctggtaggttgggtgagagaagagttaagatggtctggacctgtcagcatctgacctgctgtgagaagatggttagcctttactgaggcagaaagtcttcagcatccacacacagtacagtggaggagaaagcaggatttcgtttgggtgtatgtcttagtggttcttgtcccatgttcatgtggggactctgaataccacgctgagtaggtgagttggatattcaggggaagaggcaccaccgtgggtatgaatttgaggataaagactggaggagatcactagggtaggggtaatcagacaggaaaaggtctgagagagaatgtccttgatgcagaaggaaaaccagcagcatgagtatcctgaaagccagcagtgtccctgaggaagagccaccaccctcagcagatgctcttgagacctgcagtcaggggaagatgggatctccttcccatctactggatgacggatggatctagccacaagggtcagtagggagtaaagtaatgtgctggctaatctccattggcagcttgactggattgagaaatggttgggagaccagtgagacacatgtcttcgaatgtctgtttccagagatgactaacatgtgtgatagcaacggagtgaggaaagaccctcatgaatgtaggcagctccatcttaataagctagggacctggagggatctgaagtgggaggagggagctcccagctcccacaaactccatcatccttctctgcaaatccttcttgctgctgtcattaccaaaggacatcagaccccgtctgcttcaacttttcaacatgattcataccagcaggcctttagggagcctgcaggcttttaaccttacacttgggctgcatctttgagccccttgttctgaagcttccagcttcttagatacagaagccatgaggttatcagggtcctgatgtgcagacaaccattgctgaatcacccagcttccaatgagcactaagggtgcccaaccttctgacactgcagcttgacactgtcatctacaaagtttacactcaagagctgaacaatcaagttaccagaaaaaaaaatccacaactataagctgattcaatacatcctgtattaggcctccaccattgtgggctgtacacctgacaaactttctcaccttatatttctataagacttccacaaccaaactatttctgatggagagacagaagcaaaactggtctcattctctaattgactagaatgaaaactcaaaacaaaatcagggctaactccaagacaagacactggagtagagctacacttactctcaggattcatgtacacggctgtccgtgctgaatcacgatcatccatcctagcaaatggctgccaaagtactcatgtctggagacatgagcatgcttaagtgcaggaacaaactggctagattagtaataaatccgtagaactttttgaactgctaaaacacacacacacatcctcataatgttttaaataagctcacaattttttgttgagcttcatccatacgaatttgtgtgagctacatttgacccacagaccatgaattgtacatgcctgtaagctgattcaacacatctcctatcatatgtctgtgtgtgtgttgtattctatcagtgtgtgtgtgtgtgtgtgtgtgtgtgtgtgtgtgtgtgtgttgtattctatcagttctgttgctctagaaaaacctgagtactgaaaccagcttcagtggagagttggggatgaaagtctttaagaatgtgttttaggagcggaagagggaagtgagtcggaccaggctaggctcgctaaaggagaggcaccgcagaggggcaggcccccgtcgcgtcgcgatccgggatgccgaagaacacggtgtcgtcggcccgcttccggaaggtggacgtggacgaatatgaggagaacaagttcgtggacgaggaggacggcggcgatggccaggccgggcccgacgagggcgaggtggactcgtgcctaccgcaaggaaacatgacagctgctctgaaatcccccccaccccccactattaacacaaagagccaggcagtgaaggaccgtgctggcagctacgtcttgaaggtgcttatctcttttaaagctaatgatattgaaaaggcagttcagtctctggacaagaacggtgtggacctcctaatgaagtgtatttataaaggctctgagagcccatctgacaacagcagtgatgtgttgctgcagtggcatgaaaaggcacttgctgagggaggagtggggtccatcgttcgcgttttgactgcaaggaaaaccgtgcagtccagctggaactggacaccactggacaccgttcacaggagtgggagttgctggtacaaagaccaaaacaaccaaatggcaccgctgccctgtgggtagcatctgtctctctcagctttgccttcttgctttcgttttcatatctgtaaagaagaaaattacatatcagtttcctttaatgaaaattgaaataatgcggagaaaattttgtctcagtggaggtgtttgattctttcataatcatgtcaataatatgtatcccattctgtaatttatattcaagcttgattgtgcagtttctaactctgttgactggtttaagggttttactttatttttaaccaatactgagaaatgtgatcaaagttgaggccagtttcctaactcattgctggtcaggaagtgatctttatttttaaaaatgagagactggcagctattaacattgcaaaactggaccacacttcccttatttaagcaaaatgtgtttccagagcaagtagtgggtgagccccactaccagtttccagctttctttccgcttgcctccagatgatgctataagtgtaagtgtgctacttcctgttagcatccaattttcatggcctctcaatctctttgtggtgacccagggtccggagcaaggagtcttgctctatataaatgtatttacacaatataagcgcctctttggcacaaacatcccatttccttctggtaataaggctgcctggggaaacagtcccaagtcagacacaggcctccagcagcctctggatgaaatactttcatcagaaataaagtagctgccttagccattacacaggtgttcactggaacatttcctatgatttcccgaggacgtcttcagtgctcttcaggtaatggggatctcagaagatttggttctgatccaaagacacagtctgtgtttcagctcagtgttttttgttttgttttcaagacagggtttctctgtatagccctggctgtcctggaactcactctgtagaccaggctggccttgaacttagaaattcgcctgcctctgcctcccaaagtgctgggattaaaggcatgcaccaccacgcccggctagctcagtgttttttaagaaagaaaaatgccacatagtaaaagaaaaaaagtgtttacttctttggacaaaccaaactgattctcaaaaaatgactggtgcttgtaaaaagttattacaaagtagttccgaaaccaaccacctgaatgtgcgtggccaaggggtaatcagcctgcttgtctttccctaaaatgccaactccagagtcactgactgaggtgagaaccagcacagaaactctataaactgctgtttttgatacctgcttttttttttttttttcttggtttttcgagacagggtttctctgcatagccctggatgttctggaactcactttgtagaccaggctggcctcgaactcagaaatctgcttgcctctgcctcccaagtgctgggattaaaggtgtgcgccaccacgcctggctgatacctgatttttttgttttgttttgttttgttttgtaaaattatgataaacttcagaaaataaaatgtcagtgttgaataaaaaaaaaaagaatgtgttttaaaaacacaatcccacacattgttctctgactggcacacacatgtcatgacagttatatgtgtgcacacttacacactagatagatatctagatagatatttagatagatagatagatagatagatagatagatagatagatagatatctagatagacagactgactgatgtaattgtgaagatctgctgggggctagagagaccgctcagtggctgagaggctacagtgctcttgcaggaaccctagtttggttcctacatgggggagctcacagtgacactgcccagttccaggggatttttgctgtctcccagcctctgtgagtgtcttcactcacatgcccgtacccacgtacaaatacaaacacataattttcttaagaagaaaaataaaatctataaaactagagaaaaccaattcaaaggagaaaatacttgtaaaaagggagagatcacaggtataaaatgtatgagagaagagagaattgaataagaaatactgcaaacgactatcagcattaagtatgccccgacttctgctgctctctttcctaagtctttcctttgtcccagatggagggattcagtgtttcaaaagtatcctccaggacttattctacttgaagttctaagtcatcccatgcgtacttctcacttagaaagaaagtgggtaactcagctcatctgtgggcctcgcagatctctggattattttggattattttgccttcagcctcccaaagccttctattgggaaaatggagtctttatgtggacattcacaatttcatcaaagatgatggcaatgacccgaatataaatgcatactctgtgtgtataaaataagaagcctgcctgcaacaggatgtgtccctctgccttcaacttccactggtaaatctggctggtgagggagacaggggagtgagtctcacccagagctctgctgacatctcttccagaatgcttttacttttataattaaatcagtaactccttcaatagttacacaaatataaatgtaccacaaaacattgtttttaaattcttcattacatgaaaaaaattatctggggtgggggttgggagtgcctgccatggcacgcccgtgaaggtcgaaggacaactctgtaggagtcagctctcatcttccacactgtggttcctgagatcaaactcaggtcagcaggaccctgagctatctctccaggccccacacatttactgtctggaatatactctccttggtgcatattatcattagatgcttaccacagaaagttttctgcatttcattattgaaactgaatctttaatcaggagtaaaaattaggagcattaatatttttatccacctctttagtaaatcttcaaagagcctatgtgatctaatctaaaagttgtttctttggaattctcatcagtattttctaggtctttccacagcatttgtcatttggcatctcggccatgttttttatgggatgaatgataggagccagtcaagtatgaaatgtcactttgatgagtgtaaatgctgtgaccatgtagcaggatgtgtccttaggatgacagggagcagggcatgaagagaggtttacacagttgtcagtaagacaattctaaagatgggtctggggatggtgagatagctcggtggttaagagcaccgactgctcttctgaaggtcccgagttcaaatcccagcaaccacatggtagctcacaaccatctgtaacaagatctaacgccctcttccggagggtctgaagacagctatagggtactcacatataataaataaataaatcttaaaaaaatgggcccattgagcagaaatggggatggtatgagagcctcataagaataaaggagaagggctggagaaagagctctgtgggtaaagtgattgctatgtaagtatgaagcttgggctcatggcagcacacacttcatccagcactggaggtacaaaaatgaatgaaacctagatgctttctgaccagccagccagtctagtctgaatggggaactctgggttcagtgaaaggccctgtctggcaaaaataaggtagagagcaagagagaaaagactcaacattcatatacacacacacacaaacacacacacactcgcacacatacatgcatacaccccacacacataaacatacacacaaagaataaggggaaaccaagcatagtggtacataaatacaatctagcacatggaaagcagaaaaattacaagtttggggccaacctgagctacacatagcaaacttgaggccagcctggtttcatagtgaaacactaactaaaaagtaaaaaaaattgaagagcaataaagagcaggaaagagaggaggaggagaagaggaagggggaaagaaataaacagattttaggaaaataaaaaggccttgaggcacaacccaggtggagtgtttgagaaactgaagaaaccattgaggcctgaggacagtgggtaagaggcagccttgtgggattagagggatgggcaagaccgaactgctgatgatcttcttggcctgcaggcctgagatttagccaggatttacagtcaacctggttgtttgtttgctaaaggtctttgtgcttggcccccatctcgggttctcagcaaggaagggagggagaaggaactcaccgaggatcagccatgttgtgtaactagtcacggctcccctagatcacacccgctctgggcctgtatgtgcagttagcaactttctccaggctttgtcctagagccagaaaggaacaaggaaagcagaccttcagacacttgggattagttgggatattcagttagacaggtactacttttctacaaggtaagcttcacataaattcatattttgtgctagttgagggtattagatcccttggagctggagttacagagagttgtcatacacacccagaccatacacagacacagacacaggcacaggcacagacacaggcacaggcacaggcacaggcacaggcacaggcacaggcacaggcacaggcacaggcacaggcacaggcacaggcacagacagacacaggcacaggcacagacagacacagacagacacaggcacaggcacaggcacaggcacaggcacaggcacaggcacaggcacaggcacaggcacaggcacagacacagtcacaggcacagacagacacaggcacaggcacaggcacaggcacaggcacaggcacaggcacaggcacagacacagtcacaggcacagacagacacaggcacaggcacaggcacatggcacaggcacaggcacaggcacaggcacaggcacagacacagacacacacacagacagacaccgacaggcacagacagacacagacagagacacagacagagacacagacaccggcacaggcacaggcacaggcacagacacagacagacacacagacacagacagacacagacacagacacagacagacacagacagacacagacacagacagacacagacagacacacacacagacacacacacacacacaccacacacacacacacatacacacaaacacacacacatacacacacaccaatcatggatgctgggaaccaaacttggagcccctggaagagtcacaggcgcaaactactgaaccattgctttaaaccctgatgactctatttttgaggtggcgccagcattggagtggatgcagaggtgagaacggaaaaaacaagaccaaaattggtatgctggggtaaaggtggagtccatcaccatgatggctgtcagcacagatgcagggtgaaaatcaagatctgagtcacactgaacatgtctacaagaggtgatactgaacagcaagttaggaatgggaaagtgcactggcaagccgttctgggccatgtgtggagtacttaaatccataggggaaatgaggacagctaagaaatgagagtagacagcaaacgagagaagggaattgaaggactagggggtagaagatattatattctcagaagtctggccaaacaggatgatccagcaaagatggtagaggaggaggggaagggggaggaggaggagacccaagattatgaagtccagaatcaccaaacgcagaggaatttgagcaaatttggcacaggatttacaagaggagtttaagatgaggagagggatagaaagttttcatagagaggtttggaggcaagataggaggaggaaaagattgattgctggcttcatgcaagtctgggggtggggcaaggagggaagaactgtgtagtacagaagggagccataggtaggggtcaagagatgttgaaaactacacagtgttttgtgcactaaggtaaatgaaatgttagtcctatagaagaggaagatgacatcacgtacttaagtgggtgagagggacagatctgacccctgacgaggccaccttgaggggaggggctgtattatctcaagtgaccaggtcattggaattcagtgaatgtgaccactctgcagcagactggggccccagactacccatgtggccatttgggtcaatgccaccctctacttcctttttatccaggaggctgccaacatcagagagcttgcagctcgggacagcttggctaaacagagtttaggctctgttgagtacaaagggtgccaagtatgtatccaggaatcctggccccaacatgtccctgctagtttatgactgagatgagcttctcaagtccctccactgagtctcactttccctctgcattatgggaatgatacatttaccattgcctcatgagatggcaaggtatagctgggatagtgtctattccagacttgaaggatgggatacaaacatcattgtcattgttgttggtgtactgtataatccctcatttatgctacaaaacattgcagggtgtgcatgttaaggagcgcctccccatgccactcctctctgtgggcttaattttcacaactagcctacttttttcaagataaggaacaagtcctggctccttgcaaaagctttccagtttcatcgctgacataaatgtatctgcttcaagatcaccagttaaaaggaatgtgaagacatattattatcttcaaagctttcttgggaacttattaaatgttaatcacaaagcacagggatatttcagagagcaaacagcagccttgatccttctcatacagagccttcttctcagataccctcaaaattcctgctggagagaagaaagcactgagtatctttccgtaagtagattctccaattgttcaaaggtctgcttttgtggcttggtctgcccactgttggctgaacccctctgtagtttgcataggcttggagaaaaagaagagcgagggaatatttcctaggtatttattttatacatcaaacattagatccattactcagataatctcataactaagctagaatataatcatcgtctgctcacagaaggggaaactgaggcttggaaggtcaatcaggtcacatggcaggcaagaagccagttctttcccagccttcctgctgggggaagtaattgcctccaaatgtctctttagtgaatgagtagcatgaagcaagcctgctggatacaaacccactctgtctaaggacatcaacaggtattaaaggcatacttacaactcaacagaagcaaagcaaccttctaagatccacttgaggcactctggagttgccccaaacttctgagtgataagataactggcaaattgcagaacctgtccaggactggtttgtgcatttatagtctcaaggcaagcatggtctttgtcctgcctccatacaggaggagggagaatgagcagacatcatggctcgggccacaggcacgaagggcctgaagagagaactctggcttctgatcattctgtattcaggacagaatacctatgttagaaaccttatacagaataaaaacgtggagctttttgtccaaggaatgtgtaggcatgccaaggtgtatatacataggctaattgctaagcatgaaaggtgtggtaaaggttttggccactgcctaggagagtccaaattcaagacaatgaggaaaagatgttcccagggtttttgtgtttttttgttttttttttgttttttttggtctcaaaaatcattacaaaacaacaaaagagtataataaacacaaagccaggcctgtgtaatcccatctactcagacgcctgagacagttggattgattacaacttagtaagacccaggacctgtgagcctggataatgtagtgagaacctgtctcaaagcaaaacaaggttgatgtgtactttagtgagagaatacataacaccatatacatacaggtcctgtggctaacaaaacaacaaaagccataaaaacaagctttacttgagactagctagggtggttcggatgtgaaatgtcccccacagactcatgtttgaacacttggtcccccagtaggtggcactgttggggaaggtgctggaactttaagggtagaactttgttaaaggaagtgaatcataagggcgggccttcaggtttgacagcctaaccctacttccttctgtctttctgtttcctgactgtggtagcagtgtgaacagccgctaccttgcaccctgccaccatgcctttcccactgtgatgcattgtatttcttcttaaactgtaagccaagataaacccatcatgttatttttgctgggcacttggccccaaaagagagaaaaatccctaatgcactagtaaatgtcacagcccttccatactaaatgtgaagctcttgtgtggctaggattttcttttcacatttatttgtgttcatgtgtttgtatgtgtgtataccatagtatccctgtggaggtcagaggacaatttactggattcatgtctttctttccagcatgtgggctctgggattgaactcaggtcatcaagtttggcagcaaaaacctttacacgatgaactaactgaacagtcatagaaggataactttttaaaaagcaggggtttggaggatgcacagggtaggcaagaagatagctcagttaagagcacctgctgctcttgcaccacacactacctcacaaccatctgtgactccaattccagggattccaacaccctcttctcacctctgaggaaactagatacacacatggtatacatgcacagatgcaggcaaaacactcctacacataaatttaaaaaaaactgaaacaaaaataaaaacagaagggaaagggctggggagatggctcaggggctaaaaagttctcagtgagtatgaggatgggagcccagagcccagaacccatggaacacactgggcagggtcctctgcatagttatagcccagcaccaaagtatgattgttggagctttctagtggccatatttgcagccagaaaatttgaactccagatgttgtaataaaataagtaaaaaaaatacctgagtttgaacccccagcacctacatggaaagttgggcatggcagcccatatctataaccctggagctgatgaggtagagacaaaggaatccaggactggataggaagccagcacagctgaaatagtaaatgtccagttcagtgagagacccagtctgttctaggcaatgagacagagctacataggaaaatagccaatgtcctccctggcctctgcatgcacacaggcagatatgttcacatgcatgtgcacacatctgcaagcacatacatgcacacacacacacacacacacacacacacacacacacacagattttatctctatatctatgatctgctgcaggttaattatcaaaaagcatgagataagagttaagactcatttttgtttgacagccaaccaacctctccagcacttttctcgagacttatctttttatcttttcccacactccattgtgtcggtgccttggtgaaaaccagttgaccatgaggctgtgagtctatttctggcttttctcttttgttccaggcacctttatgctatcctttgcctagataccaaaccacctaggtcttgatgaacttcatagtaggtcttgattcacacagccctactgagaccttgaatgtcactgctaactcagcagatgaccttggggaaggagacttggcattttaaccaccacaaaggcttttacatccaggagtacagcctatgtcaccatttctattcatttttctcagtaatgatcatagtgttgagaatagaactaagcgacatttttgttggatttgtctcagcttcccatttctttctgtgtgaaagaagctgaggcagagagacagcaaagagtgatacacagatagttctcttcctgttcccaaagttgagcaaaccagaattggttaattgggaattgcggttagctgaacttcagttaagtaagagtcggctgcattcggtagccacagaaatagcccagatcatgtcacaccctgatgttcaaaaaccttcattgggaaataattatgggatgtggacaaagaatagagtatcaatttacaaagggaaaaaaatggaagccactgagcagaggaggttgattaagagaagggtgccagagactcacagcacagtccagagagtgaccttgtgcaatggcggcttttagaatggggtcagactgtcggacaagtccagacaggcattacagctccactcatgttctgatcacactagctctattcttatctcttttcaatgttacagttcctggtaggatttaaaaaaaaaataaaaaagcaaaaacaaaaatcaaaacaaaaaaaccaaaaaacaaaaacaaaaaaaaacaacccaagacaacaaaacaacaacagccccagagtaaagaaaatgtcgtaaaactattattggggccagtgagatgagtcagtaggtaaaagtgtttactacgcaagcctgatgccccacgttcagttcccagagaccatcgcagaagactgactccagaaatcatcatctggcttgcatacaagagccatggcatgtaagtggctacatatgcacagacatgactgaatacatgctacacacacacacacacacacacacacacacacacacacacaaatacacagaatacaataaaaatttcttttaaaaattaaaaactattactgcaaaattatcttaatgactaatgaagctgacaatgggattagtaaacaatgcgtgtttttatgactctgggagaaacaaggggaaaggaaatgcttgagcagaaacacctgaaaggctccctaagcaccattgcatcaatagaaaggagtcgtggccactggactgtgaagtatttccacatgtttgttatatagatctcttacaaacatacacaacaggacatattctctaatgagaagaataaaaccagaaatgttctggctgttgcaggctcctcaccatatgagataacttgtctctctgactcatccttaaccctcagttcatgatagggtcacaggttctagctttaaagaattactcactgtatcctgaatcccctcgagttttcttgtctaacactggtccagaatcctctaatcctgcaccatcactctctattggatttcaaccactcaaaatccatgataaaatgtaagttaaagcaaaaatccatatttaaattaaagagagactgtgtcctcaacacacacacacacacacacacacacacacacacacactatagaggaaaaccttggaaggaagaacaggagtaagttatggaaattgtaccgagtgtgaaaagggggttgttcattctgtttttacgtgtcagtgtacttatgtacacaagcacacatgaatgtaaagtcagaggacaacttgtgggcattggctcttcccttccttcatgcaggttccaggaactgaactcagattgtcaggctgagctgcaagaggctttccttgc

SEQ ID NO: 634 - DNA, 1792 bp, Mus musculus
gagtcggaccaggctaggctcgctaaaggagaggcaccgcagaggggcaggcccccgtcgcgtcgcgatccgggatgccgaagaacacggtgtcgtcggcccgcttccggaaggtggacgtggacgaatatgaggagaacaagttcgtggacgaggaggacggcggcgatggccaggccgggcccgacgagggcgaggtggactcgtgcctaccgcaaggaaacatgacagctgctctgaaatcccccccaccccccactattaacacaaagagccaggcagtgaaggaccgtgctggcagctacgtcttgaaggtgcttatctcttttaaagctaatgatattgaaaaggcagttcagtctctggacaagaacggtgtggacctcctaatgaagtgtatttataaaggctctgagagcccatctgacaacagcagtgatgtgttgctgcagtggcatgaaaaggcacttgctgagggaggagtggggtccatcgttcgcgttttgactgcaaggaaaaccgtgcagtccagctggaactggacaccactggacaccgttcacaggagtgggagttgctggtacaaagaccaaaacaaccaaatggcaccgctgccctgtgggtagcatctgtctctctcagctttgccttcttgctttcgttttcatatctgtaaagaagaaaattacatatcagtttcctttaatgaaaattgaaataatgcggagaaaattttgtctcagtggaggtgtttgattctttcataatcatgtcaataatatgtatcccattctgtaatttatattcaagcttgattgtgcagtttctaactctgttgactggtttaagggttttactttatttttaaccaatactgagaaatgtgatcaaagttgaggccagtttcctaactcattgctggtcaggaagtgatctttatttttaaaaatgagagactggcagctattaacattgcaaaactggaccacacttcccttatttaagcaaaatgtgtttccagagcaagtagtgggtgagccccactaccagtttccagctttctttccgcttgcctccagatgatgctataagtgtaagtgtgctacttcctgttagcatccaattttcatggcctctcaatctctttgtggtgacccagggtccggagcaaggagtcttgctctatataaatgtatttacacaatataagcgcctctttggcacaaacatcccatttccttctggtaataaggctgcctggggaaacagtcccaagtcagacacaggcctccagcagcctctggatgaaatactttcatcagaaataaagtagctgccttagccattacacaggtgttcactggaacatttcctatgatttcccgaggacgtcttcagtgctcttcaggtaatggggatctcagaagatttggttctgatccaaagacacagtctgtgtttcagctcagttgttttttaagaaagaaaaatgccacatagtaaaagaaaaaaagtgtttacttctttggacaaaccaaactgattctcaaaaaatgactggtgcttgtaaaaagttattacaaagtagttccgaaaccaaccacctgaatgtgcgtggccaaggggtaatcagcctgcttgtctttccctaaaatgccaactccagagtcactgactgaggtgagaaccagcacagaaactctataaactgctgtttttgatacctgcttttttttttttgttttgttttgtaaaattatgataaacttcagaaaataaaatgtcagtgttg

SEQ ID NO: 635 - protein, 197 aa, Mus musculus
RRGTAEGQAPVASRSGMPKNTVSSARFRKVDVDEYEENKFVDEEDGGDGQAGPDEGEVDSCLPQGNMTAALKSPPPPTINTKSQAVKDRAGSYVLKVLISFKANDIEKAVQSLDKNGVDLLMKCIYKGSESPSDNSSDVLLQWHEKAEGGVGSIVRVLTARKTVQSSWNWTPLDTVHRSGSCWYKDQNNQMAPLPCG

SEQ ID NO: 636 - DNA, 29735 bp, Homo sapiens
agaaagtgcctttggcagttaaacttttgtactggttcgataagactagggctacaaagaagattactcacaggtcgtaagtccaggccaaccttagacaaaagactgttagaagagcataaagatatactgtccaaggcaagtaatctgtttcctcatctgtaaaacaagaaatgtgggctagttcatctttaaggttcctttcagctccgtctgctataagaaggcatatagcaaagcaatagttccacaaagtgagatcctgcagtgcagtgattagctttccttgctcactacgcagtgattcttggtcatatcaggctggccggggattgagagagagaaattgggttgctccacccctcttcagccaactggcaatggtgatatggaagaatatctctgccaccacacatatagaactaatggaaataaagaaaatagaagtaaattaaggtagctagtaatatgatgatctggaaaaggcactgggatatatcccaagaaaacaatgagactgaagagacggacacattatcttggtgaatctaccaaggtccagggtttgggggtcttagctttatatgctcaactacctacttagtaagtacagggagaatggatttactcatcagaagcaggtttggattaacaaacctcttgagattgacatgtaaagacaaaaaactaatgtactgatttctagtaagacttataactggatatgcaagcatatattcaagtcatccaggttacatagcctctccatgtagataagctacatagcaagccaaattatcataaggttgccttatggattagaggagtccattatgtgactcaaatgtttagtgctatcagattctgctttagtagtggtgactgacatctgcttagaatgaagtggtggatggggtatgcacaaaggcatctcattcctggacaatgtttgggagggtctaggcaacaagagacaacacaaacctctatgaccagctcctgtcatagcatcgattttctatgtgactagaaatccgttttctatgtttcatcaagctacaatccaatttatataatactaaatagattagaattcatcaagctataatctaatcctgctgatcggacagcaaatcctatttctttaaactgccgttacatcttttttattcatagtataagcaatccaaaaagtttaactcacagaatggaatcttactcttcgtattggtttttaaggaaagccacataaataaatttaaaaattaaaaaaataaaataaaataaattttaaaaggaaagccacatcataacctatgctaatttaaaataatattattcggccaggcgtggtggctactgcctgtaatctcagtactttggtaggctgaggcaggaggactgcttcagcccaggaagtagaggctgcagcgagccatgatcacaccactacactccagcctgggcaacatagcaagaccctgtttctaaaaaataatattatcattattactaacattgagtgagagctatatgtcaagtatttttctaagcacttacatgtattaattcatttaatcctcccaataatcctatgaggtagatattattataataactactttacatataaggaaattgtggcacagataatttaagtaactgcccaagtagtaaaaaaaggctgagctgagcgttaaacccaagaagtcaagctccagaatccatgttcttaatcattatgccttaatgcttctctaaataataacaatgcagattcactacaaagtctgaaagaatccatatttatttaggacctgtcctgtagcttttctgtcattctgctcaaaccacagtaccaatgggcatcctctaaactatggaagccaggtaggcagggtgggctagggtggaaaactttagtaggttctagatcccagaactttggccctcccccactcccctgtcgcccaggacctcatgccaaacataaatcccaagattatcttatcttaggtgtccctgactttcagggatgtactaaatctgggacccaaggcaatagaacattgttttattgcattgtttagttaaaattaagtgcaaatcgttcctcaaaaaattaaagagaattaatatatcatcaggcaattccacttctgggtataaaatcaagatcttggccaagcacggtggttcatgcctgtaatcctagcactttgggaggctgaggtgggagtatcgttttagcccaggagttaaagaccagcctgggcaacataacaagaccctgaatctatttaaaaaagtaaagtaattttttttataaaacaggacctcgggccgggcgcggtggctcacgcctgtaatcccagcactttgggaggccgaggtaggcggatcacgaggtcaggagatcaagaccatcctggctaacatggtgaaaccccttctctactaaaaatacaaaaagttagccaggcatggtggcatgcacctgtagtcccagctacttgggaggctgaggcaggagaatcacttgaacccaggaagcagaggttgcagtgagccgagattgcaccactgcactccagtctggcaacagagtgagaccccgtctcaaaataaataaataaataaataaataaataaataaataaataaataaaaaaacaggacctcaaagagatagttctacacccatgtttatagcagtattattcacaatagccaaaaggtagaaccaaaccaaatgtccattgacagatgaatggatacccacaatgtggtatatacatacaatggaatattattcggctttaaaaaggaaggaaatccattcacctgccacagcatggatgaaccctgaggacattatgccaagttaaataaaccagtcaaaaataggcaaacaccacatgattccacttacatgtggtaagtagaaaatggtggttgccaggggctggggagcagggaacagggagttattgtttaatgggtacagagttaattttgtaagatgaaaagaggtctggagatggatgttggtaatagttgtacaacaatgtgcttagtactacttaattgtacacttcaaaatggttaagatagtgactttattatgtctattttatcataatcttttttaaaaattgaattactagttgacacctactggtctctctaaatacaaaaaaagtgacatcttttctgttagactaaatattagaaatcaggctctatgtctagtctcaaaatacagagataaggtaaggaaagttcacagaaatatctaaaaaacaaatatcctttaaaaaatcattacaataacaaggtttttttaggttcataatttacagcgcatttcaagctgttatatgggtttatttaggcctttgatacttggttatatactaatttttagaaaaaagtaagtattataatttggaataatgaaaaagataccgaaagtagagagtggtgattaaatgcacaaaccccagaatctgacatactcggttcccacatcattctgccacttgctgattgaatatcattggccaaattatataacctctctgagctttagtttactcattcataaaatgggaacactaatttctaggctatagagctactctgggaattaaataatgcaagtaaagggtttatttaccaagtgtctgacacacaataaacgtattaagtggttgctattactaataaaatatgaacaggataaggacaaacagtaggaaattataaggattgcaggatctttcaaattttatcaaacctatgagtcttagatagttgacttcttattttctttaagaagttaagatatgctactagaatttgtgataatcaggttggggaagaaaaagttgatttcaatgttttgcttaaagagttaatagtggtaatgagaaaagaaaaacgtccatggtcatggaagatactaaaataattataagaaaatattttgtgcaacttcttgccaataaattggcaatgtagatgagatgcatgattttctaaaaaccataaattctaaaattgattcaagaagagaaagacaatcaaacaaatcaataatcatagaagaaaagaataatcaaagatctacctctaaaagtatcagcaagcccaggtggttttgcagcacactctaactttcaaaaaccaaatagcatgataatttttcatcatttaaactattgcagagcatagaaaaaaaggtggaaatctaaattcatttacaaagttagactaacactaatatcaaaactggataaagatagcacaaataaataaaactatggaccaatcttacttaaaaactgaaattatggccaggtatggtggggggggctcatgcctgtaatctcatcatgtgggagaccaaggagggagaatcgcttgaggccaggagttgaagaccagcctgggcaacatagggagacactgtatctacaaaacaaagtttgtaaaggcagcacacagtgcctcacacctataatcctagcactgtgagaggccgaggctggcagattgcttgtgctcaggagttcaagaccagcctgggcaatagagcaaaaccccatctctacaaaaaatacaaaaattagctaggggtagtggcgtactcctgtggtctcagctacttggtaggctgaggtgggaggatggcttgagcctgggaggtcgaggctgcagtaagccaagatcataccactgccctccagcctaggcaacagagtgagatcttgtggcaattatttaaaaaaaattctgaaaccatataaacaaaatataaactaatcaaatccagcaagtaattaaaatggtaatatttcacaaccaaatagagtttattctagaaatgtgggaatgtttcagtgtagaaaaatatatatattcactacactcataaattcaaagatagaaactatatgatttttatcattagatccccataaaaggcatttgataattttagcagtcatttctaaaagtcataaagcgaaagtcaatataatgtcaactggtgaaataccaacgaaattgaaataggaacaaagcagaagagcccagcactcaatttttcaacactcttttcacaattctagcaaacacaagataaaataggtgacagaaatattagaaaagaagatgtaaattatcattacctcaaatattatacagtgtgataagagatgcaaccttaaaacgactgttagcattaataaaagacaccagtgctaagaaagaatacaggataaatatgttttaaagtccatagctttcattttatatcatcataagccattaaaaaaatcaaatgaaacaagtctcattcacaatattttaaaaataagacttattctttggcactaaatctttttcttgaggcaagagatttacaattttttttaatctttgaagtactaatatataaataaaggtttatgaaagttgcagataccaggatgaaatcactgtttgtcaaacacaaactagagccaggagagcacaaaggagtagggttcatgattgcatggacgagataaaagacatttttggaagtcctgtctcaaggactttctaaaataagaaattctgtaggactgcagcaattcagataaaatgctctcaaaacaatacctgcccagtaacagcatctcttcctctaaaatggtgccaactctgactttgagtatccaaaaccaatgtctgtttccaagcagtttatgtgaacttctccttttgccaaataaaagtttccctttggccaggcacagtggctcacacctgtaatcccagcacttcgggagcccaaggcgggcagacaaggtcaggagatcaagaccatcctggccaacatggtgaaaccccgtctctactaaaaatataaaaattagctgggcatggtggtgtgcgcctgtaatcccagctacttcggaggctgacgcaggagaatgcttgaaccagggagtcggaggttgcagtgagctgagattgtgccactgcactctagcctggcgacagagtgagactctgtctcaaaaaaaaaaagaaaaaaagaaaaacatttccctttatcctcccttctttgatgtatatgtagcttgccacagctgtgcatctcaggttataatcctcttttctaattcccaaataaattcaacgtatttagagatttttttccctgatttttttttttttggcttacaggtttttagttgataagtttcagtagagagttcaccctatctattccactttaatgtgtaatcataaaattatgtaaaggaaaaacttgaaacaaagaaaaaatgaaattctgaaggttcatgttttaaagtttaacacagaaccagttgatgtagatattcataggagtattaaatcataagatagtctatggacaacatgctaaacatctttttatatttcagtaattatgttgccagagaaccctggtattaaagcatccttaccagaactgaaattcacttatttatatttataatacattttacatatttgattaacattgattttgcacttctatttcaaataataaaaataaataatgtcacgttgcaggattcaacgtcttttttcttttttttttttttttgagatgaagtgtcttgctctgtcaaccaggctggagtgcaatggcacgatctcagctcactgccatctccgcctcctaggttcaagcaattctcccacctcaccctcccaagtaactgggactacaggtgtgcaccaccacccccagctaattttttgtatttttagtagagacagggtttccccatgttggctaggctggtcttgaactcctcacctcaagtgatctgcccgtcttggcttcccaaagtgctgggattacaggcatgagccaccacgcccagccaggattcaatgtctttgttgtttaagtatttagtggcaagtttggagaagagaagcacatgttagaatccttggtttaaaatgtctgaaaagaaagacctattatagccttactaaagtcccttctaactgaaaagatccttggctgtttgcatcatcacagaaaataaggaactacatatacagcattaaccttgagaaaattcagattcggtcctgcttcagtattgaaccaaaccaggttatttgcacaacaagtaaaatgtcttaaaaccttataaatcttttatatcagggtaagcactcatttgaaaaattaaaataaggaaaataatattacctaagatgaattaagtatcatgattaacattaaaaatttagaatttgcaaggaagtgaaataatgagttttctaattaaaagataattaaagacagatttctccacatacacacaaaaatttctcttaaagctttataaagatttaactacctaataaggtagagaagtaatttatgtgcccactaaaaaatactcaatttctgaatgttcgtccaaaattaacttgtcagatcattaaatcattgactagaaacacgttgagtacctattatgtactaggcacttagatcattgtgagacaataaaaaatactgcattagaaaaggacatttttcacatcttaaatgcaataagcattatttggctggcagttaattacatttaacacattaaacatatagagcaaaattctgagcaatcaaaataattatacccttgagcaatcgattatttaaatttctttcactattcccttaagctgatttctactctgggattctttcatagttctcaaataagaaaataaaaaatttcctaaataaggcaatacaaaagaatagaaatgtaagagaagagatatattagctcttgaatccctgtttccatttgctgtcaatagtgcctctaatgttcgattttctcttcaaagaaaaatcttgatttaaaagaagaaaaagtacaatcacctttaacagctaaagtatactgattagcatctactaaagttagcaaagactgaaactgaaaaaaaattgtaaaatctttattctaagttatataacgccattcaccatagtaatgattttatactttggtatatggctttttaaaataaatattgccaacaggtaaaaatttttcctttgctgtcttaaggcattcctaagagaatttttaccagtgtgtgttcataacttgaatgttaatttaaacaatgttacttctatcacctaaatgatatacttatagaagagtggtttaattgggaacagaaaaacaccacattgcttcttcccaagaaaaagggatgtattccattctcgaggtctctctcccactctctatttatatataatatactgcatagataaatatacacacattatatatgtatttttttgaacttaaagaagactggacatatgtatttacatgtatatatccaacaaatatttaattttgagatctctctccctcttctgatttattattctcagtatgattctcaaactgtacggtctttcacatttcattcattcatcaagcatgtatcgagtcccttctgcatgcttagctttttgtcatatggaaggaagatacaaaagaaaaactgtttctgcccttcagaatctttccatctcttctaggaaggagataaaacaccatatatcattaagaaatttataagactagtcccaaaaccaatggtacaagcaacatgcattttacatttatgtagaattttagagcttggaaacactttcgtgatatataatcctaagaacaatcttgtaaagtgcacattattagctccatttcagtgatgaggaatctgagacagaattttaagtgacatgtctcgttcaaacattatgagtggaagagtcaacacttaagcctgagttttctgattctaagcctagtgctcttttcaacacagcactggaaaccaaagattgtggtacacaacagggcaacagccagtcttctgctcgaggtccaactaaactggacccataccgagcagtgtccagccaaatgtccaaattaattttatcctgcaaatatttgttcttcagtgtaatacacacagcacaactaccatttccttcgtcttagtgcctttatctcctacattccagaaatggggatgtcaaatatttttttaaatctggcctagatggaatcatataaatctcaaatcataatataaatcttaaaggtctggtttccaccaatccttccacattttgttttcccccagcactagagagcctaacctaccctcacccctttcgagcattcttgctccaaacgaccacctattttaagatgtcaatgaccctttcccaaattctacaaattcaccccagttttgccacccgaccccagcgcctgcccggacacgttcccctccctcccaatagatttgataccgagttcaggttctgcagatcccgttgcgatgctgtcacacagcactgacagataagatttgacctttcgactccgtccttggggacttcccgctggccaagaagggtagttccaatcccaggaaacgggcttcctgctcaggaacgcagcctctagcagcgcacagtctgaggcaatgtctccggcaattagaacgatgctgggcgcccgggtgtgcatcactctgcctcatactcctaccaactgcagggcactcggtccggcagccagtccatcccacccacagccaagtcccagccagccggaccttacgcaggaccccgatgataggtcgttgacggctgcagcaaaagccaaggccacctgccgctgctgcccatccccgccaatctgagaccccctagactggaccgcagaaaagcgtttctatgggaacccccccaccgagaatcacgtgacgcaatcggacgaccaatcgcttcttacctctgcccgcggtccagcttttggccctccctctcgcccccgcctccttcgcccagccccgccccttgcctgcggagagcccgcgcctgcgcgctgtgtcctgcgcgctccttccctcgcgcgcgctctccgtggaagagcaggggcagcgtgggaggcgccaagggagcgcgaacctgaggaggaagaaacggggctagcgcgcaggcccagaacggtccgagccgcggcagtcggcgacgcctcagagcggaagagggaagtgaatcaggcgccgggtagtgggttgctgggctgggcttgctgaggtagaggcagcgccaagaagaggcctttgccgctggtcgggattgggatgtcgaagaacacagtgtcgtcggcccgcttccggaaggtggacgtggatgaatatgacgagaacaagttcgtggacgaagaagatgggggcgacggccaggccgggcccgacgagggcgaggtggactcctgcctgcggcaatatccttgcattcaccgccctccccaccccagcccagcccagcccgcccttctcctgggacccgggagcctgcaggatccgcggggcaccggcgcggagctgccctctcaacctgcggcttaacctgtctctttgggatcgcccgctctgagagggcaagggggaagcccccgtttcctacccagtcggcaggagacgcgagggtcccactcttggaagcctgccctcccccgcgcgccttccacgcccccagattcctcaggttgcacccgagtgcctgcctgcctcgggaactggtcccgccggccgcgccctcgcggcgctggggaaggcggccccggctggtggggaaggctggtgccgagcgccttagtttttcttcctagaactctgatttcctggggtcacattagctccagaaatttctgattgtggggaacctgcatctttccttagtggttttgttttttgttgtgtttttgttattggtagcgttaaggtagtttattccttaccggggggcggggggagatgggactgttcgaaaattgagggtccctgtgctttcagcccattggcctttttaaaaaaaaaaaaaaaagaagaagaagaaggggatttggcaaaatatacattgtacagaatttgttaactgggggaggggaatgaatacaaaaaatacaaaactcctagaaggaagcttggagccttttacctgctaagaaaaggacaatagaaaaaacaacggggaatgcgtgtggagaatccttggaaatatttaaaataaaccccaatgaataagatagaagatgagtcattcgtataaagcagaatcatttttgtaatcctaaaattgtttccattttagttaaaatatggcagtcagttcccggtttctgtttttgcatatttgaatattcataactttggcttcgcatttgcattacatcttttttagaaaaatgtaaatgttgcaaaaaaaccgaagctgtagttttagaaaatctcagacactgaatttgtatgcatttctaattcttgggtgtattcataaggaagactctcaacaatgtcctgttatagtggggaaatatgagagtgaaaatatttaatggcaacaatatccttttttaaaggcacctaaatagagcattagacatttatcaatatatagatagtgctttgccacaactttcacaattaattagctgttgctcttttgcattatttaaatacttaagtgcttggagttataaaaaatgagctaatctacatcaggcatgcttctctagaaatccctgcagccttgaaaataacagcttgtcaaccagagattttgtgtaagaactttttctttagaaaataaatggtgaacatgcttcctaaaaacattatttgtgatggatagatggtgttttatgaaaccccagtgtattttaggtaatttgtggtgacttttaaatggtactgctgtatccatatcagtggatctgctttttgatcagttcatcttaaaatataaagatactgtctcttcttaccgttacatacagccaggaaagacagccctagtggtggggtactagagttggaggaacaagtgaactctgtggttttccttttaggggaatgtttgtacattctgacagtctgattggccttctgtttctcatgcttgctaactcactagtgctttcaaagagagcctgaatttaataggtatggtctaacacagtttgaataacctttgtgaaatatgagagaaaatatctaaagcaaaaaattaagctgccacctaagggacatatgaattattacatcttctgtgatgcctcttttcatcaatattgagagattgctaatgtgtatcattcagattgctaatctgccagcatgttctaccagcatttcagataatacagaatatggttctagcaaaagtttggtctttattttttcaattagaatcacaggaaaagacatattttggttgataataggttatttcatttgggggactaataattctgatatatattttaggatttctttaacaccactctaggtaatgtttgcatatgtatctcactgggaaatgaaagactatcaaggtgttcacttgatagttagaaccaagggtgaaacagtctttgctttattaaaaaaaagtctaatgttctattttgcttttgatattttgcctttgattaacatcctggaaaccaacacattgaatttccagtattgaacatagtgaccaaagtaattttctttttatatgtaaatcaagtcataagaaccagtggttataatgctttcctgggggccatcctttgctgttacacccttaacttccatcacaggaaacatgacagctgccctacaggcagctctgaagaacccccctatcaacaccaagagtcaggcagtgaaggtgagtcgcagactacaacacagtgatctctgctgatatcttattcttagtaaaatcctctgcagttgcaaaaaaaaatcaatattttaactgtttgctatctttgacatagaagagtttataatgtagtttgataggtaaaaatttcacgtgaaaaaatagccctataatgtagttatgataatgctgcatggtaagatacagtaagttcaaacgatagtgaaatcatttgtgtgtgtttttagaggagaccactcaggctgaatttgagcaaaggtttgaaaaataagttaaacctttacaaaaataaacagattgtaattgctttttaaagattttttaaaaccatacaaatactaaatacttattatagaaagctcagacatatgagaaggttaaaaagatagtggtttgtggtcccagcacccagagataacagttactactttggggccttgctgtattgttacagagttcccttttgtttttttaagaatgaaattttataacgtgctttttcagctatatgcaatgtacatgagctttccttcgcaataagtttatagcatttttaacacttgtatatggataagctgcagtgtatacataactaatcttttgttatatatttagactgactttttttttcctattgtaaaccactgaaatcaatattttttggtaaatttttaattgttctctttgagtaaattgctagcagtgaattactggatcaaagaatgcacttttttttaaggcttttggtatgcagtattgccaaattgcccttcagaacagttgtgcaacttacattctctgcagtcttttactaattcttaacctatttacgtatttatttaaaatgatgcccatagcatcaaccccgttgtccatagctattcatacatcctaggagcttcaagaatctcaattgaatagtagtaagtaataacttaggtaaatgcataataattatctaggtaacataattttttattggggaaaatttctttggtttttacaagttgtaaagattgtcgttgaaatttcatttttaccgtggatgcaaagatatttttctaaatctggtaattgcagtctttaaaccaaagataacagtaggtggtagaaacattctgtgaaatcctgaccagtaggaatgctggaggtatcactttgtgttgaatggaaggagaaacgaattgttgaaaaggtcagttaagtgtttcctttgcttggccggatgggtaagaaaataactgcttttgaagcaggcttttgccaaagaaaaaagatcattattaatgaacatcactatatttcatatctacagtcaattcatataaattacagtcaattttcttttaagacagcttggtttattaaaatttttaaataaaaaagtttttaagaaaaaattacttctgaaggataattcaaggtgaaactgcaaatctgcctccttgttttgttgggaattttttttttttttttttttttttgagacggagtctcactctatcacccaggttggagtgcagtggtgcaatctcaactcactgcaccctccgcctcccgggtttaagcaatcctcctgcttcagcctcccgagtagctgggatcacaggcacacaccaccatgcctggataatttctgtatttttagtagagacagggttttaccattttggccaggctggtctcgaactcctgacctcaggtgatctgcccatctcggcctcccaaagtgctgggattacagctgtgggccaccacacccggccgttttgttgggattttttttttttaagatcaagacataaatttaaatgttgttttaataaattgttaaattatcacattgatctgttagcaaatcctctcagctctgccttcaattatgttaatagtctgtctagtttcttaccacctccactgctactatgcttaccacatccagcctgtattattgcaattgcctcctaattgctctccctgcttctaccttatcccctactcccacagcttattttctgtaacatagatgccaaagcaatcctgttaaaatgtgagtcagattatggcactgctcttaaaaccttccaatgtcttctcatttctctcagtaaaagccaaactccttacaatgcctgtaggccttacacgatctgtcctcccataacctctgacttactcacgtgcttttctcccaccaatccactccaaccacattgggtttttttctgttcctggaacacactgaacacacactaatagcactgttctttcctctgtctgaaacactttcctcagttatcccaagccttctttcacgtccttcaggtccttactcaaatgtcacattcatagtgtagactttctgaaattctaaaccctcctcatacagatatgtctaaatgttctgttatttattgacccaccaggaccgggcaggcagcattgtcttgaaggtgctcatctcttttaaagctaatgatatagaaaaggcagttcaatctctggacaagaatggtgtggatctcctaatgaagtatatttataaaggatttgagagcccgtctgacaatagcagtgctatgttactgcaatggcatgaaaaggtaagttatgaattataaatctatatgactggttcttttacaatagggaatgacaatgacaacctctctcacctaaataaccattttgatttgttgtacatttttgttattacaaataaaatgcatgaaaaggatagttcatatttatgtttactagccttggtcttaagagattctgattccaacacttgtgtttattcaacaatgattattagtaattaaacataatcttgaactctgaattaaatcaaaactttgtaaaagaaaataagcaatacaaatcaagaattctttcacagtgaccaaaaggtgaaaacaacacaaggatcataacagatgaacagctaaattgtggtacatacatacaatggaatatgattcaaccattaaaaggaatgacattctgacacatgctataacattaataaaccttgaaaacataccaagtgaaatgagccaaacacaaaagaactaatattttataattttacttatatgaaataatctaggataggcaaacacaaagggacagaaagtccttagaggttactaggaagtagggaaagcaaggaatagggagttagtgcttaataggtacagagttcctccttggagtggtaaaaaagttttggaaacagatagtggtgatggctacagtacattgtgaatataattaatgccaatggattttacacttaaagatggttaaaatggcaaattttgtgttagatattttacaacttttttaaagaattaggagtttggaggatcaagaattcttaaatcatgtttttctattttcatgtgtatattttgcaatgtaagtagatgctggtacatcatctgtcaaaagagtataagtgattttgagctttgggtaaaaaactggataacatgtaaatagaaccagtcataaaaatattgagtgtttgaagtgtatctgagtgaaaacacaaacataagaaaaaagcacatagtaaaacaatagttcccccttttactctaaaatgcaccaatttgggtagtaatttatatggcaccctattcatggaacactttctgttgccaggtaccatactattaatgttttatttaacctttacaacaaccctgtgaagtatataaatatctttatcatcctcaatttacagatgaaaagctagctttaaaacccaagcagcgtagttctagcatagcctcaagattgcagtgaacattgattacttattatattccacatattcttcaaaggactttataaatattaactcatttaatcctcataaaaatggagggaaatgcttgctattattcctcttttgtcactgaggaaactgaggcatgtgtgaagtcttcatttcttccaaatgtcagtcaccagtttttaccaatcttcgaagtatttctgaaatctatctgttcaagcgtatctaatgcagctgttcacagcatctctcccagtctgttgccatagcttcctgactggtttcccagttaacagttttgcctccttcaaatctgttctccacccagccatcaaaatgatatctttaaaatcaaaattgcccttgtcagtcacctgcaggataaagtcaaagttcccaagtctagcttcatcttccatgtcattcttcccctcaggctatagcaatgccagcctttttcctgaatgcaccatattgtttcacacctccatacatttgctcatgattttctggtgttagcctgtcacctactcattcttttaatgtgtcatttcctccatgaagccttagctgaaacattcctctatactgttaatctgggtataagcctctccctggtgctttaatagcacctgcagcacaactctcatttcatacattagattaaaattacctgtttatatgtctgtctcctcatgctagaccagaaaatgctgtatttgttcacttttgtatccccagcatctagcacagtactcagtatacaaaggtattccataaatattttttgaacagaaagaaaccagagctcagattcctaatacttgatcattactctctatttttcaaattagagtcagagttaaagtttctaagttcttagctattaaacaataccttctttctttgggagaaaaaaaatctgacaaaggctgactaatcgaagtggaagttgggatggttgatcccagtttgaattttcttctgactatgtggtgagaatgagaaatgcagaatgtccacctgttttgagcaggaacactatgctgcagattttttttttttttttttttttttttttttgagacggagtcttgctctgtcgcccaggctggagtgcagtggcgcaatctcggctcactgcaagctccgcctcctgggttcacaccattgtcctgcctcagcctcccgagtagctgggactacaggcacccgccaccacgcccggctaattttttgtatttttagtagagacggggtttcaccatgttagccaggatggtcttgatctcctgacctcgtgatccgccggcctcggcctcccaaagtgctgggattacaggcgtgagccaccgcgcccggcctatgctgcagattttttaaaacattatttagaattaatgtactaaaatgtaaactagtatctcactagaatgtaacttcatgagggcagggactttcaaggttttgtttattactgtaacctcagtgccaagaacagtacctggtgcataattggtgctcaagaatttattatttgttaactaataaattcagggtctatagcagtgcccattccttctttaagaaaaatgttttaccaaatatgagaattgaccttttattattctgtcaacatttacatcttggtttgtttttaggcacttgctgctggaggagtagggtccattgttcgtgtcttgactgcaagaaaaactgtgtagtctggcaggaagtggattatctgcctcgggagtgggaattgctggtacaaagaccaaaacaaccaaatgccaccgctgccctgtgggtagcatctgtttctctcagctttgccttcttgctttttcatatctgtaaagaaaaaaattacatatcagttgtcctttaatgaaaattgggataatatagaagaaattgtgttaaaatagaagtgtttcatcctttcaaaaccatttcagtgatgtttataccaatctgtatatagtataatttacattcaagtttaattgtgcaacttttaacccctgttggctggttttttgttctgttttgttttgtattatttttaactaatactgagagatttggtcagaatttgaggccagtttcctagctcattgctagtcaggaaatgatatttataaaaaatatgagagactggcagctattaacattgcaaaactggaccatatttcccttatttaataagcaaaatatgtttttggaataagtggtgggtgaataccactgctaagttatagctttgtttttgcttgcctcctgattatctgtactgtgggtttaagtatgctactttctctcagcatccaataatcatggcccctcaatttatttgtggtcacccagggttcagagcaagaagtcttgctttatacaaatgtatccataaaatatcagagcttgttgggcatgaacatcaaacttttgttccactaatatggctctgtttggaaaaaactgcaaatcagaaagaatgatttgcagaaagaaagaaaaactatggtgtaatttaaactctgggcagcctctgaatgaaatgctactttctttagaaatataatagctgccttagacattatgaggtatacaactagtatttaagataccatttaatatgccccgtaaatgtcttcagtgttcttcagggtagttgggatctcaaaagatttggttcagatccaaacaaatacacattctgtgttttagctcagtgttttctaaaaaaagaaactgccacacagcaaaaaattgtttactttgttggacaaaccaaatcagttctcaaaaaatgaccggtgcttataaaaagttataaatatcgagtagctctaaaacaaaccacctgaccaagagggaagtgagcttgtgcttagtatttacattggatgccagttttgtaatcactgacttatgtgcaaactggtgcagaaattctataaactctttgctgtttttgatacctgctttttgtttcattttgttttgttttgtaaaaatgataaaacttcagaaaataaaatgtcagtgttgaataatttatttttctctgactttaacaattatgaatgtatggttaattaagaggaaaggttttctgcttctaccaccaagtactgtactcttaacaagaacagtttggtagggtttttataagactatatagatataagatgatagagaagagagtcatgaatgatgtcagagcactactgaagcctttggagtgattccatagccttctggatggcagctgaatacctatatgtagtatcactgcccaaagacctagactagaaagtgcaaagtagcttagcagctgcagtcattcactcccagcctccaaaattctctttctttcacctcaaatctatttcttgtacttacctactcacagcgacttctgtttgctttcgatcttcacctgactagattcccactttaaaacacttccaggcaattcagggtcctatgggtgaagataagctaagcaataggtattattcttaaatattacttagagatggggacttgctatgctgcccaggctggagtgcagtggctgttcacaggtgtgatcatagtgcactgaggcctcaaactcctggcttcaagcagtcctgcctcagcctcccgaaaaggtggaactacaggcacatgccactgtgccttagccaataggtattagaggtagtcaagtaggtatagcataaccaattacaaactttaaaatcaaatgatactgaatgctttttcataaaatccttcttaacatcactttcataactgaagcgtttggaaaaattctggagttcatatttgttcacaagaatgggtgggtgtatttagaatctgccagtctatcagctttactgaggggagatactaaaaatatttaacaagtagtataatatagagaccgagtcaaaatggatactagctggaaacaactggttcaactgttgcctcctgactaaatgtcagcccagggtatagtaaccatgacacagtactatccttggtgaagagttgggaataggattaattgcggaaaaaatatatataaatgccataggacacttttagcacaaaagtagttgtttacctcccattctcctcctttaatctcagtgcttttactatttggtttcttttttggcattttacaaaagggaagaaatggaaaacataccccttcttggtcattgggtaacagcaccatttcggtaacagtcatacttgatgacaagtatgatgatattttaaggacatgaacatgggtgaaatcaatgtgtagatggtacaaattaaccgaattctttttaaagcatttcctgtggatcccaggatcatgaggacataacagaagaataaggtctgaatcttgttcaccagtttgctctcagcctaattgggaagtaaggttaagcacctgaaaattatgtcatacaaaaaaaaagagaattaacgtcatacaatttagcatttgactgtaaatgcagttagtcaatgttgggagaacaacaaaatcagggtggatcagagtatttaaagtgagacattaatttgaactaatcctttggaggggcagaaaggacaaacggtccaagtgaaatgaacagagtagaaagagaaagttaaaagtgggtttaatagtcactgttcttgcagttttaatgttttttgttttgttttgttttgttttgttttgttttgttttttttgagacagagtctcgctctgtggcccaggcgggagtgcagtggcgcgatctcggctcactgcaagctctgcctcctgggttcacgccattctcctgcctcagcctcccaagtagctgggactacaggcgcccgccaccacgcccggctaattttttgtatttttagtagagacggggtttcattcaccgtgttagccaggatggtctcgatctcctgacctcgtgatccgcccacctcggcctcccaaagtgctgggattacatgcgtgagccaccgcgcccagctgcagttttaatgtttttaacataagaattctagatggtgcaaattattaacaggatcagaaactatctccgtgatagattcaagaaagtaaaattataggaaatcataatgttttattagctgaaatagacattgatgatcacttagtttaaccccatgtataaaggtaaaaaagaaaattaattaattaattttttttttttgagatggagtcttgctctgttgctcaggctggagtgcaatggcacaatctcggctcactgcagcctccacctcccaggctcaagcgattctcctgcctcagcctcctgagtagctcggattacaggcacgcatcaccgtgcccagctaatttttgtatttttaggagagatggggtttcaccatgttgcccaggctggtcttgaactcctgacctcaggtgatccaccctcctccgcctcccaaagcactgggattacaggcgtgaccaccgcgcccagccagattgattaatttttagatacacaatttttcctttagatttacaactaacatccccttacagacaaaatatgttaaaagcaccaaaataattgaaaaacacacccaattaaggaacagaccaacggcctctgtagaaccaagtgcccttaaacaaggctgcttctgtccatattcctgccgcgggacctctgccccactccctctccccctcaccccaatgtcactagtacaatatgtgaaaaccccaatgtgaaaacgttctgtgcaggtgcctcttgtatgattccagatatggaggaggcccgggaagcccacagaggtacagcatgtcatctgcctcaaggtggtgctacttcaccacattgatgatccaaccacaagcaacatgggacacagcattcactttaacatttctattttcctttatcatttctgttacttgagtgtgtaagagtaatcaacataaataatctatgtttacatctcttatttctctctgaaacagttccctagaatccacaccacatgaaacacaaattgagtagtgtatgacccacctgaattccaaagcattctaaaactcccgtattttccagcctagcagttagctcctgctctgcaagacacaccctcttgaccttgctgctagactgtatgggccccctgaagtcatagtagctggctcttactcatccccacattcacttggcatagttgatgttcaacaaatatctcttggttgcataacattgaacgagccaagtcacctaagaaatccttaatttatacacaggttcttagggtacctgaatagggcaacacatcagaagtacaaattgagaactatacaaagagtaaaataattcttgggttcaaataccctagagccaatcaagtttagtcacaaagaatttcaattcacttcaatgtggacagttaagaagggaatttatcagccttaggtggaaatcagagccaccatgagtaccacgtgcagcccctatagtgtttagctttgccagaagtcaccagagaaagtggctgaggaacagaattccagctcatatctggctaacagtggcactatgggagtttatatgatctgttcattattctgtggcatcaccttctaagagcagagatgtgacccaataccccttgttttccttaaagataaccattaaattatatccatgaatttatatcaccgtccttgactttatacgtagatttttctaattctgtcaacccttagggtaatgaataacttaaatggccaatgcctctgaataacatcatacttccttttgtttctccaaaaattgaatcaagatgccagggcaactaagattttcttcaatttgctaagttaaaggtcagtgtattcattagccaatggttctgtattttattcattttagtttttattcgttttcaaataatttgttcatattgttcaatattcaaaaggtaagaaatatgtactgtggtaattttccattccaccctagttcctcttttgacaaccaactattgtcacttaattcttaggcatccttccagatacagtgtatgcatttacaggcaaatacctatataagattttacccctttgtgtacataaatactaacatactatatatagtgttctgttccttgcttttttcattaacagtatattttggtggtaatttcctatcaatacataaagaacttccttattcccttcagaggcatttgaaccagagcaattccttcttgaatagaagctgggtaaaataaggctgagacctactgggctgcattcccagatggttaaggcattctaagtcacaggatgagataggaggtcaacacaagataccggtcataaagaccttgctgataaaacagtttgcagtaaagaagctggccaaaacccaccaaatccaagatggcaatgaaagtgacctctgcctctggccatcctcaccgctacgctcccaccggcaccatgacagtttacaaatgccatggcaacatcaggaagttatcctatatggtctaaaaaggggaggcatgaataatacaccccttgtttagcatatcatcaagaaataaccgttaaaatgggcaaccagcagccctcggggctgctctgcctatggagtagccattctttattcctttactttcttaataaacttgctttaactttacagactggccttgaattctttcttgtgtgagatccaagaacgctcacttggggtctggattgggaccactttccgataacaattttatttttatgactgcataataattctattatataaataaatgtaccataatttacttaaccatttccctattgatttaggtggtttctgatcttttgcagttacaaacagtgctacagtgaatagcattatacacaagtcattttacatatgttcaagcctatttgtagatcaattcctaaaagtgaaagttaaggtcagttggagggcatttaagggagatattgctaaattgcctttcttaaaggttttatcaattatactttctccagccgtgtagaagaatgcatgttttcccacccctttacctattctatgtgtttgtcataaaacattttttaatcttttcaaatctgatgttttaaaaatggtatcatatatttgcatttctcttaatgtaaatgagattgcacatcttttcacatgcctaatagccagttgtattttcttttctatatttttgtatttctatattttctttgcccttttgatggtctttttcttactgatttgtaggagctcttttcaacaggaatgtcaaatatttcttgcattttgagtttcgctttataatagcttttactataaataaaaaggttatttttatttttatctaattgagtttattaatcttttcttatggcatttagagttcaagtcatacttagattttcctggctccaaaatttaaaaatagaaatttcatgaagtgttcttggatgtttttatgattttaaattttagtttttttattttaaaatattcatatttttcttttcaacaattgctgcttcaaatgtaaactagaagagattagttggtccccatatggaagtcttatcctaatatattgacttggttggttttctcaggacttgagggtgttttcttaagacaaactacccaaagtatttcgcacgtgaaagcacagtttcactgtcattcaggcaagtatttacatgctaagggctgcttaaaatatttaaaatacaatccttatcctgtgggatctagattctaggtaagatacacaagcaatgaataaaattcaatagtaaacaagctataatagagaagagagtaaattcatgtacaataacagatggggagcaattacttctccaagagagaatgtcaaggaaaaggtgtgaaaatgggagcatttcaatgggccttgaaggctatctaagagtttggcaaatagaaaacaggaagggaataccaagccgaggaaacaacacgatttcagaattcacacaattagtgaacattccagaatcctgttcattattagtattaaatcaagttaattaagtgataccatgttaccactaagtttgaagactggttccaaattttctgggtcctcagatcaaaagcaaaagatttccttaactttgatataatacccagtgtttattctaacgagagggaaaccatctgctgctgagatacagctacttatgagtttcatgttatagctgttgtcaggccaggaagtacatagacaaagtatatgctgattgatagtgactctctggggtgctgtattgagtaggacatgttggagttcaacaggtaggtggaccatgagaattagtgatgtctgccatgggttttagacatgtagaatcacaacacatattttattcctgctctaaatgatatacaatatctgcattatttggccctggcctttatctacagccccatccccaactaaaagtaggactgcctcatagcacaagtccaggggacaccattcatgccacacagttgtgctgtaaggggtgccgttcatatgaaatcagtataaaccgggcttctgggagctgtaataatattgtttaatactgcataaagctctgcttaacttttatataccagccactgaaaactcatgcttacatttctctgcaggtctgctccattcttgcttttatcaccaataatcagtctcctctgctttaccagtaacatgacaaaacactccaccagaaaccccctaagttttccatcatgatgttcaggcacccagaccaaaactgacttttctttctcagttccacttccagagtcccaggtttcatgcgcgtccatgtgaagagaccaccaaacaggctttgtgtgagcaataaagctgtttatttcacctgggtgcaggtgggctgagtccaaaaagagagtcagtgaagggaaataagggtggggccgttttataggatttgggaaggtaatggaaaattacagtcaaagggggttgttctctggtgggcaggggcgggggtcacaaggtgcagtgggggagcttctgagccaggagaaggaaattcacagggttaatcactcagttaaggtggggcaggaacaaatcacaatggtggaatgtcatcagttaaggcggggcagggccttttcacttcttttgtgattcttcagttacttcaggccatctgggtgtatatgtgcaagtcacaggggatgcgatggcttggcttgggctcagaggcctgacgttcctgccttcttatattaataagaaaaataaaacaaaatagtgttgaagtgtcggggcagtgaaaatttttggggggtggtatggagagagaatgggcgatgtttctcagggctgcttcaagcgggattaggggcggtgtgggaacctagagtgggagagattaagctgaagggaggtcttgtggtaaggggtgatattgtggggttgttagaagaaacatttgtcgtatagaatgattggtgatggcctggatacggttttgtatgaattgaaaaactaaatggaataagagaaggagaaaaacaggtataaaaggtctaagaattgggaggacctaggacatctgattagagagtgcctaaggacattcagcatagtcctgccagcaaagattatttatttacttcaagagtttagagtggcagtttggggatagcaccaggagatatcagctgtgatggcttggagaaacagtgtaaaccggcagtgtaaacaagagcagggcatgtatgagtagttgagaatggtgaataggagtatgactagacagaatatagtagggatgacaagtttttatgggcacagtctaagttggtctggtgtcgaatgagactggggcctaataaaaaggagcgtctatacaggagcttaaatgggctgtaccctgtagcattccgagaacaggcctgaattctgagaagcgaaagtggtaaaagtattgtccagtcctttttaagttggtggctgagcttggtgaggtgtgtttttaaaagacctttagtccattctacttttcttgaagacggaggaccgtaagggatataaaggtttcactgaatactaagagcctgaaaaactgcttggctgatttgactaataaaggctggtctgttatcaggctgtatagaggtgggaaggctaaactgaggaattatgtctgacagaagggaagaaatgactgcggtggccttctcagaccctgtaggaaaggcctttacttattcagtgaaagtgtctatttagactaagaggtattttagtctcttgactcgggcatgttgagtaaagctaatttgccagtcctgggtgggggcaaatcctcgagcttgatgtgtagggaagggagggggcctgaataatccctgaggagtagtagaatagcagatggaacactgagaagttatttccttgaggatagatttccacgatggaaaggaaatgagaggttctaagaggcgggctagtggcttgtactatagcataacctgcctttgctggtgtgcggcgattaggcctggtggaactgccattaataaatcaagcatgatcagggtgaggaacaggaaagaaggaaatttggggaaatggggtgaatatcaggtggatcagagagatacagtcatgggggtcaggtgtggtatcaggaataatgtgagaggccagattgaagtccaggccaggaagaatggtaattgtgggacttaaagagtgagtacagctgaaggagccggtgagcagaaagtatatgcgtcaggtatgaggaagaaaatagattttggaagttatgagaactgtagagagttagttgagcatagtttgtgattttgagagcctctaaaagtattaaagcagtggcagccgctgcacgcagacatgagggctaggctaaaacagtaaggtcaagttgtttggacagaaaggctacagggtgtggtcctggctcttgtgtaagaattctgaccgcgctaaccatgcctaggagggaaaggagttgttttgtagaaggtgctggggtttgagagatcagtcggatacgattggcagggagagcacgtgtgttattatgagaattatgccgagataagtaacagatgaggaagaaatttgggcttgattaaagtaatgggggctgtctgtgaagctttgcggcagtacagcctgggtcatttgctgagcttgatgggtgtcagggtcagtccaagtgaaagcaaagagaggctgggattaagggtgcaaaggaatagtaaagaaagcatgtttgagatccagaacagaataatgggttgtagaggcaggtattgaggataggagagtatatgggtttggcaccacggggtggataggcaaaacaatttggttgataaggcgcagatcctgaactaacttgtaaggcttgtctggttttaggacaggtaaaatgggggaattgtaaggagagtttataggctttaaaaggccatgctgtagcaggcgagtgataacaggctttaatctttttaaagcgtgctgcgggatgggatattggtgtcgagtggggtaagggtgattaggttttaatgagatggtaaggggtgcatgatcagtcgccaaggagggagtagaggtatcttatacttgtgggttaaggtggggggatacaagaggaggacgcaaaggaggctttggattgggaagaagggcggcaatgagatatagctgtagtccaggaatagtcagggaagcagataatttagttaaggtgtctcagcctaataagggaactgggcaggtggggataactaaaaaggagtgcttaaaagagtattgtctaagttggcaccagagttggggagttttaagaggtttagaagcctggctgtcaatacccacaacagttatggaggcaagggaaacaggcccttgaaaagaatgtaatgtggagcgggtagcctctgtattgattaagaaggggacgggcttacct

SEQ ID NO: 637 - DNA, 2063 bp, Homo sapiens
cgcctgcgcgctgtgtcctgcgcgctccttccctcgcgcgcgctctccgtggaagagcaggggcagcgtgggaggcgccaagggagcgcgaacctgaggaggaagaaacggggctagcgcgcaggcccagaacggtccgagccgcggcagtcggcgacgcctcagagcggaagagggaagtgaatcaggcgccgggtagtgggttgctgggctgggcttgctgaggtagaggcagcgccaagaagaggcctttgccgctggtcgggattgggatgtcgaagaacacagtgtcgtcggcccgcttccggaaggtggacgtggatgaatatgacgagaacaagttcgtggacgaagaagatgggggcgacggccaggccgggcccgacgagggcgaggtggactcctgcctgcggcaatgaaacatgacagctgccctacaggcagctctgaagaacccccctatcaacaccaagagtcaggcagtgaaggaccgggcaggcagcattgtcttgaaggtgctcatctcttttaaagctaatgatatagaaaaggcagttcaatctctggacaagaatggtgtggatctcctaatgaagtatatttataaaggatttgagagcccgtctgacaatagcagtgctatgttactgcaatggcatgaaaaggcacttgctgctggaggagtagggtccattgttcgtgtcttgactgcaagaaaaactgtgtagtctggcaggaagtggattatctgcctcgggagtgggaattgctggtacaaagaccaaaacaaccaaatgccaccgctgccctgtgggtagcatctgtttctctcagctttgccttcttgctttttcatatctgtaaagaaaaaaattacatatcagttgtcctttaatgaaaattgggataatatagaagaaattgtgttaaaatagaagtgtttcatcctttcaaaaccatttcagtgatgtttataccaatctgtatatagtataatttacattcaagtttaattgtgcaacttttaacccctgttggctggttttttgttctgttttgttttgtattatttttaactaatactgagagatttggtcagaatttgaggccagtttcctagctcattgctagtcaggaaatgatatttataaaaaatatgagagactggcagctattaacattgcaaaactggaccatatttcccttatttaataagcaaaatatgtttttggaataagtggtgggtgaataccactgctaagttatagctttgtttttgcttgcctcctgattatctgtactgtgggtttaagtatgctactttctctcagcatccaataatcatggcccctcaatttatttgtggtcacccagggttcagagcaagaagtcttgctttatacaaatgtatccataaaatatcagagcttgttgggcatgaacatcaaacttttgttccactaatatggctctgtttggaaaaaactgcaaatcagaaagaatgatttgcagaaagaaagaaaaactatggtgtaatttaaactctgggcagcctctgaatgaaatgctactttctttagaaatataatagctgccttagacattatgaggtatacaactagtatttaagataccatttaatatgccccgtaaatgtcttcagtgttcttcagggtagttgggatctcaaaagatttggttcagatccaaacaaatacacattctgtgttttagctcagtgttttctaaaaaaagaaactgccacacagcaaaaaattgtttactttgttggacaaaccaaatcagttctcaaaaaatgaccggtgcttataaaaagttataaatatcgagtagctctaaaacaaaccacctgaccaagagggaagtgagcttgtgcttagtatttacattggatgccagttttgtaatcactgacttatgtgcaaactggtgcagaaattctataaactctttgctgtttttgatacctgctttttgtttcattttgttttgttttgtaaaaatgataaaacttcagaaaataaaatgtcagtgttgaataa

SEQ ID NO: 638 - protein, 99 aa, Homo sapiens
MTAALQAALKNPPINTKSQAVKDRAGSIVLKVLISFKANDIEKAVQSLDKNGVDLLMKYIYKGFESPSDNSSAMLLQWHEKAAGGVGSIVRVLTARKTV

SEQ ID NO: 639 - DNA, 107727 bp, Mus musculus
  misc_feature (1)...(107727): n = A, C, G or T/U
gagggacagcgccagcgccacgcggaggtcgctgcgtccccaatcgcctgccccacgatgcgacgcgccgaagcgccctcgagcgcccaccctgccgggtaagtggcaacccgtgcccgccgctccccaggtggcccgcgtcctgcctcttttgctcagcttgatccccgagagccctgggtgctccggatagggctacgggacgtcgtggatgtcatgctgaaatgaacaccccccacgagcgtgcggatcccccagcagggactaagggtgaaactaggttctgcaaggaaagggggcggccttggtgactgccgaacttggccaaactttcaaatccagactttgttagcggggaaaagcagtgcacaatgtgcggctgggagggtttggtgtgttcgagcccgagatgtccgtgtagccatggctctagcctaggctgaactttggatgcaagcactcgctgccctggcccagccagccccatgcaccacgatgcaccgctgctctgcctaaaccccagcttgcgccctcaggttctgggaccgagagtgggggtgggggcgggggtggggagtagggtggtagataagaagcacctacaactttaggcaggcccatccagcagctaactctctgcctggaggattgaggcgccaccagatcccatctgccaccccactggatcggctggggacctttggactggcctttgaagagcctggtgtgtgaggagggtctagagtgctcgggtgcaaatgattggcgggatacccagacgcagatgcagtctgaagtgtgtgaaattaaatggcttgggaacaaccattcggaagggattcctacttttgtgctcttccctaccccccacctcaagacctggaacactgcccagagctacacaaggttgggaatgtcctgtcatcccgcccagcccagtcctaagagaagatcgggaagggtggggtttgaagctgcaccgagtagaaagcgatttctgcgaaagtcttctagcactttctgaggtgccatggatgatggacgaatctggggtaccatactttttgtatttccgtttaaaagtcccgggcctgatcccggatgaattcccgtggctgcctgttttaattctgtgacctcatctctttgagcttccactctttagaacaggaacgctatctgtacacatcttgtactctccagggtttgggaacagtagggtgtaactggcccccattcggataggagggactgggattgtcctggggcggggggtgggggggtggggggggcttggctgcctccttcctcctacccccaatcccagctacaaccacagcccggaaattctgtgttgatgtttcccttggaagtgatctctgtggagacaaatgtcatctgctgggaaactgggaattccgatgcggaaggggtctcctgggagcaagtaactgctataccctgggtgggaaggtaaagccggctagaaaaggagggtgaggaatcaggttctgatctcatctacttccccattttccccaaggatggcctggcctgacccatttcctcctgcctttctttgtttacctctgtaccagtgattgatttcattgtgcctcagtttactaacaaggatagtcagtagtcactgctcttcacaggctgtttggaggggacatcctcagctgctattatgattagcatcactgacatctgttgggtgggccccttccttttgccaactgggtgatctgtctgcctcatctgaaactccagagtcctataacccctccctcactgggattgaattggatgaattctaatggccttggtccctgctcaggggctggtcctttttaaggtctttaaaacaccctgcacctgagcctcacacctaaatactcagggacctcttaccccaagtcacccctaggcccagctgccaccaggactggtcctgaaagctttttgagtctatccttgcaccctactggcccagagcccccttctttctggggtgagagacattcagatagctggggactgctaccccaagcagccaggagagtgccccttgagttctgaatcctaggatgcaagctctgcttcttgtttaaacggctgtctgggaaaagagatgcacatgggtcgctggctacactggtagcagccacatttttttccacccactgtgctaagctccaccattcatttaagactgttaataactcctaaagcagtctctgcccactggctagtgttctcgggggacataaattgagcaggaggcatgaggaaccctccgagcattctaggtatgtgctcagaagaggtcactgggaagagaggacattcagcagaggtttagaaaatctagaacattctaaggggtggggcagtgtggttagcgggagccagtgctgcagaaagcaagggcttgcaggggttgggaggtctatggcgagtgcacagggcccagcagaggttttcatagagggtgatagactgtaggtggacagacagtagttggggaggggcatgatagcctggaagccaggcatagccaggatggacacttgaggcaagagaagttaggatggcagactgtgttggtggatcagtgttagacaaatagagttgagggaaagggacattgcaggagagactgagatgatagagggctacccccctgggctcagacacccgactgtgtggagtcctgggcgagtgggtcatgctatccctcagtctgtgagagctggaagtttccaagcctcaggggagatctggcagccaccggacacctccccgctctggcaagcacacccagtgcattttcctaggtttgctacattgagggtttacttaagattgcgtttgtaaaaggattccactcttggaacaaatgtgcctgacccaatctatattccatgtaaccacgaggcaacagagatcctaaaagaggaaggtggacttgggtctcctgagcctctgatctggcatggtacaggttctacagaggtgtccttagtctctctaggctctgagactgggaggtcttccaggctaaggtgcatagagcagggcctcagctcctacaggtctgctgctatctctgacttcttggcttccagggtctcttgttctcaggtagtcttgactggcagagacagacccgggcctgggccaatcaaggttcttattcgcagcgatgtggaggagaggtgcagttagcatggcatggaggagtctgggcacaccaccctctgcctgccctgtacttgcctttctcttgatgcctgcttgtcttgggtcccagtgtctatggagaaaacttaagatcttacgaggcacttgtattctaacacagatggggtccagagatcacaagtgaagaagcctatacagtatctctgctggaaacagaagctggcatgataagaaaggcaggccccttaccaccctctccacctcccccaactggtccacagaaggagtgggagttggccttcagggtcccggggtgactgccgtttcttccctcaggccctctcccaggttccacctgccatggccagtgaatcatcccttggttcatgtcactagacaatgacaaatgagctgaactggcaggcagccacaaagaagggagggagagcaggattggagaagagaggagcctggaaaggcttggagttgggctccttagcagggctggaagagaaagcacagcgcagcgcagcgctgcattccccgggagtggaggagcctgtagcttttccactgactttggaaaaaggaatcagacttcagccagttctagatttttctgtcaaagcacggattgcccagaacctgcctttttatttttagaatcaggaagttacactgttttgtcccctagggaggtctggaccaggaaagtctcctccactgatgaacctaaggatcaacaccaccactctagtggcttttctgatacagtgttgcggaaaaggaagagggaggccatttcagctccttggaggcaggctctcaggctaggctctccgccaaatgtccttccagcttcttgtccccctcaggagcatgctcacctgtttaaaaggcccctcaagaaagtttagacttcagggtggggcaccttccaactatagcagatggcgaccccagtttctacacaccctcccaagtgtagaaggcagagatgcctggatacccaggacattgaagggagcagagcccctttctcccatggtccttaactgccaggatgttatgggtccttctcagggttggggcagagtagaacatctcctgagcctgaagaatgacataggctgggggtgcaagtgctggggcccctggctgcctcacaaggttccaagtgtaggtctctgaactcagagaaactcagaatttcaaggtgctattgttagggggtggtttcaggttagggggagctgtgtttcttagatctagaggctgtttagggatgggcacatctgtagagctaaggggtatcctggggtcctgtccctcttaagtttggggaccggtttcctagaaagcaattctctatggctctaatccccaaataagttgcctctcacctctgagctgctgctccggggacatccagtaatttcccccagtgctgggccatgggcagtgggaatggatcctacaataaagctagggtgcaccacagagtgggcagtgagtgcttcttcctgccaatggctagaaaggtagttcacagaatagtctagaaggtactgtttactttcctaagtaacaaagacaaacacggaaaggaggcttctcggtcatctctttgtccaaacagctgggaggaaatgctttctcatcctgtgggtttatttgataaaactggtcttgtagaagagctgagtttgagagctcctgtgaataaggccaggaagtttcctagtgggacttggtgactgatagagggtgggtgggcttctctgctgagggacagcatgaagcaagtctgagtgacttccaagtgagtagagtaaagacaataaggaggtaccaacaaccttcagttgtctacatgtatcctgggacatcagcctttgccagggtggaaagatggaggtctgaggagaccctgcctgggaagggttctctggctcgctgccagagtgaggcctcttcaccacaaagcccaggccttctgcatgtcagttagcccctgtattggaagccaggaagcgactctgtgtcctccggccccattaagcatgtgaaagggcccttgaagaagagagaggccagcagaatctttcttcggatagcaactgtgcagaaggaaggccttgctggactctgtcaggctgtcagccttagcttttcacagaagaatctggaaataccttggtttccactttaggtgcaattcctttctcctcctctcccctggatcaaggctgtcagggcttgctccaaagcggcaacaatgccagtggtcacagagcccctcgtgctatctccccaactcctagaatgtccccactctttcagtacattaaaaaaaaaatgtgctagcctgagacagaatcttagtttctttcagacaaagtggcctttctctgaagtggttgtggtcaggacttgtctgtacctgaagtagctacagtgagctcaggccacatcttataaagcattggccctaggctccagagcaaggctcttcctagtcaagaccaggaggactgagagacctccagttctggtctgggaaagaaagaatctacgagacagagggaggggtggagagatgtggagccttagaggggctctcctattggacaattccccacgtggaagctggcttcttgttattgatgactctgggatcttcaaacaagccaagaccttgttattccctagtaagagatgagacttcagttgtgtacactagagagtgggcccagtggggatgctagagcctataggaggagcctattttctgaaaagcctcctggggaagtggagtgggctgggccaggaggggagagacaagaggcattgggaagccctcctccataggttcttcaggctgagaggctgacgaaagagtaagcctgactgtattcagtgtgtgctggtctctagctaacgggtcagctgtcaagacaggatttacccagttcttttcccacactaatgtctgatttcctccctctcagccagtgtcagagcctagccatgtggatgtgtctaggatgttaagtttaaagaatggcagctaaggatggcttctgatgacactgtcagttatacatcatctccctgctctatgtgttgggtacagcctccttctaaagcacctcctggtattcttcagtcagtaaataccttcctgttcactcatcatcccattctcctacagacagacagctagccgctacctgtccactcatccatctgctaatccatgtagccagccagccagctgtccatctgtctaccatctgtcaatctatccatcatccacccatcatcctcctaccaccagccagctgtctgccctccacttgttcattcatacagcattgagccagaagtcagtccatctatgcaccctctacattcattcatccatccattcatctcttcacccatccatccattcattggttcatctgcacattcattcatccatctatccctctacccatctgtccatccaagcattcatctgttgatctttccattggttcttcagtttatctctaaccgtctagctactcactgaacagttggacatctagacatttcctgtttacccactaaggaacacgagaggcatgtacacagctgaagtgcatacaaggcactgtagacaaggtgccgaggtggtactaaccttgactgtgatgagcagggagcacctgataccaacagcactgggtttgagtctccgggagcaagtatgtattaactgctgggattaggactatagagaaaggaattcaattaggagttggcttgagtgggaagttgaagacttggtgcaaataggtcatgcgtatggaaccctgtggtatggtttggggacaggagaaggtgttgtatgtgaagacgtgaagggagttccatttggctctctatagaagactttggcttttatttcctatgatgatacataccacaggtttgttcctccacttagtggctcagcagtgctgggcaagatgttgcagctgaacctgccatagcaccttcttcctcacacacagctaatagggtggcaaccccagctcccacggtattgtcatggcaaccagagacagaaagggttctcagcccttgggctgtgagaccatcaggaactctgtgtgcatgtgcacatgtgtgtatgcttgtgcacacacatacacacatgtgggtactgttggttttcagtttttattatatactttaaaaattcaaacacagacaagaataatgaaattgaaagcctcaaacagttgtctctctgagcccacacccagaccaaatatgttcttgtatgattttaatctgtatatacatggtgatttgtgttcctctttttgcatgaagggttacttcctacttctatgtttctacatgtgctagggacatgtgttgcctgttaaccttcatggcaccatatgatgtaacattcttttaaattaccttttgtgtatgtgccatggtgcccagatggagatcaggataacttctggagtcccttcatgtgggtactggcaatgaaatgcaggtcatcgagcttggtgccaggtgccctcgcccactgagccatcttgccagcttatgttatggtcatttaacgggcagagtcagcttagtcattttctgtgttgattgcttgacatcatcccaagtctcttatgtgttgagtgaaacctttgaacctgtgtgcaggtccaagggctagacagacttccttaatctctctccaagaatctgaatttgaggtgagagtagagcagaacctcatggttagcctctgcattctcagtgtgtataacttttaggccaactgtttttcaactttcttgctagtagataaagtcatttggttaagggggtaagtggggagtgaaatttgctcacagatgcccttacaaggaaaggatttgggtttcctgtaactgaaatgcattggctggagctgaggcagccatcttggactctgaggtaaacagaaatgtagaagctatatgggatgggataacaatatggttagtctcaaaacataaagtgccactctcggtctagaatgtttacccagaattccgtgagtctccttgtatgagagaggaatacatatttattttgttcaaatcattgtgattccttcttttctactacaaattctatcccacaagacagttttatattcaagtccttgttcttagaggaggcagaagggagaaagggggagaggagaggagaggagagacctctccctccaggactagattacaggcgagtgagttttagatttcactgaaagcttctggctatttactctggcttgccgtctgactgcaaagccttgagctctgggatgtgtcaagccttcttaagacttgttgcatagcactgtgcaagttcactactcagtctcgcatggctgagggagctgcagtgggggagagggaggaaattgcatttcgttcaaagcagagtgtcgtcaggacagctgtgtgggaggtagggtgggcttggcctgcttctggggagaggcaaagagcaccttgctttagttttaagaggcactctgtcgaatgttggggaccccaaccaaagaacgtcaggatgtgtgggggatagtctacccagcccagaggaactctctgcagagagggacagtggccagggctggggaggagcttgtatcccagggcttggagggtactggaccccagtagtgagagatgccaactccgctggtcccacccaggcctgtaaccacccacttctgtgcccttcggttttccttggactcaggtcctatgaaaggacccagtgtgccctctgtaaaccaggctgcagctcgatgaattttaggccccctgggctgctgtggcactcagaaggcatttcctgttttcacttgggatcccaccgtgttggtatgctgctggtttgtgaacccaggccctcacagcacaaccattgcttccagtttggatgaccacaagtgcaggcacctcagatgtctgtacccagatttccatagtgaaaccaacatggctgcatctggctgtgggtgggagctactacaggagtctgggccaaacaaggctcaggatctggaccagatcttggtagaggagatatggtacagtggggttgcagcaagtgtctgtaggagggaaagtgcatgggatcagacaggaactatgtgtgcacgccttcaagtgggcaggatgctgctctcttctgcctcctccccaggaactagggctcagcatattctcagtacactgtggtcagagaagcagggcatggagcaaacgtgtaggacccgctttgcaatctctgccttggtttcctcattgtacaagtaaagccatgcctgttcctaacccgaggagttgttggatttggtgatctcatgtgtgtttgaagagtgtgggacataaagtgggtactccacaacacatttttctgaagctcactctcatggccctgtcactcagacttctggctgggacccagttaatagtgttgctgtgtcttacacaaactggtgtatagttcctggccacggtccagtcactttgacttgctttgaatccttgggacagatgcttgtcctctttggtctctgcttcctgtgtaaatataccttggagatgcagaggcgccttgtactaagcaccatttgaagcaagtgatgggtggcctcacggcccttagacagtggcatttcacaaggctcatggcctctccatttatgattggaatggggaggaggcctgggtgtgtgcttcttgggaggaccccaagttactacagctccctctgaccagtccccccttttcctccctagtgtaccctcttctctctcctcagggagatgagtgagcaggttgccagtccaggctctatgtggagaggtcttagtttccccagggttctgtgcaggctcacaatggccagtaattggtatcatgtcatggggccatttccttgtacttcatggcttctgtttgaaaatctatatcatggcttaaattcatgtgcaacccccaaatccatgcttacagctccccaagtcctgtcaagtccctgagtgtctatcaagagctatcagtcctctgacagagggtagctggcctctccaccccatactgcagacatatccttgtcagagcattcttcctatcaggtgtgtcccacacctttgtgcttttgttgttttggtggtggtggtggtggtggtagtcattttattgttccaatagcactaaaatgttcctaagcgcaaggtgaccatgatgtatcttagagagatctgtgggtactacgagcttccttcaggcatgaacttcagtggtgttcagtagtaatgaatggaaggtgtgtattcactcagaagcacatagccaacgcttaggctggcctgagtccctgagaacagggttcactattagcgctcagtattcacaggagctaggagaatctaaccactgggcttatgcctgccagctccctccctcttaggcctccaggctaaggagtatctgctttatgtatggtctgcctagaaaagcgcactctgtcctttaggccctgcctggggcctggggcttctctcacctccactaaagtctggggcttaggaagaccagtttctgcagatgtctgtagtcagtggctttggttctgatggaattgttgggggtatggatatttgtgtattactacaacgggagcatggactctcagctctcacagccgtgccctgagaaccccagcttgcaccctgaggatcgacttctagcgaaggtcaagtcaccctattgtcaccgccctccaaggctggagttctggtgcctctcggtgaggacaccagaacatagagctggggaccagaactgagctccatcccagccagagcctctgcttatccatgaatctcctgaatccagtatcctcgtgcctcccctgaggcccacacctgatgcttccctagatccagttatgtcttgggtcccagctggactgccatctgggccttcccgtcatctcaaccccactgcaaggtgacattcgtctggaagacgcacaaaggatgtcaggtccctacttgccagtcgctcctttgataccctcaggacacactgtccttggaattccaggggcacgtgaaccaggtgtctggagcatacgcttgccctgagactcctcctatggctctcactctctcccacctcagtacctcaccctgcctcaagttcaccggccaggatctggccagctcctgctgctatgacaaaaaaaacgccagagaaaacagcttctaaacagcagtggtttccctctcacagatttggaagctgagaaatcccaaatcaaagtgccaaatccaagtgccaagaggttcagtgttagtaaagccattttctgtttctcagaaggctctcctgcctctgtcctcacatggaaaagagccatggcatgttctgggcctctcttatgaggaaaaaacaaatctaccattgaggcttcaccctccctcgtggtatagtcctttcctacaggccccacctcctaactccatcccatagggtaagactttgaagtgggtatttgcgagcacacagacacgggtttgtgacagtatcttcagcatcctcccacttgaacagtcacatctgtgcatgtgtcccatctgatggggcaactgggcatatattgacagggcataaccgagtggttggtttggggccagagcaagcagcactgtttggcatttaggggtatctgggaggtggcttctcccttagaactggcaggagaatactcagcctgaggcacacacatgacacacttgacacccaacagaggaaatgtggccacagctgctgtttggaagagtaccaggcgactcgatgtcacagatacccgggagacgtgatgctttggtggtttgtgcaagatgggggtcaggcccatgtgtcctgtctgcattctctcaagcttagcggtgacccaaggaggagcagctgctagaagccagccttgtgttctgagtcacctttccgttcagaggtgggagctcctttgtcaaagcacacttcctcccctgccacagacacccatgcgttctccagtggccctctgaagtaggtgggggcatggtgcctttttcttgttttactgctgaggaaactcagattcatagagggttggggaggagcaaaagttatccagccagtcagtcagtagccgaggctagacaagattattgctttccgggacagagccccttccaccctgctcagagctgcataagtcgaatagtggccatagctggccacttaccatggcatctccgagcaccagatgctctggtcctcgtgttcctccgcacactgcaggcaggtgcctgggaaaagcacctgctctctgtccccttctgcgatggctgagttgtgtccctgagctcttgtgtggtgtacggggggtgggtgtgtgtgtgctatacctttttaatttccacctcaattccagatgatgagaaccccaagtgagcagcttacagggtcagaggcagggtgacagcaggctgggggactccatgtgctatattgctcaaagctagaatggcctgcctgggtggggaccctgcccctggctccttgttcctgttttctcaagagctctatccctgggaaaagaaagaggcagaaacaaggagggcactagctgggggatgggggagggcatctagacaggggtgggggagagcatctagatagggttgggggagggtacctagctggggggggcacctagacagaggtgggggagagcacctagctgggggatgggggagagcacctagctggggggtagaggagagcacctagctggggagtggaggagagcacctagatagggttgggggatggcacctagctgggggtggggggaggggtccagccaatagaagcccaggaatcctggggcagctaggggcaacctgctaaagctgaggcctggcattcagtttgtcccatgcagcagttcctgggtgaaaagccattgattgtgacagcaggctgtggaggtgacatttctgtcatgggctgatgggttttccctgtgtttagggaagtgatgtacagtaagaatgtgtgattctccctgtcagtccccttttcattacaaacaaatcataagaaacacaagtgaatgaataccacgaaaaggcaaatgatagagaagtccagatctgcttcatcccacaggacagccactagcctcatagagctattctacatgttagatgcaattaatgaagatgaccctgtagccacactggccacagtccaagcactcagtgtggaactgcactgggtgctataggctttccagcttactggatagactacaaactaggaaaactgaccagcaaccactcactaaaatttgcagtgatcagacccatctcatgtactggtaaataaatatttactatgagctgggagtctctaccccgcctttcattcggttcccagataaaagacacacaaatccatttataagaagccttgtctgtcaacactggagtgggcagctgtaaaccttctgtggctctttggcctacttccctgtcaataacaccgagttatgatttgccatgctctgcctgggccactcttgctccaattggccaaccctcatggccatgtttacatgattcacctaccccatggtgtcttcttccttcccccaccttctctcttcctctctgtggtcctgcctcagtcccaaagcccagggaaccgaaactcttcctgtctctcttctgtccagccacaggctgtagacagctctattcaaccaatggttttaaattaaagagcaaggttacatagcatcacttggggtacgtaatgatctcttcatccttgggggcaaccagaccttgggggctagtttagcattacagtatctagcaacagacccaacctcaacagctacctttataatatccaggagacagcatttctacatttatacaattccacaattctgtctgataggcctatggatatatgaggatattttctctactttttttgttttggctcatggtttcaggttcccatcatggtcactgggctctgatgctttggggtctgtgtgtcatggttgagcaccacagcagggttgcttgcctcacagtggctgggcagcagggatagaactcacttgtgaagtaaggtgccctccccccaccccactgtcacccaagctcatgggaccatgatccatcagttcggtgaatgattgaactgataagggcagagttctcatgacctgtcacctctccaagacctcacctctgaactccactacattgggcctttcaattcgcgagttttggggagacccttcagacccactctgtgatactctgtgaggcaaggggcctcaagtgtggggatccctggtccagtctgcttcctggctctttcagggtgtctagggtgctcccaggcagtaagctaggcttttgagtgggccccagccccaactctgtcccatttcacacaagagacccagacaggcaggaaacaagaaaacctgaaagatgtgttccttcacttttgtgtctgtgcatatgtgtgcatggtgtgtgtatgttcatgtgtgtgtgtgtgtgtgtgtgtgtgtgtgtgtgtgtgtatgtatgtggttaggtatagtgtgtgtgtgaacatatcacatatgtgtgccctgtatgtggctatctgagaacagccttgggttcaagagcctcctgcttttgatttgaaacagggtctctcattgtcctgaaatttcaccaagtatgctaagccagctggctagtgagttccagagatcctgtctccatctctcatctcatcatctctgggattgcaagcatgcagcactgagcccagctccttgtgtgagctctagcaagggaagctggggtctacagttggtgaggcaagcgctttgctggcagagcctctattcttctaccatcgtagtttctcctgctattttcccctgtcattttctaataacagatattagtatgaatacaaacttataaaagtacaatttggggctggagagatggctcagcagttaagagcactggctgctcttccaaagaacccaggttcagttcccagcccccacatggcagctcacaactgtctgtaactccagttccaggggatctgacacccttacacacacatatgagcaggaagaacaccaatatatataaaataaatacttttttaaaaatttaagacaaactttaaagaaatagcacactctggggcagagcagtagtggtgcaagcttttaaacccagcacttggaaggcagaagcagtaggatctctatgagttccaagccagcctggtccacagagcaagaacagccaaggatacacagagaaaccatgtctcacaccacccctgcccccccccccaaagagtgcggtctgtacagaaaagtaaaaaggaagcaaaaatctctggatcttcatatgaagaagcccacagtacccttccctccccaccttcctcccctcttcctccctcctcctccctcttcccctctccctccctcctctctcccctctccnnnnnnnnnnnnnnnnnnnnnnnnnnnnnnnnnnnnnnnnnntttttccttccttccccctcctcctccctccatattcaacaccacctccactctgtccagcagaggaactcaggactcacaccattctgtctttttgtccttaactacccagtcatccctccctcgtcagcacacagtctcctctgcatgtttgtttttcagttgcagactctgccctccatttcccccttatcaatctgcatgcaggttgtttccaggcattcctcctgtacagacaatgtctcagcgactccagagagtaccggctgtcccatgagtcactttgcccatggcaactccagtaaagggaaccctccacggctgctgggtcaaaagccatgtgcatctgcaattgtgttctaagttaaatggttacccttcatggaagctgtctctcctcatgttcccgtcatctaaatgcagagcgctttaggaataatgtaatgactgtacaatattccagtgtttacattaagttcagcatctaaagttactcataggtctagtatggatggctattgtctgtaacaccaatgtgtctttatacctcattctggtttttctcctctacccctgctcagtgcagagcctaggttgtagacattctcagcaccaaagagagacgggaaggagggagccacgtgggtggggctggacaccttcaccattccatttttccattctcctcacctgtgactcatgccacaggaaacagatttgcattctggatggcctaccatagatacacttagtccagagagggccgagctctgtggatgggactgtaaggtgtttctcagtgcttctcagctacatacagggaatcctcttaaggagactttggctttctgggaattccaagccacctttgttacctcctcagcagacagtggagtcacacgattcgaaatcagaaaggatggcagggtgccatggagagcctctttttctccaccaccctctctctgtccctgcataggtgagagcatcctgacatgggtggttggcacatgtgcacagggcttgtctctgccatgggggctggcacctttgaggcttttaccttcagtctggaccagcacacgcatccctgaatcctgcctccttcatcccatctccacatctagtgatgtttctcagtgtctctttggggtgggcacaggatgccagatgctctttgttttaaagatttattttatttttaggggtgtgtgtgaaagagagagagatacatgtgagtgctgatacataaaatctaaaagagatgtcaggttccctggaactggagttacaactggttgtgagccacccagtttgggtgcttagaacaaaactcagcttctctgcaagagcagtacacactttaataactgagccatctctacagcctgtcagttgtaacatttatttcagtactattgtgatcagcctagaattggcaggtcctgaatcaatataagagatggatggctagatgggtagatgggtggatgaatggatggatggatggatggattgatggatgaatggatggatggatagatagatagatggatggatggacagatgaatggacagatggatggatgatagattgatgaatgaatggatggatggatagattgatggatgaatggatggatggatagatgaatggacagatgtatggatggatggatggatggatggatggacagatgggtggacagacagatggatggatagacagacaggtgggtggtacccattattgagctgtgcttccactgaagcatggtcttaaactcttacaaccagtaaataaagtactcaggctcctgcctccagttaaatatatgcacagagaagcaaagacaggagcagtcacttgtaaaaaaccactcagctgggactctttctgcaggcttcctggttttcaaattcataccctgtgctagctaggcaagctatggtcatctaggaagagggaacctcaattgagagaatatttcttagttgcttttctattgccatgacaaaaacaccatgaccaaggcaacttatagaagacccagtgtcttggggcttacaattccaggggttaagtcagtggccattatggcatggagcatagcagcaggcaagcaagtgatgctggagcagcagctgagagcttacatcttattcccaaattgtaggcagagaaaaatcactaattaggaatagcatgggcttttgaaacctcagtgcctaccagagatacacctcctccaacaaggccacacctcctaatccctcccaagtggttctgccagctagagaccaagcattcaactatatgagcctgtggaggccattcttattcaagccaccacaacctccatcagactggcctgaagacaagtccatgtggcattttgttgatcagcaattaatgggggaggctgtagcccactatgggtggtgccacccctagacagatggttctggggtgtataagaaacaggttgagcaagccagggagagcaagccagtaggcagctttcctccatggttcctgcctctactcttggtttagttcctgccctgacttcactcagtgatgggctgtgatccagacctgtaaatcagataaaccatttcctcccccaagttagttttggtcagcgttttctcatagcaatagagagcaaacaagagcacagcctaaacaccaggcaacacagaacacagcccttcttcatactgatggtcaagaagtggtataatcactgagacccatgggagtagacagtcttatccaagactcagggcgtagtcatgatgtagggtgagcctggccaggtcaaacatgagcagggagggctagaacctgtgatccagaagaagttctagaggaagatacaaagactcaagtcatgaggtggggtctggtgagtgggtatatggtgagtaggtgtctagggcacagaggtgatggagcagccaaggatggagacagacagagggtgtgccactgtgaacaggttagagcatctgagaaactaagcttggggatggcctactgtagagctgccatcagaacagccataacactgaagccagtgcctctgtggcctccgtggggcctgtatggaagtgagtgtgggtctagagggaaggctggaacccttggtacgttcagtaaggtagggctgaaaattgggctgtggctcacttaggagagacaaagacctctgcaggcagacacagaaagcgggaaggcttctgacttgccagaccccttgatgtgggctgtgacgtatgacctgaggtgacctggtctgctctcgttatttccggcaaccggaagacctgcttgagctgacttcccctctgagaggctgtgggcagcctgcagaactggccagtggttggcaaaactgtgcaggtcctaccttaccatgcaaggctttcagtgtttggggggacgggcctgatcctggaagccacaagcgcctgtggatactggtctggaccgtgaacagtcattctaccctggatatgggctgcaggtgtctgtggaacattggtgagggttttaaatccagccacttctccatctcacaggcccctaagctctgatttagctcctgctgcccagcagcctgggccagaccagaaaagaggcagcagctggggctacattgtgcacactcagtaggaagggtctggcagaagagatgaagctggcctggcctcctgccttttctgggctgtcttctggggcagggccagcccctctagaaagagaagccttcagaggtccacagccaagggtcagctaagttgcagagacatgggattccaagagctgggaggaacctcagtccttggcctaagtcatgtagagcatcaggcacagctgttctcccatgtggaacacccccacagacatcactaattgatccacattcttgctctggtgccctcaatttaatgttagtctgagtactgtcaacagctggggttcatgtggggaaattcaacctacgagcctgaggttgagcccaaccgtctccttttcctgaagaagcttttcctgaagcgagaagtgagatgcctggtccacagtcagacaccatgcctggggccacgcctgctgtgccaacaacagcatctgttatgaaccactccactcatgagtccttgtctcctatcatttctacaacgtaactccacccgcaaacaagctagtttgctacaatgtctccaattattgatgctctatagaaaactgatgcttgctaccttagaacttgttttattttgtttgtgtccccctggctgtcctggaacttactctgtagagaaggctggcctcaaagtcacagagatctgccagcatctgcctcccgagtgctgggacaagaggagtgtgccccaccccaggcccccagataccctaggtcttgttaataggaactgactggataggtagaatgcagtctgtccatataaagcaatgccatctgtcaataagaaacaaaaggttgatacagaagccctgaaagactactagtcaccatggtaatgccggtgaacctcgtgaatgttacgcagggtggaagaaactaaacagtgcccaggttcccttacaggaaatacctagaagaggagtctgtgaagagagtaaacagatgagtgggactgggggcccggggggatgggggatggggactgactggtggccaaaatgtcccaagactagtggtgatggctgcacgactgtgacaatcttagaaaccattgtgttaagacactttaagaactattttaaaagtgactgcttggtcagcatatttctagaggtggtgtgtgccagcactcggctcggcgtctgttgtctgtctggaaaaaatagccggcagatgttcctgtgagtgctgcaagctgtagggactgctcagcctgggtgggacagaatccctgggagggaggtcgacattctgtcatggcagagttgaggagggatgttagggggaaggggttgtcaaccacagccttgcaaagtacagaaaaagcaagagtctcttggtgaatcctagacctcaccaactggtaaaagtgtctggctagcaaaacctgatctcatcattgcctccttggcactgggattatccctgcacgttggcatccccagttcagatcctcagcacagcaagcactttatccactgagccatctccccagtcctagccccaccctctctcttctagagggcttacttccccgtcctgcctgttgtcacttcagccttgcctctgtcctgagactggtctgaggcctccatctcttagaacaggtgccatttgctctgaacggagcactggactgtgttgtctgctttagctcttgcctcaatgctaaggcaaatggtatggtctccctgttttactgaggacaagaggctcacagggtagggtggccccggaataaagctctatcccttcctgggactgcagcctgtctttgctattgtgggcatcctaagtcggggctttcagatctgatggctgtcactatcagctgctgttctttgccccaagttctatagcggcacaagaaagaggaacatttcccaatggtcttcttagggtttctgccatggtgcccttgagatggctgcccaagctgctccctaaaagtgccctggaccccaagtctacctgaaggatggtctcgttctccttcttcatatggatgtgcaggcttctgacctaacttcaaagctctgaggatgcaaagcacagctgtcatgtcatctgttgggaaatggctaattgctgctgagactgagctgcccggggaggtagtgagctcctgaccccagaggtctaatatcagatggggtgaaggggctgtactggcagaaggaaccagcttgggttcctcagactaccttcccccaacacctcagagaagcagtgtaagcatatgggctctctgttttttcaaacaaatgtactgagcacggggctgatgagatagctcagcaggtaaagcgcttgctgccaagcctgacagcctgactttgatccctacgacccacgtgataaaaggaaagaaccaactggactcccacaggttgtcctctgacctccacactgttgtagcacatgggctccccctccacacccgtacacaatgtcatttaaaaacgaaaaatattccaagcccagagaaacctacaggaaactcggcaatgccttgtgtagctgcaacccagcttgtgacatccactatatggcacattggccttgggtctttgtttttcggtaagtcttagaagtctggtcaaaggttcccttatccctgccaggatgcactcagggagcaccctcacccacatgggtaagctgtgtccacagagcaaatgcacagctgttctgaatgtcttaggagtgagcatagatgcagtatgtttattgctctgcgtattctggtggttttgtttgtttgattttaggactttctctttgggctccattccagactcccagggtagctgcaagaacagaacaaagaattcttatggcagctcctctctcatcaacgtgaacactgtgtctcatgtgtctccctcctcctcctcctcccttcttctttctccctgactcagtagaacagagtttcaggctttgtggtttttgtttttttgtttggttggttggttgggttttgttccgtgttgttttttccttatggtcctcaatgacttctcctcagagctgaggacttatgtcccttttgcctctgcccctggggtgaataagcaatgaatagcaatgctgtctttagggttttgagagtttctgcagtggctgatatcagtgccttgtaacagctgtggcagccaagggttgactgcccaaaagcttatctgaccatttcttagggatggacactgggcaggggaggtgtgtgtgtgtgtgtgtgtgtgtgtgtgtatgtgtgtgtgtgtnnnnnnnnnnnnnnnnnnnnnnnnnnnnnnnnnnnnnnnnnnnnnnnnnnnnnnnnnnnnnnnnnnnnnnnnnnnnnnnnnnnnnnnnnnnnnnnnnnnnnnnnnnnnnnnnnnnnnnnnnnnnnnnnnnnnnnnnnnnnnnnnnnnnnnnnnnnnnnnnnnnnnnnnnnnnnnnnnnnnnnncctacacacccactccccctttttggccctggcgttcccctgtactggggcatacaaagtttacgtgtccaatgggcctctctttccagtgatggccgattaggccatcttttgatattccttattttttgagatgagatctcttactggacctggagcttgccattttgggtagatgggctgaccagctagctccacggattgcatctattcccctcgctccaacactaggtaacagatatgagctctcacgcttgtcttttctgtgtgtgaaggggatctgaactcgggtcctcctgctcacacaaaaagcgtgttaccttcagccagaagcctgccccggaagctgctatggtggtttaaatatgtttggcccagggagtggcagtgttaggagctgtgaccttggtgaaggaagtgtcattgtaggcatggactttaagaccctcctcctaactgcctggaaggcagtctattagtggccttcagatgaagatctgtaactcttagctcctcctccaccatgcctgcctggacacttctttgctcccaccttgatgataatggactgaacctctgaacctgtaagccagccccaattaaatgtcgtccttataataagagttctcttggtcgtggtgtctcttcacagcaaggcaaacctaactaacttagacagctgctctctcccacctgcaccccccacctccacagtaccatctgcagctgaggagatgctgggaagtgggagagacagcatctcacctctcagatctggcagattgtcatgtgaatggccaccacctccattcccagggcacgtccccccaggtccttgcctgaggaacggtcctcttagcttctgcctgttttgcttcacagtaagggagacacagaggcatgaggaatgcggtggatccagttgggatgagctagcaaagtgaccaccaacattattacctagtaaggcctacatggatgttcccacgagccaggcttcaccagctccatggaacaaatgagaaatctgttgattgaagataattttcatcatagaagcaaggtgtaatcattgtaatgatttgagtcacccccactccctgcacatctcagaactgtctataatgacgccttgcatggctgtctggaagctattccttgtgcttatgtatatatctctatatctggtcccaaataagactggagaaaaaaaaagattatcgaattttctttgccagctactacaaggatgcaaatgtggaacttgaaaaaaaaaaagtcgcctttttctaaagttaaaggggatgtatgtgtggaagtcagaggacaagttgtaagaatcatttctttccttctatcatatgggtcttgagatccaaacacagttcttcaggcttggcagcaagccctttgactcactgagccatttcattgacccaattttgggaagtggcggagtacaggtgtgagagtggcggagctcacacggcctctgtgaagctcgtcctgccttctctgttccctcggagccttgtgcagagggtctgggccttccctgactcagcatggtgggatgaggtggcatggctttcccatctctcaaaccgtctagggtcctgtccggatctacacaagaggtctcagttctcccagtaaagctccacggagctcaccaagcagccaaagcctctggctctgggccaggaaacttctgcactctctccggtgggtggcagccagccagagccccattctgtcacctgactgctctgacccccaatagtgtttctgccaccttcccattgaggttcgtgaggcctggggcagcttccagaccttgctcactgtccctggaggcagctccctccttccttgcagagctgttcagaacatcccagggaatctggtgccaagggacactgtggactccttgggcagctgaccacaggcacacggaggcaatagagtgtctctagacagctgtgagaggggacgactgggggcccccagagccagtgcttgcaccacgaaccgaaggatatctgtcttggagggcttctgtttgtggcagagctcctccataacccctggcctagatcttttacactgtcaactccgttcacgacggcccgtctctgtcacatgtcacgcctgcttgcttctttatctacaatcaaagatttcagggtacggcagtctcagcatctgctgtcaggagggagagcgtgggcgtcagagtctctgctcttccaaacagatgacaggcacagagccaagagggctcagcgaccatcactgacagcaggagttacagccacaggcaaagctcagagagggcccgctcgtcacgcggcaagtcagagatcacacctcctgcctgtttcctgtggactgttgagagctcagtttttctgagttccctgcctctctttagcttggtcatggcaggcggatgccaggaagctttgccccttctgtctctgacctcttctcacatagtatgaaatccacatctttccaaggccttggcgtctctgccttctatatcttgcctggagacaaggcctatgacctcatacacagttctctaggccaaaaacacccatcaccctaagggctcagagccagcctctgtcgtgtttactctcagagtggacctagagggacctcaaggagctgactttcctggaaagcatctttgaagcccacatttgattggtccatggtgcttgtcactgccaggtgtgtccaccatgctgcccttgcctattcatccaccagctgtgtttaggggcatgaaaagcatcctccttgtggtatgtcacatggtcaagaaaattggattctcctggcagccgcgttcacatcaggctacacatctctaatgctcttgatctcatgggttgccaccacgaccaggtgtctcggatgcaagatagaatcacagatgtgagcaccattcactgcaattggatgtgctgagtcctcatatcaaatctacacagtgaggtgagagtgggggttgtagcaggaagagagctgaggggtaaataagttcttacacaagagctagctctgttgagttacaggtaggcagagtgctaaatcctcaacagtcaccgcatcagactggcacggtaatcctgtgcaacaaagacttaaaaaaaaaaaaaataattaaactgaagcccggagaagtgactgaagtcacacagcctgtattcagatccgggcaagtaggctctatctggacaggccacatgggatgcgaagaactttatcttagacggtttcctaaacaatgaaattaaatgtaaagcacactgaggaagtaggctttgcagtgaacagtcatatccaccatttacccttaatgttctttgtttgcattgctgcctgccttcattcatcctaagttcactttatctttgtgcgttccagagaaaatcctagacctccccgaatatgtcagcacgtgggttgttaactacagagttcagtattcgatgactgttcatgaccgctttagtataaaatggatgcagaagccaagtaaacaaacaggcatatgtaaatagacaccatctgaacttcacattgattcatgcaaactgttttctctgccctggggctttgattcagcgtgggattttgtgattcatccacgtggttactcatcagtagacctccttattgctagctgttgccttgttgtagggagcccagcctcttcatcctcctcccatcgatgggtacctggaccagttccgagttatggtaaattaagctgctgtgaccatcttctggcctatcttttgatagatgggcttttgttcccttaggggacatatcaaggaacccaccatggagcctgtgtgctcgtgttaggacaacctgccctgacgttttccaaagtggttgtgccagtttacctttatactagcaagtctgagagccttctgacacctgaaccaccctcagcaaaagtggcagaggcagtcctaatttcagtcaattctgtggtgcaccttggtggcaccttgtggtttgaatttgcatgtccctaatgaccaagggtttttagagcccttcacctgcttattggcccatgtgtgttgcctttggagaacctttccggatcttttgacttccctttttgagggatttgcctgtcactcatgaagtatgtggtttgcaggtatttctccccagattgacgggcagaggtattgttgtgtgtctccttgctcttgaataggtgcatgtgtgtggagggcagaagacgaagtcttgtgctgttcttcaggaaccttccgccttgttttttgagacagggtgtggtggtttgaataggaatggccccattggctcatagatttgagtgcttggtcatcagggcgtggcaccacttaagaattaggaggtgtggccttgtcggaggaaccgtgtcactgggataggctttgaggtttcaaaagctaaagccaggcccagaggctctttctctgtcttctgcctgggggtttagatgtagaagtttcagcagcttccccagcaccgtgtctacctgcaacctgtcatgctcccccccaccatgatgataatgacctaaacctctaaacctgtaagtcagccccagttaaatgctttcctttttatgagttgctgtggtcttgtctcttcacagcaatagtaactctaactaaaacacagggtctaaaactcaccaaggaggctacctggctggccagccccaggcatccatttgtctctacctcctcagtgctgggcctgcaagtaggtgctgctgccttgcccagctttttatgtaaattctgggtatcaaactcatatcctcacacttgcatgacaaacactatacctaccgagttgtcaccccagacttgggcagatgtttcgactctaatgcaactatttttcttatacaatagttgctttccccatctcctctccctcataccttggcctatcagctgaagtgagttttgggtgagaaagacaaggtccccatggaaactacagacagacagggaactcaagcaggagcctgcagaaggatatgtaggttctgtgggggtgatagacagcagcctttcggggaggtcctttcggatgaaaacgtcttgaagagtagggacacacaatgttaggtcccatgactcaagctagagcctgaaacagtttccacttggtcagccaggagcagcagctatgcaactcatgatgcagggaggactgtgaggattatgagggaggagaggccccacctctgtcggttggcaaagagcccacaggaagcccaaggtctggtccagggaacaggatgtccgaggctccttccctaggtgctgggcctctacagaagttgcttgaatacttagagccagtgcccccagtgactcctgatactgacatccaggtgtccccctgcctgcctttaatgtcacctccttctatactcaacccttaagcccagggtctttctgcctgaacatatatctctaccagacacctgcaagttttcagtccaaagtcattgtgtaatgggttcctccttgaccttctaggccccctgacccttccctgtagttccattgtctgaccttctccacctgcctgtcttctctctctgaaatgcaaattcctggatggtttgtggtgttcccttctttttctttcttgaccgttttgcacataactgtcacctgagcctaaaatgttctcagcctatattttcaataaggcccagttactcttatatttttggtcatgagcctatcctttaacagctgagccatctctccagcccaggatcagttattcttaggaacccagtgaccaacctgtgtcacattggatggtgcaggtctctctcactcatggaggtggacaagcaaaaatgaagctagctgcaaatctcagcctgccagatgttcttcagtgtaaaggtttcaaaacccttcttcagggattctctcagatgctcccatgcttccttcagtccactgggactgaaatttatccgctgtttccactctacttctgttatatttagtcccttcttgtaccgtagctggccattctgggtatgtcttacttgttataatgacaaatgccttacgtggagactcaccttgagaatgatgtcatttcccaaaagggtcctggccacatagatgctaattgagcaagcagggtcacttcactctatacttattgtcccaaagccagtggcagtgtcttagttagggttttactgttgtgttcagacaccatgaccaagacaactcttataagagcaacatttaattggggctggcttaaagtttcagaggttcagtccattattctcaaggcaggaacatggcagcatccaagcaggcatggggcagaaggagctgagagttctacatcttcatctaaaggctgctagcagaatactggnnnnnnnnnnnnnnnnnnnnnnnnnnnnnnnnnnnnnnnnnnnnnnnnnnnnnnnnnnnnnnnnnnnnnnnnnnnnnnnnnnnnnnnnnnnnnnnnnnnnnnnnnnnnnnnnnnnnnnnnnnnnnnnnnnnnnnnnnnnnnnnnnnnnnnnnnnnnnnnnnnnnnnnnnnnnnnnnnnnnnnnnnnnnnnnnnnnnnnnnnnnnnnnnnnnnnnnnnnnnnnnnnnnnnnnnnnnnnnnnnnnnnnnnnnnnnnnnnnnnnnnnnnnnnnnnnnnnnnnnnnnnnnnnnnnnnnnnnnnnnnnnnnnnnnnnnnnnnnnnnnnnnnnnnnnnnnnnnnnnnnnnnnnnnnnnnnnnnnnnnnnnnnnnnnnnnnnnnnnnnnnnnnnnnnnnnnnnnnnnnnnnnnnnnnnnnnnnnnnnnnnnnnnnnnnnnnnnnnnnnnnnnnnnnnnnnnnnnnnnnnnnnnnnnnnnnnnnnnnnnnnnnnnnnnnnnnnnnnnnnnnnnnnnnnnnnnnnnnnnnnnnnnnnnnnnnnnnnnnnnnnnnnnnnnnnnnnnnnnnnnnnnnnnnnnnnnnnnnnnnnnnnnnnnnnnnnnnnnnnnnnnnnnnnnnnnnnnnnnnnnnnnnnnnnnnnnnnnnnnnnnnnnnnnnnnnnnnnnnnnnnnnnnnnnnnnnnnnnnnnnnnnnnnnnnnnnnnnnnnnnnnnnnnnnnnnnnnnnnnnnnnnnnnnnnnnnnnnnnnnnnnnnnnnnnnnnnnnnnnnnnnnnnnnnnnnnnnnnnnnnnnnnnnnnnnnnnnnnnnnnnnnnnnnnnnnnnnnnnnnnnnnnnnnnnnnnnnnnnnnnnnnnnnnnnnnnnnnnnnnnnnnnnnnnnnnnnnnnnnnnnnnnnnnnnnnnnnnnnnnnnnnnnnnnnnnnnnnnnnnnnnnnnnnnnnnnnnnnnnnnnnnnnnnnnnnnnnnnnnnnnnnnnnnnnnnnnnnnnnnnnnnnnnnnnnnnnnnnnnnnnnnnnnnnnnnnnnnnnnnnnnnnnnnnnnnnnnnnnnnnnnnnnnnnnnnnnnnnnnnnnnnnnnnnnnnnnnnnnnnnnnnnnnnnnnnnnnnnnnnnnnnnnnnnnnnnnnnnnnnnnnnnnnnnnnnnnnnnnnnnnnnnnnnnnnnnnnnnnnnnnnnnnnnnnnnnnnnnnnnnnnnnnnnnnnnnnnnnnnnnnnnnnnnnnnnnnnnnnnnnnnnnnnnnnnnnnnnnnnnnnnnnnnnnnnnnnnnnnnnnnnnnnnnnnnnnnnnnnnnnnnnnnnnnnnnnnnnnnnnnnnnnnnnnnnnnnnnnnnnnnnnnnnnnnnnnnnnnnnnnnnnnnnnnnnnnnnnnnnnnnnnnnnnnnnnnnnnnnnnnnnnnnnnnnnnnnnnnnnnnnnnnnnnnnnnnnnnnnnnnnnnnnnnnnnnnnnnnnnnnnnnnnnnnnnnnnnnnnnnnnnnnnnnnnnnnnnnnnnnnnnnnnnnnnnnnnnnnnnnnnnnnnnnnnnnnnnnnnnnnnnnnnnnnnnnnnnnnnnnnnnnnnnnnnnnnnnnnnnnnnnnnnnnnnnnnnnnnnnnnnnnnnnnnnnnnnnnnnnnnnnnnnnnnnnnnnnnnnnnnnnnnnnnnnnnnnnnnnnnnnnnnnnnnnnnnnnnnnnnnnnnnnnnnnnnnnnnnnnnnnnnnnnnnnnnnnnnnnnnnnnnnnnnnnnnnnnnnnnnnnnnnnnnnnnnnnnnnnnnnnnnnnnnnnnnnnnnnnnnnnnnnnnnnnnnnnnnnnnnnnnnnnnnnnnnnnnnnnnnnnnnnnnnnnnnnnnnnnnnnnnnnnnnnnnnnnnnnnnnnnnnnnnnnnnnnnnnnnnnnnnnnnnnnnnnnnnnnnnnnnnnnnnnnnnnnnnnnnnnnnnnnnnnnnnnnnnnnnnnnnnnnnnnnnnnnnnnnnnnnnnnnnnnnnnnnnnnnnnnnnnnnnnnnnnnnnnnnnnnnnnnnnnnnnnnnnnnnnnnnnnnnnnnnnnnnnnnnnnnnnnnnnnnnnnnnnnnnnnnnnnnnnnnnnnnnnnnnnnnnnnnnnnnnnnnnnnnnnnnnnnnnnnnnnnnnnnnnnnnnnnnnnnnnnnnnnnnnnnnnnnnnnnnnnnnnnnnnnnnnnnnnnnnnnnnnnnnnnnnnnnnnnnnnnnnnnnnnnnnnnnnnnnnnnnnnnnnnnnnnnnnnnnnnnnnnnnnnnnnnnnnnnnnnnnnnnnnnnnnnnnnnnnnnnnnnnnnnnnnnnnnnnnnnnnnnnnnnnnnnnnnnnnnnnnnnnnnnnnnnnnnnnnnnnnnnnnnnnnnnnnnnnnnnnnnnnnnnnnnnnnnnnnnnnnnnnnnnnnnnnnnnnnnnnnnnnnnnnnnnnnnnnnnnnnnnnnnnnnnnnnnnnnnnnnnnnnnnnnnnnnnnnnnnnnnnnnnnnnnnnnnnnnnnnnnnnnnnnnnnnnnnnnnnnnnnnnnnnnnnnnnnnnnnnnnnnnnnnnnnnnnnnnnnnnnnnnnnnnnnnnnnnnnnnnnnnnnnnnnnnnnnnnnnnnnnnnnnnnnnnnnnnnnnnnnnnnnnnnnnnnnnnnnnnnnnnnnnnnnnnnnnnnnnnnnnnnnnnnnnnnnnnnnnnnnnnnnnnnnnnnnnnnnnnnnnnnnnnnnnnnnnnnnnnnnnnnnnnnnnnnnnnnnnnnnnnnnnnnnnnnnnnnnnnnnnnnnnnnnnnnnnnnnnnnnnnnnnnnnnnnnnnnnnnnnnnnnnnnnnnnnnnnnnnnnnnnnnnnnnnnnnnnnnnnnnnnnnnnnnnnnnnnnnnnnnnnnnnnnnnnnnnnnnnnnnnnnnnnnnnnnnnnnnnnnnnnnnnnnnnnnnnnnnnnnnnnnnnnnnnnnnnnnnnnnnnnnnnnnnnnnnnnnnnnnnnnnnnnnnnnnnnnnnnnnnnnnnnnnnnnnnnnnnnnnnnnnnnnnnnnnnnnnnnnnnnnnnnnnnnnnnnnnnnnnnnnnnnnnnnnnnnnnnnnnnnnnnnnnnnnnnnnnnnnnnnnnnnnnnnnnnnnnnnnnnnnnnnnnnnnnnnnnnnnnnnnnnnnnnnnnnnnnnnnnnnnnnnnnnnnnnnnnnnnnnnnnnnnnnnnnnnnnnnnnnnnnnnnnnnnnnnnnnnnnnnnnnnnnnnnnnnnnnnnnnnnnnnnnnnnnnnnnnnnnnnnnnnnnnnnnnnnnnnnnnnnnnnnnnnnnnnnnnnnnnnnnnnnnnnnnnnnnnnnnnnnnnnnnnnnnnnnnnnnnnnnnnnnnnnnnnnnnnnnnnnnnnnnnnnnnnnnnnnnnnnnnnnnnnnnnnnnnnnnnnnnnnnnnnnnnnnnnnnnnnnnnnnnnnnnnnnnnnnnnnnnnnnnnnnnnnnnnnnnnnnnnnnnnnnnnnnnnnnnnnnnnnnnnnnnnnnnnnnnnnnctgaagctcctttctctgtgataactccagctgtgtcaagttgacacacaaaaccagccagtacaattgaccccttgtcaacttgacacacaaacacatcactagtaagcctcaacccttacattcttattcatccccaagatctaaataactttaaacgtcccacagtctttacatattcttaaattttcaatctctttaaaatatccatctcttttaaaatccaaagtctttttacaattaaaagtctcttaactgtgggctccactaaaatagtttcttccttcaagagggatatcagggcacagtcacaatcaaaagcaaaaatcaatctccaaccatccaatgtctgggatccaactcaatcttctggactcctccaagggcttgggtcacttctccagccatgccctttgtagcacacacgttgtcctctaggctccagatgcctgtactccgctgctgctgctcttggtggtcatctcattgtactggcatctccaaaacactgccccttcagtcctgagccatcaattgcaactgaggctgcaccttcaccaatggccttccttggcctctcacagtgccgagcctcagctgctatgcatgaccccttcatgccttcaaaaccagtaccacctgggtgacccttacaccttaccaagtcccgctgcagcaggagtacaaccttggctatctctggaacacagcctctttgtgctttcagaaaatactttccagaagatgtcacctcaacgatgctggtctcttcttcatcaccactaatttcttagctccagctaaccagcatcaatagtcccagtaatgcaaaggttttgctttagtagttctggtatcttgttaatcacagctgattcttcagccccagctaaccagaaccacagaataatcaaactccaaaatagcaatggctctgaaaagagtctttaatttnnnnnnnnnnnnnnnnnnnnnnnnnnnnnnnnnnnnnnnnnnnnnnnnnnnnnnnnnnnnnnnnnnnnnnnnnnnnnnnnnnnnnnnnnnnnnnnnnnnnnnnnnnnnnnnnnnnnnnnnnnnnnnnnnnnnnnnnnnnnnnnnnnnnnnnnnnnnnnnnnnnnnnnnnnnnnnnnnnnnnnnnnnnnnnnnnnnnnnnnnnnnnnnnnnnnnnnnnnnggtttattcagattacatttcccatacttctgttcattaccaaggaagtcagaactggaactcaagcagggcaaggagcaggagctgatgcagaggccatggagggatgttctttactggcttgcttcttgctggcttgctcagcctgctttcttatagaaccaagactaccagcccagagatggtcccacccacaaggggcctttcccccttgatcactaattgagaaaatgccttacagttggatctcatggaggcatttcctcaactgaagctccttcctctgtgataactccagctgtgtcaagttgacacaaaaccagccagtacaggtctaaactgagttgtgaggaacagatccatcctttttgccctcggtagaatactgatggggggtggtcacactgcaaactggggcaatagaagttgtggccttgtcagaggtatttctgtggttagagggggcctctgtggtagtgtgtgtgctgtgcttagcaagcaccctgatccttgtaccatcctttcttcaaaaaccacaaaaacttgacatctcccaggcccctaggggtctgtttgttgtttgtgaacaccaaccctgtgttgtccagatgtcaaaggctctgcctttgtcccatttcacaagccatgaggaggcctgagttcagattttgtcagcaccagcctcttaaaacctctggtgtcttatagagagttcccaagaagcagaaagagaaagagatgggcagaggttatacacactaactgaacccccttgaaggcagtgtggagaacacccctgggactctgccacctgagggtctggggactttgtgctgttcatcagtctgttgctatcatgaaggttagacggttcgttttacagtcttttctctctgcctgttctgtgagaactgttacctgccagaaacagccctggctgcaagaggccaggctagagtctaggagtctagggaaggccaggtgctgagccgagagagagttgggggattggagggatgggatggtggtggtagcatcacctgcttcaggttatgaggctagtgagtggcagacccacgtctaggcctacctgtgcagagtagagacaccaacaaaggaggaacaagaaagcaacaaatacactcaccctcacatccccatagtgcacctgcacattaaccgtggatgcaaaataatggggggggggaaacagttgcatctgcactgaacagtgcagaccctaaatgatgcctcataacccccatttacacagcaccaggatggcttagagagaacaaatgaccctggggtagtttagccaagagaggaaggtgtgagcagattatattgagattcagatgtcttatctaaggacagggatgtgttctaagatgtgatcactaggctatcttatcattgttgagtcaacaacatcccataacatgcttacacaagctaaggcagctactttgcaaatattatttaatccttgaagccgtttctgacagctagacgtaatcagcattccccctttccagatgtggaagttgaggcacagagatgttgactcttttgcctaaaatcacacagataggaaaaatggggttggtgatatagcttagtggattcaggccagcttggaccacagtgtgagactccattccatagaaaaatggggaaaatgcccattgagggatcctcaaagattctggggaagccctttgctacacagtgtggttcccatagaaccagtgcagtgatgtcattattttgaaagagacaaacatcatgggtggtccctgagttgagagacacagcctagagatcctgattcacctcctgcagcattgtgagaggcagcctttgtcttgccgggagccagctcacttgtccccagagtcggtgtgaccttggccacatccacttccttccccaggacctgcctcagtcctagcagcctcttctctgataagaagttgggaacactgtggtcccccttttaaaaggaaaatccaaaaaaaaaaaaaaaaaagtatgtattcagcaacaaggcaatcagaaagttgcctctatttcttctgcacttgggctggtttgttattttagttagaatggctttagagttaatggaaaagttgcaaacatagaacagagagtaccctgtgccctgagaacagagcatgccctgtgtccaccagcatgcgagctgccctgctgacagcagctaaccaacacttgccacagttactctaccagtccttgtacattagcgtcaactaaagcctggacttggttatacctcatgtcctctgtctgcaccaagaccctctccagagcagaggcaaaaccagtggctgcccatcattcaaaggtcccttgttatattgtttttgctgctgtgatgaatttctgagggaaacagtttaaaagatgaaggatttatgtgggctcatggtttgagagatctcagtttgtatttggttaacaacattgctgtggaccataagcaaaactgaattatggctgagagccaatgataagcaaagcctgtcatctcacggtggacaggaagtgacagagcaaagtccatcacctcctggtagacaggaagtggtggaacaaagccaaacaggaaagggcaagcggcatataaggacctgcccccaactgatctacttcctttagccaagccacacttcctaatgtttccagagtctctgaattagctctaagtcagagtcctgggcttcaggtcttcaacacatgaatctgtaggggacatttcctattggaaccacagtaggtaccaaacagccatgtgccttgccctggtggggttgactttgctcattgctgccagtttgtggcatctctctccctcagcctcattctttgccggcccaccccaccccatccccaccccctgcacacccctgctgcctgccctctttccctactacaccttggaagaaaagtcactctgctgtaagcaggggtgttatacccagcctcctggatgacaggactctccatggcattgggattcttcctaagattcatctcttgtctgtttacttaatcacaatagtatgtaatcatgagtctagttttataccttgggtgcaaactaccttgcaacctcgtgtttgtaccccagctgtagaggccaaaggtcaacctcctgtgttgttttcaggttggcttctttgtttctttctttcttcatttattattgagacaaggtcttatagaacctggagttcaataaggcggctaagctagctgtccagtgagccctcaggaatcccccacctgtctctgcctcctcagtactgggatcacagaatgtgccaccatcctgggccttttgcatgggttctgggaatcgaactcaggtcccgatgcttgcaaggcaagcactttgcccactaagatatctccctagctcctaatttgcaacattgtagaaagttgtccacagaagtctctcaagtggtttgtgatggttaggttttgtcagtttgacacaatctagggtcgtctgggaagagggaatctcaattgaaaaagtggctgcatcagattggcttgcaggcatttcaatggtgcattttcttaattaatgattactatagaagagccgagtgggtgaggccacctctaggcaggtgatcctgggttggttaagaaagcaagcagagcaagtctataagcagtgttacctcttggtctctgcttcagtccctgtgtccaggacctgcctcaacttcctgccacaacttccctcaataaccccgactgtgagcagtaagatgaaataaactctttcctccccagactacttttgctcatgtgtttgtcacatcagtggaaaacaaacaaggacatggctcttgctaaccccagcaccccacagttgtgtgtgttggtatcattgcccgctttctgtttggatcactttattgttttctcaccatagaagatactgttgtcttgtattgtatactgtctgccctcagcccaggactagccacatcctgtgtgtccaaagacttctgcttccttgattaaggaactctcctagaagccaaggtctgtgtgtgacctggacctgttgctattgaactgtcatcgataccagcttgaaagacaagttgttttgtttttttaattatctgttaatgggagagggcacacttgctatggtgggagtgtagagatcagaggaaacatgttgaagaaattgtttctttccttccaccgtgtgggttttggtcatcaggaactcaggtcatcaggtctggtggcaagtgctttttcctgctaagctatgtcactagccctttaaaaaccatcttcaatgagagaggcctcttgagcatttctctttggtagtgaggatttagctcagaattctaggggagtacgtgttgtcagatggatgggaagatgacggttcggtagatcacgagggtgctaattccattcaggcaaggttctttggtaacacagggaagccctgtttcctgtctctcatccttgtggcagccctgtagaacagggacacacgctgcatccacccataggaaacagccctgcaaggggagcaaacacttggcttgagttcagcttctaggtgtggtgccttgctcagttccaccactggctgcctttagaggccaaaaactgactgcatcccagcccctagtccaaatacttattcctttggcttgtcttaagaagctaggattctcccatctaaccacatccccagacctgctgggtcatgagtgggaccattctgtgtggaacggggacatttggatctctcccttcagttcttgagaagctaatccctctattgtcgacaaattgtgtttctgctctctgaaagaagggccactggtgtgcttttaaggcacctatacaatgagctgtggcgagctttgagaaaagctgcctgggccttgccatggccaggtggtaagtcagaggaattgtgagctgcagtttccccacagctagtaaatgcatcttgggcaatgcatcctttagtccattgccgggtctctgaccttctgcacacactcccagctctgttggggtggagccccaggtgagaggattttgagctacaggtgagctaccacagctacatgagcccaggatggcctctgggctgtctacctagtcctgtgtagatctggcctttgccaaactagatgcatccctttggacattatgggaaattccttcaactacaaacagctctaattatataggtccaaaatgaagggtaaaaacaatcaattagagtgcatgtagattctgggttttatctattagtttgagggcgttactgtagctgtgtaactctttatctgaatcttttcttttttccatcctaactattgatgaaaacattggcttttcaaaacccatcctgtcctatgccagcacttgggaagcagatatgaggagggtgagtctctgcgggttcaagaccatcagggttatacagtgatactctgtctcagagaaccaaaacagacatcctagaaagcatatgatctgtggttgcacatgcctgtaatcacagtactcaggatgctgaaacaggagaaaccactgcaaattcaatgttacgctgggttccatagcatgtttcagtccagcttggactaccaagcaagacactgtatcaaaacacaaaacaacaaaaataccccattctgactaagacagacagagaggggtcctcagttgtcctcaccagcctcagtgaatgccttaatttatcacaaaatgaactctcgtgtaaccttctggggggggggtaagggcccccaagatgctggagatagaagaacattttctaaaaagacagctcggaatccttcacttgtctccctccctacaaagcctcccagagaaggcaagtggcctccctgacaacccatggcagctctgcattggaatttggaaggatacaaccatcctgacttggcccaagggctgtcattactgtctagttcagagttcagatggaggaatcctagctgttcacagaaattagagcccaatgtggcacccagcccagtggctgttgggggaaggccattctgttttgggggttggagtgtggcttcccagtggattgtgttgggagaaaggaaaaaagagacagaagccagactgctgacccggatgtcaggccaggctagtgaggagtcagaccactgaggtccactagtggcctgcttaatcatcgaaacctctcaggagcaggcaccttggtagtgtggccaagagggtgaacagctctgtggccggtcaccctactgagcattcaggagtgatcagaggccccagtgcctgtttctgtcatctgctttccccattgcttgccttggcctctctccactcagagccaaggcctgaggtctgcagcttggaatcaaggcggtctggttttcctacccaggagccccctgcacaccctgtcacttttttagtttacagagacatgtgggaagacagaaatgtagaattccaacatgtgctaccagatctagccagtagcattttactgaggtcttgttgcctaggcaggaatgaaacatcaggctgtgaaagggtacccatctcaactctgcccacctcccccaggtcatggtagggctggcctgaaatcccttttcacccccctctgaaactaaggccctaagagactcctgttagcacaacaccatgcctggtctggaaaagttcttacaatgacagatgcccctgcctcaggaaattcccagggttttgaagctctgtactaagagttggaaacaaagaccagctgtatttcatattatggtacacccactcataacattcattcgtaggcatttcctccagcctcactggttcccacggatctgtgtgcaaagaggcaagctaaccttgaacctgttgaggaaataaagtggcttcgtatttgaaagacatccttgggacagttcaagttcagtgtctcagccattgtctcgaggtggggagtaaagtctaatggaagcatctaaagtctgagggcctgagctcaaacccatctctagcctctcccattccgtcttaagctcacctggctctcttgggttcatcattaccacaccccttgtagatttcttatgagaaattgcaagttcaggcttggggccaactggggagacagtatatgacagctgctgtcggccagcagcatagagctaactgtgtgttttattaatgacactacattcatgcctaagatgacctggcattgtcatggtgggattaataaccagcagttgtggcagcagaatttggaaccaaaggagaggtcttctccagagcctcccacactcagggtcatgtcctcacacatggggatgtcctggtatccttgtgccccagccagccctaaacaacttggccacactcctagtttggggatttctagctgaactgtgtgggacctgagcccaggaaacagagtccaggggcagagtgaggatggaggaatggggacactggccaagcgctttccttccctcgacagaatgtttgaggaagccaggaacattccagaaagtgtcatctgggaaggaagggtgagcctgagaagggttagctgtgcctgaaaaggacatgataaaacagcagttggtgacaaaggagaggcctctccatgcaattggggaccatgaggaatggagccactccgtgatcagatgtggtacaacctaggcaacttatggagaccttatctcagaataaggaacggtgaatgaaaggtgcatagtggaagcaccttgcttagcacacaagaggccgtgtgttcaatcctcagtaccacaaggtccaaacaaaatgttagctacttttatttttgcaaagggaaaaaaagtatacatttccccatacttataaatgttttcaacagacactccccacccacttctcaccccctccctcaaaaagagctgagtgctagagcatgaattgacattcaaccaactcccaactattagggcttctctgatcctggatcctggaccatcctcatacagaaccccgctgaatccccatgcatcgaccatgcgtagactcagtgcaaatgagaaatggagacttgaggatctcaaatttggattcactgttctcagaggtttgcttcagacaccctctggatgatttccaccccgcacgctgctgaccctctggcctccaccaaagcctccgactcacagagcccctgcttctgccatttcagatgttcctggtgtgccgggacaacaacctgaagcaattggtgctgtgtgtccacttcccttccctgaagggcagctcagctgaggtgctggagtaccccatcaaagaagaaaaggctagtaagttcttacctccccccgcccctccagacacagcagcaaaacctgtgagacacagaccctacattctgtccccatgtttaaaactagaatagggaaaatcaattttagggttggctccaaggtagcagtttgggttaggtaaggatttgggaggacacactcatgttggtgtgtctcctgtgcccactttgcatggactagaacttgaccaatcactcaagtatcaaaattgtcagacctagaggcacatatgggcaattctaccccttgggtgacagcaggagaaagatttgctgcaacttgaaggcctgctacacagtgtgtgtcaggttagaaagtgtccagtcagaaaaggcctgtttcaaaacatgaagccaagtcacagttactattcactttctctgctcacggcttgtaggctttgcttcctcgtagccatcgtcaagttgtctcttgtttgctgagcacaaaggacgacagagaaaggggaggaaatgagatgtccggtcctgggttccagtgactcattactacattctcaagccatgacttgccgtgtgtcgtgtcgtctctctgaaattcagctttctcttccgtcgactgaaactaacagtcactgtcctatctctatcccagagcctttgttagggtcacatgggcaagcaattccaaaggcaaaactcctgggtgttcatagggctaccagaacagacctgggcttgtggggagcctgtttggggatctttaatccaggctggcctcgaactcatggtcctcctacctcagcctttccactgccactgacaggtatataccaccatgcctggattccacagtggctttgtactattaaagacgtcatggagtttggacctcttctgacctaggctcccttgttttgaaccagcttctgactcctttcaaaggccatgtgttcacgggttagatttggaaatctaagaagcctgtgacaagaatccataggctattccaggcatgagctcacacccagagaaacaattccagggtgttccctgaggcttatcaccctaggtcaacagcagaatgacagtaagtactcttggatgcctgcttttcaagacactgagaacctacatagatgaataagaaggaagtccttgccttagggtgagggggttttcagtcaggctagagggtggctatgctagagcagggctaacaggcatcacttgttctgtggtatgacagctgttactgccagggggcacctgtcaggtggggcaggtccagatcctccctaaactgggaagaatatcaaagaatatctactgtgtgagggtatctaagaggagaaggctttagggttaggctctgaatgtgtgaaggtgcttgtgtttgtccaataaaagggtgattttctacaaaaggaaagtagggcaggtccccatcctgctgggagaaggtctttccagtaactcaaaccacatgaacaaaacgcctgtgccccaagccaggcagtggtatcaaatgcctttaatacttgcactcaggaggaagaggcaagcagatctctgagttcaaggccagcctggtccacagagtgagtgccaggagagccagggctgcaccgagaatgtatatccctaggtagtacaggtgctgcatcctatggcaagaacacacaacgcctgcctcttaggatatcaagtaagataaggagacagaagcgaaaaggcttttactgtcctgggggatgtgccaggtggaaatcagccaactgcctcaataccaagaaatgacttaaagctgcaggaagctaatttccaagcacaggccagctatgcctcccttaggccccctgcaggcaccccactgttctgctatcttcagcatgtgacctccatattatacggttgggtccaaggtaactgtgtagactggaaaaaagagtctaggcacctcctatacccatattttgttagctagaactctgtcacatgaccaaacctaactgcaggggacactgtgaaatatagtgaactatgtgcccagggaagcagacccactggattttttaatatataacttgtttttatgtgtattggtgttttgcctgcgtgtgagggtgtcagaagccctggaactggagttacagacaggtatgagctgctgtgtggttgctgggaattgaacccggttcctctggaagagcagccagtgctctccaccacaaagccatctctccagccccaagcagaaggattttaaggaattctgggagttgccccgccctctagtatgagagtacagaggtggatctggaaagggctgtggagtcagggtgggggtggggttctcaaagaggatggggagtgtttcggtttttccaaaccactgaagtacattgtgtcctttgatgactcagaaagggtggggttgtttggattgtctcttgttccccaagaacctgggtcatttttcatatggcctggagaatgtgaccttcacggtgtctctggggccacatgatgctggatgtgtttttgaccccaagagaaggttgaccagtaggcacaaactgctgggctaggatttcgggatccccctgcctcttactgagagtcatgacttcaggactaggctgccacatcttagtttcctctgtacatttagggacccacatgccttgagcgagtgagttttagctctaggattggaaactgctcagatgggggcatgcccagggccgtgtggagaaagtacaggatcaaggcagggtgcctgagggttttagaggtgagaggcgagactggagctggccctggagctgtctggaattcttctctgctcctttgtcctatgtgccttttctgctggctggctgctgcctttggggcatcacatctaggcctctgcaccttaaagacaacccagcccttggaaaccagggcacgagtttgatttcatgtcccacttccaattcagagccttatgaaggcaagtaagtgtgagatggtggttagcagggttaagacagattcagttcagaaacattgcagccattgggctctcacgtgcagaaccggcccagtcccgactcagcttgcacaggtgggaacttatagcaaggtggatgaaagatctaatgggatgctggctgaagatggacagattgtcccttcttctaggggatgggaaacaagaaaagcctgattgggtctaaatgacggtcggacaggtagggtggaggttcctgtcacacttagaggggtcgttgctagaacaggcagtatatgaagggtgtctgagaaggtccaggagctgtgaaagtttagctgagtgaagttttgtcaagatggatggatgtgtattaccagaactgtgagctgggcttggccacctgtcctcaataggcaaatgaagcagatgcgtaatgatgtaaggatgagaaaggagagctcctcgctgtgggaagacgaacaacttgagagatccagcgaccatcctccacaagtccatcttcgggatgctgagatggggtttaggttaagtggagggtacgaggcatgcgtaactaagccatcttgacggaggcatggccctctgcccaacatgtcactgtctggaccccagtgtgtcctgcaaggttgtctgacaagttatcagaaatctgtgaactctctttccaggaaataaatcctcctctagctggctgcagggccccaggcttctcctcgtcctagctgagaattcactacttcaattgtgtgatagcccagagaagggacatgagtgtctcctgaggggaaaaaaaaaaatcttcatttctgccgagatggtcaaaccagactactcagaaatgggagcactaacatcccaggttcttggttttctcccaggccacatggtagaattccatgcattttcaggcttcaagttcagcattcagcattcagccttgccttgaagatagtcaaaatgcaaaccgaagccatttgtgtaagctggttcttcaatccttattccaacacgttggccacaaacacagaggtgcccaccgcttgggtatttcattttgttctctctttatattactctgctgctcctaaacctctttcttttgaggtctgctgccagagcaagggcattggctgggctgtttctctgcctcaactgtctctaagttccatgctcctccctctttttgaattctgtgcctttgatgtcatagcttggtttctctcacctctgtctcttgccacttgtgtgactgggcaaaaacgcttcatgtctccggccccccggcctccctgcctgtgaggtagggatagtgatggtgcctttcctcagagagtcctggaaggacttagttatccagatcatgtagggtgatcgtgaggctctgtggccaagctaacttcagtggggtgccctcaaggggaagtgggcaatggaagggcccaggcctagaactggagctttctgggtttccccatgcaaagtcgagggaggaaaccagggggtgtcccaaaagtgagtcttgctttgaccacagctgtgctctgaggcactttaaatcccctccctagtttctttttttttttttcttttatgttttttccagacagcatttctctgtgttcccctggccatcctggaactcacattgtagaccaggctgtccttgaacccggacatctgcctgcctctgcttcctgaatgctggtattaaaggtgtgcaccaccactgcccagcttctttccccgattccttacaaagattcttctttgaaaaatcctgattctgtcagctaagccatgcttgtagtggtaacaggctgccctacacctttagttgcttacacacaaagtagcatggatgtactatagaatacatctgattaaaacactcaaagacatagtaacatgagtatgttttcactggatctttccactgttgctgcagagctctacccatctgaaacatgagaaagtagagttccataatgactctagaaggttccactcagaaatgcagccaccacttcccctacaactcattgaccaaaacaggccacatggccagactggagcccagtaggacaggaagaatcatctctcctcatacagtggcagcaggaagggaaagtggcccagagattacagggggatttatagcagggaaggagcctgttgaaggagccaaatgaaggatgagtgaagctatgccaatttctgggaggcaatgctgccccttgatggctggtatgaacatcctaccctagaggacactacaacaaaagcatcccttatcctaaatgcttgagaccaaaagtgttgcagactctccctggattttgaaatagtttgcacatgtgtaacatggtcttggggatgaggcttaagcctaacaaggaaacttggttatgttgtatgcatacagtatgcacatatcctggaagatatttcatatatatatatcaaggcatctgccttttaacttgtcagttgacatcagatgtacttttcattcatggcataatgttggtgggccaaaaaaatgtcttggaatttggaacatttcagatttcaaatttccagataaagaccgttcagctgaacctggttttactaatatgcacagaagtggtgatagacatatccatggggtggcagtttcctagtggttgctgaataaaggaagaagaagaagaagaaaaactatttgggattgtgtctagcagagcaggcctgaggcagtggcatgaccaggcccatgcaggaagtgggctacgcagtgctcaaggcctaagccgcagtctgaccactcctacccagtgcctctggcccactgaccctggctttagaagggtctgtgcaccaattctgagtaaatcttcactctcgggggtgtgggtgggtttacatcaacttgaacacatcagcatctgagaacagtccatctcctgagcaactatggcaaattctcatgctgattggtatgggggatcatcacctctagatgcaaaggggagggatcttggatgcgtcctcctgggcagtagagatccatgtgggcatgaccacgtgataggcatggccacgtggccagaatgcctttgacttacttctcttactcttgaatatgacttctctccatactcttggtaccgcccaaaaccctagaatgcagtctgacctgtttttgaatggagacagctcaagtcaatgaacaggtgttatccataaaggaagagttgacatagagactccatattttagctggaagtgaggcagggttgattgctttgtgggaggccctgcaggcttgtccatgcaaaccccttcgttttcatttttcttctagaacatgacttttggaaagaatgactgttggttctaggtttttattcttgtgagatcaggtaagatgtcagatgtccttgcactatggtttcctcatctgtgaattaagggtgtctccccagcacagctgagggcagatccttgaaagaaggtatcagcagggaagcgctcagcatcttcttctgggaagaagtcacagccctacttgtagcaagtactcaatgcacagtggcagttataattagcagcaagtagctcacacctcacaacccctcatttcctgtactctctgtcctgaggactgctctaaaaacattgctgcttaggggccacaggatattgggctaaactagccaccattcacttctttctgccttcatcattccagctttgagtttccagacctggggttgggtcaagatgaggcagggaggtcaacttagctctaagaaccttgggaaactaacttaacctcctcctcttcctcttcttcctcctcctctttctcttctttcttctcctcttttccctcttcatctttctctttctcctcttcctcttcctcttcctcctcctcctccttttgatatctcacaccagcctcccaagtgtttgaattatagacatgagttacatccccatcactccctcatctttccaccctttcatattcctgtctttcctttgcattttcgaagccaaggctaacctcaaccccttgatcttccgtctcctgggtgccatgattacttgctctctctcgatcttaagtcacagtcatgcatgccactacctacccttccttttcaccatcttattttatatgagctttctcagctctgttctgctaagcatgtgacaaaatgtatccccaactaagtatctgctaagtgggttctgaggggaaatgtaagggggctaagacagaaccccagtactgagcaagggaaacaaggccactgtcctaagccctataatctaagcctgggaagttgagaaacagttatgaggaagaacattaggggaacaggctggagaagctgaagccacagtcttctatgtcaaagctcagaaacaaggaagcaaatggggccaaggctaaaccatgctcaggtggtaactgaggcagcaaaatcaaggcttccaggggagaatttgactgggtcaccagtagctgtgacaatcacactacactggtaaaggtttggtttgtagcgtcatggaaaggtttcgagcatgaagtagcccgatgagatgggtgcttcaggacccctgaactgtgtggcagccagcagggacagtgaccagccacaagaggagaagagaaagggattgtaaaaacaaacaaacaaaaacaaatttagcaaaagcttgatgactgcctaggagttgaaactggagagctggaagacaagacggccatgagaaggagagcactctgagttgtcacgggagcactctagaaggcagactccaacaggtgagaagaggagcactcaggaggagtaagtgcctcatgagatgtctggggcagcaatgtttgtccagtgaacacaaacatgggagctgggggagtttgtctggttccaaaagaactggacttgggagatcttgacagagacatagaaagatggagagaacatcatcttgagagggaaatgatggggaaaatgggttagtgtcccagtgggtctgcctgtggggagtgctcctgctctacgtgtgggtgctcctggtctgcctaggaggggtggtcctggtctgtgtgtagatgctcctggtctgcctgggggtagtgctcctgatctgtatgtgggtgttcctggtctgcatgtggaaagtgcttctagtctgcatgtgggtactcctggtctgcctggggaagtgctcctagtctgcatgtgagtgttcttggtctacttgtagggagtggtactagtctgcatgtatgttcctggtcttcatgtgcctgagtgctgccatctaaagggatagcacttgactcagctgtttctggatcagagtcttctacttaccaacccttcttttgaagacagctgtaggggatgttagggccaagccctaagggtctcttggcttccagtcacaggcatggatgatcttggttcagcatgtgcctcagtctgtctgtgctgccaaaaaaacaactaactgaaactgggcatagtctaaaaagacattcatatttcacagtttggggaactaggaaggccaatattaaggcaagttacatcgtctgctgagacctgctctctgtcccatcttgggggtgtgaaggagcagagagctgtgttctccatggaaagaggtggaaggaccagtgagctgaactcttcctgaagccttgtaagtgtagggaaccttggagtcagctcaggatgccccaagaccaagttctcaacacaaaagagattgatttgcctaagaggacaaagggcaaggaataagagacaaagacaggagacaggaagaagaggaagggaacaagggagagggggcaggggtatttgtcccagatgacaaaggactgcctctggatagagaggagacagttgtgatccataggcaaatggcagtttataaaggtaaaaaaaggaaaccctgtattaggatgaggtgcttaattttattgggcatgttaattaagtgagccaaaaggagcttttggttgttgaattttaatactttgatggctggaccttggtagtggccaaagaaggaaatagggaaatagaccttggtggttagctttagaaatgtaacctaatttgggggggtgggggtgggtgtctgtttgttcttgctgttcttttgtttttgttcgtttttgagcatggcagagggaatggagggaaagggccagacttgccagagtcacatgctctagtgggtgagtgtcccttcagtaaggacctaaagacttagtttagtggtagatcacttgtatagcatacaagaggccttgactgcatcccagcatcacacatgaaatcaaataaaataattaaggagtgggaatgtggctatattgattgagtgtttacctaacatacataaagccttgggtccaatccccccaggcctcaggcattacataaaactgtgtggagttcatgtctgtctctggggctcggtcaccagacaggatagcccagtctcaaaagacaagatggatggctcctggggagcaacacccaaagaacacacacacacatgtccaggcacatgggcattcgtacacacgcatgtgtgcgtgcacacacacacttcagggttagaaacttcacccttttatcagacgtggatgaattcagcaggcagaaagtcagtaaggacacagttaagctcagcagagcctatcaactggatgtaacagacgagctagatccgtggaccacttcattgcagaagccatacatacacacctctcccgtttgtgggaagcattcatcactctaggtcataagatgtccattgacagattatggaaactagaaagcagagcacacagaatcacagtaggaatcaatgaacagaagaagacagtggtagatcagacagcgcatcccccataacaccaggtcaaaggaagaaacctcgcggaaaaatttaaaatacttgaaatgaaaatccaaccttttcaaaatctgtagaggacagtgggcagtgcctaggagaaacagatagcatcgaatgcatagaagagaataaaattagatttcctactcagtgctcccgcataactagctctaggaactaagaaggatcatgtgacaggtgaccttccttcccaccaaccaggcaggggcctgttacagctccaaggaagctgtaggaaggacagacaagaaatgtgtatgaacatacctaagacctgcaggcgtgtaacggtggcctaaacaccgctgtgcatgttccggtagacagagcaggattggggatgaagctagatcagagtctgcctcttaaagtcactaggatgggtacttgagtggatgagagcaagactagacaaaactagacaacatacatgtgatgattagatgggcttccttgccttccatctggctgaggaggcagagtagacgattacagaatagtgtgattgggactcttgtgatctagtaaaagggtaaaaaaaggagctctgcagggatgctattatactctagaccagggattctcagcctaagggtcctttcacaggagtcacctgagaccactagaaaacacagatatttacattacaattcataacagtggcacaactacagagatggagtagcaacaaaaataactttatggttgggaatcaccacaacatgagggaccgtattaaagggtcacagtattaggaaggttgagagccagcgttatatatagttaaggcgccagagcaggattggggatgaagctagatcagagtctgcctcttaaagtcactaggatgggtacttgagtggatgagagcaagactagacaaaactagacaacatagttgtgtatcatagttcacagtacaaccctgtgtggaggctcagctcctgcggagcagagcgcctgatattgaggatgtctagggagagattctcagaaatcttagctctaggggagtttggggaagttgactgccactctgtatacctctagctcacttcccaggcgtgcttttgctctgggagatcccaggcctaagaagaaagaatagcagtggtgccattgtgagcttggacaaagccctgtgtgggtgtcagtgaagtgggtcctcatcagcttcctcaggaacttgtgtaaggtactcagtgccactaggcctcctgggagaggggactcctgactttccctggcaagggatagttcaaagtgccctggaagggtaaggccccatacctgttcccaactgaacatgtcctacatccctagaccagaaattctcaacacaacctagaaaacataggctgctgtgctcagacagaaattctgggacatcccaccaaaaaaaaaaaaaaaaatggatttccatggctcttcatgcctgtctcccccctaatttgtcaggatccatgactgtttttccttgctctttgtggcacggctgacacagcctttattacatttattgcttccgtcttggttttcacgttgtcaacatttaggggatttaccctaaaggaatttccccgtctggaatgctgcttttaggtagttccctgtcttagatgacactaggtacctacaaaggtaggtacttcactaggtagcagatgaaactaaacccccatcactgcaccctgagtttttaaacctttggctgcagttattgtgggcttactacatggcttttggacctccagtcttctgcctttcacacctctgaagtagttgttaggatctcctctttgcagctgaagtaatggtgcctgagattgttacctgggattcacgcaagtcagagagagcgtgcctctttcacctgaatccatttgattccagtcatatctctgtatccctccttaacagactctcctaggggccaaggaagatggcagagagggaaaaagagaagtcaatagtccagtcattaatacctgcacagtcgagtcattgtttcctctttgtgttccagacacagaaccagaatcaggcagaaaggaagcaggtcagggctacgtggcctcagtgaggaaggcaatggagatagagttccaggagtgcctctgcctctgcctctgcctctgcctctgcctctgcctctgcctctgcctctgcctctgcctctgcctctgcctctgcctctgcctctgcctctgcctctgcctctgcctctgcctctgcctctgcctctgcctctgcctctgcctctgcctctgcctctgcctctgcctctgcctctgcctctgcctctgcctctgcctctgcctctgcctctgcctctgcctctgccggatgagcacaggcagtctttcctctgggctaaggccctggtcatgctagaatcagtcagaacctctggagagagttgtatgtgcctctccccagctagaaattaagtatatcataaaaccagaaggtgctatacccaggatggttttagttttccctagagagctgattatggccatccccctgctgctcccacttcccatctgaaaaaccaggaggtgaataaccaccccagagaaccttgggccttcacatgtatgtgagcatcttgcaaactaaagcatggggtggggcatacatggtagtttgagttggaatctgagcacactgtgataggatcttaaattcttggagaaatcagatagatgatgtgactcagctattcatggcttgcatttggagtcttgagggaatttccacacagacatctgaggtgcttctccttggcttcagcatcctgaggaccacagcctgtcatgtcattctctggaagtatgccacggagatcccacttgcttttctttgagaagtattcatggcaggggccatgaaagaaaaagccaagagacagacttagctttgaagttcagtggtcacatactatacagataaacatgggcagaagttcatgcttataacctatgggacctccctatagcagaatttgggggagagccttagaaaagggtgtgttgggtttgtgttggatcccctgggcctctgaggactttagtttcctaccagagtcttgggactccagcaggatctcaggtttgcagaatgtgactcaatggattgctgtaagaatctccaacttctaggctagcctaaatcatccacatgccccttcctcctctgaattgtggcaccagaagtacgtagtgagacgtggctgggtgctgagtcttggctaagtgtgatgggagaaatgaaggaatgccataagatagcagtcagttatcaagcatttggtaggaaatgtttcttttctaatttcgacccaggatctctccacatgctcagcctgacctcagacataccatcctcctgcctcagcctcccaagtgctaggattccaattgctctgctagtttaatctgcatatcagctttaggatatggcaccacagtgtggcaggttaaggtatatttttttgacacttcttccttcctggggtggagtcttactgcccccttcccttgaatctacttgagcctgtgacatctgtggtcaacagaataagcagaaatggctctagccagttcctcctaggttttcagagaattggcagcttctttttaatctctgagagccgagttgcctccatcctggggagaagggtctgggggtaatgggagggagaagggcctggctggatgtcgcttttaactctccctgatttgaggggaaacatcctggatcctgcagacaagaccaggacccaagtgaaaaagccatttcccctaggaacagaagaatctcccagctgagccctgcctgcttttgacccataaatcatgagctacagttgctatttccaagccactcagttctgtcttctgttacacagacgtagataacaaaaatcataacccctgttttttcagagaccaaggctagtcagaatcacacattcgtgagaggcaaagccacaatttaaaccacagcagtccaactctcagctctcagcgcctgctcctactactccatgggcctattcttgggccagtgagatggctcagcaggcaaaaacattcactaccaaatctgacaaccgagttcatgcctgggacccactcacatggtagaagagaaattcaacttccataagctgtcctctgaattcctagtgcacagagttgtcacatgcactgtcccttgcccccctcccctgcatataaatagatacagtttttgagggagaggggctcaagaaagggtttcactatgtggctctggctgtcctgaaactcactctgtagaccaggctggtctaaaactcccagagatccacctgcctctgcctcctgagtgctgggactaaaggtgtgcgccaccaccacctggatattaaaaaaaataatttataaagcaaaaataaatgtgcacctgttatcccagcatttgtagggactggaggaggaatccaagagaggaggaccatgagtttgaggacaacttgggctacaggaggggaccctgtctcagaaggaagaagaggaatagatgcttctgctctcagaaaacttctctccaagaagaggaactcacttgccatgtttagagttacataccttggtttatttgtttattcagtttaagtacactaggttggctcaaggtatgcgtagatgactaatctagacaatcttaggatttgcccacagaagaactgccccaccaccactggtgatgaatgggtaggtgtggaaggtgggggtgtcctgaaggacagagagaaatgtcctatttggtgagagaggaagtgcatatgaagtggcaggacagctcatgcagagtgccagggtacggagtgtgtgcaggggaagctccgcgcaggcaaatgtggaaggaaggggtaggcagagaacccagagcttgcgcacaggccttgagtgagactcagcctttgtccaaagaccctccagagcctaatgagggacatgtgggcagggacatcatctgatgtatcttttaaaagaagttgcatgtctttacgagtggggatggagaggtaaaggctggaatgcaagagaggccctgaggttgaaaaacgaccagtgagcggtctaaagcgaatgttagggacagcgtggtgggcctaaggagaaggaaaatgtcccagagatattaaagagaactagcctgcagaaaggaaaggaactgtttaaaagaacatagcaggggatatggctaaccatgctacctggtatgcagtaagtacttagcaaataacaggggtgtgttaggagctatgggccgcattatgggaggacagggctctgctccagcattgatatccctgactcaaaacctatgcccaagtagacatgaaaaagatgtatgtaaactgacccataactggacaaggtgagccccccccccccacacacacacacacacgtaaccccagtagccttgttcttcaaagatgcagactcctgactgagccaaggctcagtctccctaggatgacaaagacagctaagaggaaagttgacatttatgaagctggctctgtagtctcacagaaggcaatgtacccacttgcctaagactggccccatcttaattcataattcatgctgcatctttctgtttctgcattgctagtttaggacataggaatccagaccctctggggcgagctcagttccaagccttgatattgggaacccacaatattccatcagcaggctgctatccaaagcaccccctagactcctgctaagtgcttcagggaccctagcaggtcctcccttgctttgtgagactgcccaggcaggccctgaagccagcattcctgacctctgaccagtaggtgccagcagctccatctcctaaggcccccacactcccaggtgagaacagtgaccttatccagtgtggtggctctcaagcctttgaaatgtgcctgagttgcactgagatgaagcacaagtgcaaagcacactcccaggtctttcatacttagcgtgggaaagaaaaatagcatgtatacgcggtgatgtatcctctgtgatgtctcagcatgctaagatgcagccttggcacgtacttgtaaaatcctgaagttgaagcagtgttccctaactatccgcggtgagccctctgtaacacttggagctgacctcctatcagggtggtgcccgggctgcctgcctcctcactctcccttcttttcatgttgtgggcagccacaagcctcccttgactggttcagtatagcagggagagggatggtgtccccatgtccacagctctcttagcatccccacactcccacctgccttctcccagaagaccttccatgtcttactcttgatttagtcttccctgatatgtgacagtttgcaaatctttccagtgcccccttctgttttggcatctgaacctataaataactcccagatgaagttctatctacatcatggcagtttctcccgtgttccttttcagactcatgaagcctcctgtttacacttgctcaataggaaggaacagcttccaaaaacaggagccttttatttaaacaagaacggtatgagatcagtgcagctgcccctgtggggttcagagaaggtctttcacaaatgcaaacctgagaggatgtcataagaaccctcaaaggatcctacagtggggaccctgggaagaaatgaggcccatgcccatgctaatgagttgggcctctggcacctatgtgatgacatcctgtcctagagaacaagatataagcagttccaacccagggagagcaggtagcactattcccaggaagaccttcccaggtgtctcccaacaacaagggaggagactggcctgaaggagagtagctctgtgctgacaccaggcaggaatcactgactgatgtccggtgggaactctggtgtgtcctccctgccccctctgctccacgccactgctcttgagtaaaagcctggtgagcttgctagtggccctgtcatggcctgaccacacccctgggccagctactgaatcttgctgcttttcccgctttagcaatgactggggcatttggaagggaccttgtttagagctctatctgggtctccttgtagctctcctattagattccagcttcagtgccccagggcaagcaaggctcattcagtcccaacaatgcagacatcctgctgcggtgctggttggtggagaatctggggctgaggaagatgatctaataatacaagccaaggagttgtagatgaggcttggggtgactggcaaaggcacagggaagggggctccaggatcagccagactctagagggaaaggcatccccagaatgtccttactggccaggcaaaaaggcagtctctggtacattttgaacagccccctttcccagctgctggagcctcactccatatcacctctccacacccaggttctctgggtgctttttcactctgcctcagccactctggcctctgctcaagaggaaggaacagctgtgaccgtgcaactgcccctgtggggttcagagatggtctttcacaaatgcaaacctgaatgacccacagggcctccatcaggtactggctctcacagtacctcacttgcactctgaaagtgagcctcagaaaggctttgcctggtctgtggctagaggctctccctgactgggctggtgctgtacagtcttgacctatggtgggagctagctttcccagcctaggtacagacctttccccagaggacacaggagcttctctgggtggatctggggatggttcgtccctcccttccctgcttctgtgaggctggcagctctggtcaggcagcactcccttcagcaggttccagcctctactccaggctctcgggtgagataaaactacatcacagaagtctcagtggcaaggggacctcacactgttggggctcaggactctggtttgttgttattttcctcccctaccccctgtcctacacacacacacacacacacacacacacacacacacacacacactgccatctctgagaacaggggaagcagctttcatgggttttacaaaattgaactttggctgggtctgcagagagagacaggtagttcttcttccatggcagacacacacacacacctcacacatatacacctcacacacacaaaggtcaactgtggtcttcaaaatggggaaggagcccactccttgatgttcatggtgggggaggggggacactgtagctgggatgatccctggaagagggggagcttcccttcactctggggagccctgcatactttactctctccctagtctccagcctcttgtcaccttccctttctgtccttggggtctgccatttcctgtcaaggactgagccagtgaagtagtaaccttttgggataagggtgtcaaaatttactaggagtagatagatgttccaaccctctctcagtgacaaggaactcagagattagctccatggtgttacataataacattggtaaggaggtatcctttgggagatacccaaagttccccccagccaggtgtccccagccaggtgtccctagccaggtgttcccagccaggtgttcccagccaggtgttcccagccaggtgtccccagccaggtgttcccagccaggtgtccccagccaggtgtccccagccaggtgtccccagccaggtgtccctagccaggtgttcccagccaggtgttcccagccaggtgttcccagccaggtgtccccagccaggtgttcccagccaggtgtccccagccaggtgtccccagccaggtgttcccagccaggtgtccccagccaggtgtcccaagccaggtgtctccagccaggtgtccccagccaggtgtccccagccaggtgtctccagccaggtgtccccagccaggtgtccccagccaggtgtccccagccaggtgtccccagccaggtgtcctcagccaggtgtccccagccaggtatcatggggtttttttcttctccaagcctaagaagttggcccgtggcctctcctgggggtgtggcacccagattgcctgacccctttcccaacagtttcctgctgggtcagtcagatctgacccatcaggtgtttgcggtgtgcacagagaggcctggatacatgagagttaaagcaaatgaatgtagctccacccaacccaactggattttcagtcatccttagagaacaagcaggcagctacatctcggtgtttacctcaggaagaagttccagatagatccctttgccatgaaaaggaaaggtccctgtgtcccttctgtgaggtctcctgtctgcttccttatctttacccttggtttctacaggccaggctggggagtgtctctgaccaaacccctcgtgtgggtgtcacaactaaacattctagtaagagctattgttggcagagtggtaggcgtgagatctccagccgtggctatacagagaaaccctgtcttgaaagccaccccccctccccccccaaaaaaagtgctatctctaggattagcagggctgtctaaatgtggaaggttgagtttctgtttcctaagtagatgttcaccacacacagtaatccttggcaaggtgtatccccgcttgatgtttttgtataaagtccccaaagcctggggtcaggttcgcagacgctcgcccttcacttactactgaactcaaatctggccctcgtcagagtcctgtgcttccttaaggaacacatcattaaggacacatttcctttgttgagtacacttgcccgccactgggaatttgtagtaattaagaccaggcatgattgcagctaagttccgccttcccccgccggctacaaaagtggatcagacggcagagaagactggggcttaggtgagaatggggacccattcaagtcccacagttactgccttggttacttttctcatcactgtgacaaaattctgacagaaatgccactcagagaaggaagaagggtttattttggctcctgcgtaagctgtgttgggaaggtgtgtgaggaacaggagttggctagtccctctgcacctgcactggggaagcaaggagagcccccataccacagctcagctcgctttctcctttgtgttcagtttgggaccccagcctatgggatggttcctctcatgactgggataggtctttacagctcagatacatctctctggaaactctcccacaaaaaatgtccagaggtgtgtctcctaggtgactctaaatcctgtcaagttggcagtgaagggcacctccacgtaaactgtttcaggggcagaagaactgacttagtggaagtcccttagactcactggactggcacatgcttatgcaatgctgttgggtgtctctaagcttacagacaaacagcattcttcctctgtcccttcttaaatctttgggaaggtaagttagattttgagtgcctgtctacaaggcatgaatctgacaaaaggcttatatctagactttactctcaaaactcaacatcaaaagtgaataacccagtcgggcatagtagtgcacacctttaatcccagcactcgggaggcagaggcaggtggatttctgagttcgaggccagcctggtctacaaagtgagttccaggacagcgagagctagacagagaaaccctgtctcaaaaaaccaaaaaaaaaaaaaaaaaaaaaaaaaaaagaataacccattggggctagagagatgctcagcagttaagagtactgcctgctcttccaaaagactcaagtttaaatccagtatcctcatgacagctcacaactctctgtaactacagtcccaagggatctgatgccctcgtctggcctccacaggtattacatgctcatggtacataagacatgcatgcaagcaggaaaacccatacacataaaaataaagggaaaatatttttttggatacagggtttctctgtgtgtctttggctgtcttggaattcactctgaagactaggctagcctcatactcagatctcctgcttctgtatattaatagctgtgcctataggtatttaaagaagtatctatagctattacgttattttttaaaaggacagttccactttgtcactctgtaaccacatgtcctgcaaaaggcagagactacgtatgcctgttttcttgttcacagtagctccagccccaaggacagtgttgggcacagtacctccagcccctggcataaagagtgctactgtgaacatctttgtgtacaggcttccgtggacatattcatgcactgcttggtaattctgtagatttatgaaactaccaaactattttccacagtgacatcactttgttcccctcagccatgtgcgatggttccaatttctgcctgtccttattaatacttgctatctgactttttgacaacagccttcccagagaacacaaactgtatcctatagttttgatttgcatttccctaaagaccagtgaggtcgagcatttgtgtgtgtgtgtgtttattgactgtgtgtgcctgtatacttttttctttttcttctttttacaaaaatgtctattcagatattttacttattttttttttattattttttaaagacagggtgtttctctgtgtaccctggctgtcctggaactcactctgtagaccaggctggcctggaactcagaaatctgcctgcctctgcctccctagtgctggaattaaaggcgtgcaccactactgccaggaacttgtctgcctatttttaaataggttattcatttaaatttttttcctccaattttagctgggcatgcctttcatcccagcactcagaaagcataactatttggttgccatggaacagaaccaataacagtgttttattctaatgttgatattgtaaaagccaggagctgggctggtgcatctctacccccatctcccagtcatacagccttaatggagagtggtaaggtaaaagacctccttctaagaagtagattctgattgctgtcacctgaggccacctcagtacagactggctcccgctggctggcgctggagtatcactccatgaggtgagaactctggaacattctgaactaaggcactcactgaggggctctggagaagatagacactgacatccagcatgaccagcttggtctaatgtcttggtcaggagggacaggctggcaggctctgtgccacagaaaattgccaagtgcagaagtgggtgctgggtgtccccaaggccatgtaaggcgatgtgagattaaaggtgacatggcctcttggcagtgctggggtctgggcatttgtcagttttgggcagtctatgaggatataccagatagactactttaggagaaatctctgccaaaccctgcttatggaagccatactcagggctagaaaaatggctccctggttaagagtactagctgctcttccagaggacccaggttcaattctcagcaaccacatggcagctcacaactgtctatacatctaaatatgtttaacttaaaaaagtcattcttacccataataaaaaaatctcagcaaaacgatgcaggaaggccaaactcactctagtgaaccgtcctcatctgttttaagtaacagtctcatttaaacttcattcgggcatgtctattcactgtgtttgggtatcgtatgattggccatttaaaacatataattcagtggtgttagtgtgttcagagttgggcaaccgtcacaccatttaagaatgtttcaccacatctagaggaaacctcatgttgcctaacagcgtaaacatgcacagtgctgctgaactctgctaaataagccgtttatggtttagcacagaacccctcattccaacctccccaactctaccacctcccccccacccaggctcacacacacacaccatcctaagcaaccatcctctctcagacagggtatgctcacacaccagaagacccattctaccctgttctttgtgggccttggctatgtgtgtggcccagttgtacgctggacacataggcaggaaagcaagatgcccctgatctcttgctggtccccaagatacctggtacctggccaaggctcccatagctctgcctctgtgtggccctacaaaggcagcgatgagaatgagaaaataaacaaagctaggagtagagggtagactgagggctgagagccctgcaggctcaaagggcagagacaggaggtaggactgaggagtacacgatagaactgagggaaaagggtcccccccaccacttagcctattgtttccatgcaaccatgtgtagcatggaatcctcccactaccaacggcctctctgtttgtcttacctgctaaaactgccattcagggccattaccattattttgaagttccctgggctatcagaagcagctcctgagaattgcgttatttcatacttaaaaggtggtgtgttctttccttcctgttgcaacaaaggattcaaactagatgactttcagcaacagaaacttactctcttacggttctgggggccagacaccttaaacaaaggtggggtggggctggttacttctgaggccttagacccaagtgtttcctggtctcccagctccaggctccgccccgtcttcacatggtcattccttctctgtgccttggtgttctgtctactcacaaagccttcttatagaaaggacaccaaacattccaaataagttcacatgccatgttctaagcatcaggactttaatgcatctttgtgggggccacagttcagccctggaaaatgggtacacttgtaaccctggcttacagttatagacactaaggcacagacaggctatgtgcaacaagctcatagagacatgctcttgccacagtgatgtaatgccagacacacatgcaagcccccaggcaggtacagtaccagatataagccctggaacaaatgatttctctcatacttacttccatgttctacattccagcaggttgtggttcagggcaccctttttgacctctagggaggaggcccatgaacatagtttgaaaataataagaatatagacaggagagcctcaagattacgagatggagccccagcaacattcccagagggtggaaatatcaggagcaggatttttttttaaaaaatctcttcataaatacttatatctaaccaaacaggaagccacaacctatttgtcataaatagacaaatattaaatttttaaggtggcctgagctgttgagaacagtgcttaggttacagggtgaagaggaagcagttgctatattgatctatgtcaatctctgcccttcttctccaacctccaaacctgtgtaaaactggcctaggcttcacaaactaggtagcaggctggtatcacctagaggactcttatatttaggttgaaagggctgttcccttggagggtgggagaaactgaggcatggagcaggaaagggattcttgcagagccaggttatcagttccgggttcaaagctaagtttggaagaccacttggaccatattttgctcctattgcatggaaaagatacaagaacaactcagttcacacgttcatcagcatactgaggcccagggaagtccagtgtagacgcctcagttcagggaacaaaatatggtaggcacgtggtcgtgggcctgatttaggcatcatggaagccagtgcatactgagactgtcatttgcaattggctatacatctgtaactactctccgtttagaatcctgttcaccaaaaatgatgaatgtgtgaatgtgtattcgttgatatcagccacagccatttaacccctgaactctcagcacatcgacaccgtgagctccatttctcactgtggttggcagctgatacatagtggggtcctgtgggaggtgccgggacccacagagaacatggctggcatgtgccaccttccagatcgaggagaacagttagctctcccctttgtcattagaggatgcttactagggccttttttgtctctccccagtactgtacctggaaggctcagttcttgtgtttgaggacatcttcagactgattgcgttctactgtgtcagtaggtgagtagcctggccctacaggaggttgtgggggaggattcccttcttatcttaatagaagcccacttgttgcagggcactcatctggttgcaacagacatctatgcaactttgggtgtgtttgtggcatgggagaggacagagaaggggggggatgaagtgagaggggacagtcccttgtctttgctctggtaaccacaagaagagagatcagctctgaagtttcctcttctcttctggtaaggacttctctgccaggcatctgaccctcagactccctgccaggttttccatttctagtgtggccagcaccagggacagcttgggaccctgcacacaaacctgtagggacagcaagaaggcttgatggccctcggtgggtggcagcctgggattcttcagatggaaagaccaccataagttctgctccatttacttggaactggtttctgatcaacaagaatttaaaaatacatttggtgccataaaccaacagctgaaactgtaggccctgaacaagggctgattagatgttaggtaagacgtgtggtagtccttgaccccaagctacctctgctaaaacacatgttccactcatagtacccttccccaccctccagaccaggagaacaagactgatagttacagctgaaagtcaaatctgccactgcctggggaagtctctctccagcattcagtgagactctaagggattttatacccactacatttttgttcgtttgtttgagacagggtttctctgtgtagccctggctatcatggaacttgctctgtagactaggctgacctggaactcacagaaacctctgtgttctaagtgctgggattaaaggcatgcactgccacttcccagccctactcactgtgaccttttttttttttttttttttggtatgtgtcttaatgtttgcctgcatgtatgtatgtatgtatgtatgtatgtatgtatgtatgtgcaccttgtacatgcagtgccccaaaaggccagaaaacagcatcaaataccctgcaactagagtcacagacagatgtgagtcaccatgtaagtgctgggaaccaaactctgtaagtcctatatgagggcagcaagtgcttgaagcattgagccatctctcctgctccctccagattgtcttttaaaatattgccagcatccccacaaggattattccgttttcctccattacacagatgaggaagtggagactggtaatcagcagagtgaagtccaatctagaaaaggctgcaccatcagtgcaccctgcaataattctgtgcattggcttggccagctagattcatagggaaaaattacagaggtcccggagacctttgtgctttacaacacaccaggctgtaggaaggtgggcccttccaagtttatcttagttggaggagctctgtcccgtacttggcaaatgtgggctacaatgaatgagtcaagagaaggatgcatgcatgtatgcatgatggatggatagatggaggtgtgcatgcatgatggatggatgcatgcatgcatggaagagtagaagaatgggtgcatgcatgaatagatagatggatgcatagatggatggatgcatggatgaatagaagaatggatggatggatggatagatagacagacagacagacagatgcatagatgtatgcatgcatggatgggtagaaggatgggtgcatgcatgcatggatagatagatggatgcatagatggatggatgcatggatgaatagaaggatggatggatggatgcctggatgaatagaaggatggatggatggatggatggatggatggatggatggatggatggataaatggatgaatggatagagagtctagatattaagctaaatatttaacacctcaaaacctcaacctcctcatttataaaaaggagccctcatttcaagtgctttgatgctggaggaagagtgggttaatgcccatgaaggaagagagtccactgcctaggaccccatgggccctcctcccatctctgccacttgactgtaggagagttttctgggtatcagcttggtgtccagagagatcaggaaccacagtcactaagcttacccccatcacttcccagccttttctcccctggctgctgtttctccacaccctacccaagctggtagttgttttcctgtcttcaaactccagggctctctgaaggaaatcatgagacagagacaggcctgaccatgttctggggagggtgtatcaggcaacaaggcctgcatgctgagggaccagagccccaggcctggagttataggacaaccgctttgcagctaagtgactcccagtcaatcacctgacctctcctggcacccttgcctcctgtcagaaacattaaccaataatacttaggtatgagagtctgcagcttttaaattctaagatgctccagagagcgtgctgatgagtgcctgtccattctagacttttgttagagctgtgtgtgtgtgcccatcaccacactaaacccaagcccaccagtcttctctaccacaaagagtgcttcccactgggcaaccgagcaggtccctgtgagctgggggctgctcgtggagacgttctcagaattaagacctcaccacagcagaatctcaaccttctcaccaccaatgcctgataaatcaggaggtccctctcagacatctgtgagggtccagcatgccgagatcacagtgccagccttcagaaacagccacttcctcagaggtccccagttcttgtaaatgctttccagttctgacagtgcagagctgggagggactgctgtctgggtgtctgtatgcttggtgctattgactcgcttctttctaacctctgtcatggccacacatcgcaaagctggtaatgcctgtgcccaggactgtcctgaagatttctgattgggccttagcacagttgccagtacagagtagtactcataaccattgtatgtgttcttagtgatgttagccatgagaaaactgagaccggggtgtgactgacatcaagtggcacagccaagttctgaagccagatctgaaccctggcatcatatcaggcctgtagtggctatgacccatttgttgcttcccttgggtgtgtcccttctgtatatggagcttggaggccttccttatgaagctgtgggaggcctgccaaagagggtatggagaaagttctaggcagaggaagcagggtagccactagaaagccccaggtagctccaggagtggctctgcagagaggacaagggaaagctatgcctggagagacagggacttcctttcacagctgctctgagccatgctgtcacccatggttagacagccccagagtaacatggcggcagcaggaagtgggcttgaagaaagagagagcaaagaacagccaacagttgctgaagttgtctggcgtcatgaagagatgtcgcccaaaagggaagggcagccactgaaggaaggaggaatggctgcagagatgggagatgctgaggctgccctcctgggtggaagcatacttagtcccattgcttcttgaacatatccatgatgccgggctccgctaagaaccccagcatcatggggtctgatcttcaacacaaccctggtgtgcagtcagtgacctcaagtgaatgccgttacccgaatgaggaaggaaggagctgtgtgggcctgtcctccctcagatatgctcccacacggtggctaagctaccccccccctcctcagggagtggctcactggtcactcccacctctgaagatagttatcaccacagtgcttgtgaagctctgctctccatcagtggctccaaatgctgctggcccagctcttgtgactggcattggaagtaggggatcccatgggagtcactgagccccgaagtctacagagtctggcttcagttccaggtaactagcattgcgaccaaactgaacaattaaatgcttggtgtccagagaattagagaaccagatggtggcattagaaaacccctcataggggagtaggaaatcaattagtgactttgtatgtaagagtgtaagctgttccaaatcctctcagaatgtgtcccatgcaggtggagtaagtcttctgttgctgagcttgcgtgtgtgtgtgtgtgtgtgtgtgtgtgtgtgtgtgtgtgtgtgtgtgtgttgttgttgttgttgttgttgctttgtggacaaaagtaaaaagctttaactagagcagaggcctctagagagctgtataggtacccagaggtgtgtaagctgcccctccaaagtgagggatggttgttaccatatccactctgaagaacccaccttcaaaatccctgtctgggatttacagttcattaggaaatggttatgcatgtacatatacagagtgtctgtaggtttaattaattcactgttcgatagcctttgctttttagggggagctatgaatcccacccacatgatccccacacaagtctgtgttcattaagctcttacttgagagttgttttaaaatgcatattctgtagctgtggaggatgtcgttcattagtagggcacttgcctaaattcttaaggccgtgagtcaattccttacacagcacacgctcacacacatgcacacacgctaatgtgggttctcctgggtccagtgctgttaacctttgggcgtggatcctgcctttttagcctcttcccagaagttctgatcaaggaagttctcagaatacagacagacactgaaaacatggtagaatccctcaaaagtgtccagtgcccctttgggttttggttgttggaagtgcacagacagatgccactgccctagcaccccatctgacagctttccaggtgttaccccaaggcccagggtctctatgcttgggtgtgactaagcctgtttttgactgcctgccttccccaccttcacagtgtgctaagagttctttagttaccaaaccacaaactggacaatttgcatgtcattgtcactgacagaggccactactaagttcactagagtgggctgctcagctgttgtactaagattggaaggacaaaaagtgacataagctggggcccatctctgttggtgtgtgaatgggtataagaaagcttggggcaaggggacagtgttgcaagcactgtcatatctccaaagtgttctatcctgtggcctggcatgcttactaggaatctacccaaaagaaaaactagccaagggcagacttaccaggaactaatagtgttgttggagcccaatggcagtttgcaaatagtttttggtctttgttttttactaaaagaatctgaccttagacccgatctgcatttaggtttatacactgccatttacaagttggtctctgaacctcaggttgcttaattctgagatgggtctaagaaaaggacctgcttccttgagagcgtttgagggagagccaatggaaagtgctaagccagaacccaggggaagcataagctatgtgctagaatgaaaaaaagaagcaacctgggcagacatccatccagagacgagaacacctgagtctcccatccagttctaggggacacagaaaagggaggtcagaggacagtttgtgggattccaccatgtaggtcccagagatctaattcctcatccttggttgcaagccccttatctgctgagctgtcttgccagccatccaaagtctaacatttttaaaaagtgaagacaaaatcagggtccatatctcaggcgagttacaaggaccaggtaggaaaccagaggcaaattaaacagcaagtgatagtgatcccggataaggtattttcttagctgagtagtcttaggtagttctctcttcctctctgaaggggggccctctaactgactgtagttggaatgctctcctacctctgtggttgctatgctgtaatggatgttacatgacattgctcagccagctcccccatcctgtgtgctgacctggatggaagaagtgcccacccctcccccctgggagggagaggatgaggaactgagtgatgaaacaaatgaccagcaggtctgggagggaagggaggccaatggtgtggctttgaagagaatgtgcaatctaagcagatacaagcagaggggataggtgtctaggaccagggagcattccatacagagcagtgagtatattgaggctgggttgagtggtgaaagcctttgaaacacttaatagagaggtagagcaaggcccaggctacctcccgtgtgtttggggataggtccgcctcagcatcataaggaagtcagtgaaatgacagcgtagattactggcagggtgagagctgagtggccttggctggtctctgcgatagacacttttccaaagccacatcaacaaactagagtcacccaggtaaactgaggtaatgggagatgaatattgccaacctttgaaactgtagatttggataaaggtagtgaagaggtcctaagatgggataaggccagacttgtgtagaggaatgagcagatgacatcagaaggccccgggttcataggatggtcacgtgataatgactgaagacgatgcagtgccaccctgtctaacagagcaagccaaaagccacccccaggacctcaccaaagacccctaaatgtgccacagccacccctcaacagtgctttcttcccccatgaaagatactcccggaaagggggttaggcattaacaggtgaccatggtattgacttcacactacagggtttctaagacccaggatctagacacccttaacctagagttacagagaaagaagaggaagacagggaggctgtgatggccctgggtggagggagatagctctccagaccaacagaggaggcgcctagtggataacaggtggatggatgagatttctttgcttatgattggcttaggaaggaagtaggcaggccgctggtccagtagtagagcaggttgttaatcttgagctctgctattctgtgccatcttagtcctctggtccatttctgccttatggaggggagacaggcttacaggagagagacaaggaaagaggagagaggaatggctggaagatggtggataggccctgaatgccaggataaaacataaaatcgagaccagctctcctgcctggggagatggcccttgggctggagggcccttgggctggagtctggaggaccaggacccagcaccatctacccatagcccaccacagtgcctgagaaaaacgctttccccctcttggtctgtttccctctgtctgaatggttgctggagatctctggatggtgctggagatctctggatggtgccctcaacagtttccctgcagctagcagatggtgatagccagctaaatgctcatcagggcatccctccatgcttgctgcctccatatggagggcaagggtcagaggtcactaaatatgcttaaaggaagtatgggcttagcaagggaggaggagcaagggagtcttctctgtgccccctggctctttccaggtccctgaagctggcacgagatctggatctggcagctccctcagctgcaaccctaacctttggccccagggaaatgtctaggtttcatggaaaccctagaagtcgcaggatgtgaggcacaggtctggacatctgaatgcctggggaggcagactctggcccctgtagtacctgactgtgaccctcctgtcttcacagagacttactgcccttcactctacggctgccccaggccatcctcgaagctagcagcttccttgaacttgagaccatctccaacctgggcctgggtaagtcctccctgtagaaccagagagtaggtgggaattgaggcaaaggggttctgggatgtcccccgttgtattagtccatgttctctagtagaatagaactgtcttagtgtcctatggctgtgaagagacatcatgacaacagcaactcttataaaagaaagcatttgtcatttcattgggtctggcttatagtttcaggggcttttagtctgttatactcatggagggaagcatgacatcattcaagtaagatatggcactggagcagaactgagagagttctacatccagatctgcaagcagcaggtagagagagacactgggcctggcttgagcttctgaaaccttaaagcccaccccaggacacaattctcctccaacaagaccatgcctccttatccctgtcaagtcgtgccactccctaatgaccaagcagttaaatctatgagcagctggggggttcattcctgtttaaaccaccacaggaaccaataggatgaatattccattgcttacactgaaatgttaacaacaatctcacgcatgggaggctaagaacctgcgtgttgcttgggttcaaaggcccagccccttggcaatcttcgtggtcctacagtggctgtctcacattggagaggccgagagcccaataattgctcaaccacatggctgactgcttcatcaaccccagtctggcactaaagacctccaggggtcctgcagagagtcactggtcctctcaacaatggaatcctagaaaccctggttatcttagctgcacaggagtctgtaaccacaacagagcccaagggaaggtcaggcaagtagaagctgagtcatctttctcccaccatgccctgcttcatctgggctgctagcagaaggcgccgcccacagttgaggtggatctttccacaccaattaagacaatctggacattcctcaggtgaggctcctgactcaggagattctaacttgtggcaagatgacattaaaaccaaccatcataccaatagcctttgcagagatgcctttgggagacaccatgctggatcctgaaccttagtttgagagtctaccatgcccctgggccagacatgctgagccactgaataggaagatcctcggggttctagacagaggggccctgtgtagccagggaccataaccaggtggatcacagtagaggcaaccctgggaaaaataatgccaacaccaaggcagttctgagggctggccaacatcacccctgcttcttttgtcccagtcctggccctgtcacagcactcatcaaaaggaaaaacatcatggatgctgtctttatcagggttactgttgctgtgatgaaacaccacgaccaaaagcaacttgggaggaaagggcttgtgtagttacccgtcatcatcactacatcaaaggaagttggggcaggaactcaagcagggcaggaatgtggagataggagttgttgcagaggccatggaggagtgctgcttactagcttgctcacacggcttgctcagcctgctttcttatagaacctagacaagcagaaaaggtgggctctacctacagtggtctggaccctcctacatggatacaggcttgcctacagcccaatcttatggaagcattttctcaatgaggctccctcctctctgataactctagcttatttcattttgacatagtactatccagaacagatgcaatgggaagctggaatgtgccttcatgcccttggctatctctctgcccaaccaaccaactctaaggggggcatccctagcttccattcttttgcataacagtattagaaacccagacttcctgggctcttcctaatatctagccacactgaggtctctataggcataggcttggccaacactgacttaggactgaccctcaccagtgctgactctgaagaaggcaagatctcaaggctgatagctgctgagattctaagccaacatgtgttggggacagaaattttcctccttctgcatggtatacaaagtagtttgtttacagttatgcttcaacagcctctgtggccagtggtagggcagagacccaggacttcagcacccagagccagaacatgtctatagacaaagcatttttattaaggtacagctgttcactgaacagtctccaactgatcacagcaccaaaaacactaggcataatagacaccaatgttgcctgaacagaggaaaattagccaagactgaagatccagatcacagaggaagtcaggagcagacctcagaagacacacatgtaccagcttccaggccaggctgctgtccttctcccagaggggtctggggacagcagggtgagagaagaagtcacatccagtccacactgccccttaatttaacagaccctgctacactggtctaccaagtagctggcagcaagcattgaacttcacatatactcattggccctgttctgggactcaggcaagagtccctggggctgatagccaaagctccttgtaaattcctcctgcagaaacagcctgggaacacttgctgaatggatacacgccactctgcttaggagaactgaattcctagctggaacagaatggccctgctctcaagagaatgtgacctcaagcatggagtgagctggagatgaaagtcaccacacaggaagccagggatggcgcagactggcctgttggcaatgacttctttgataatgggaaattaaaaaaaaaaaatcaagtatgcttctcctgaggaaccatctggaaggttctgtctgacgaggtgtccccggtgctgaagacacagagctgggctcaacagactgacttttacccagagccaaggagaggttagctttccagtccatctgaacagatgaagacctgaaactgccagacacctggccctggtacaggcaaggcgcagctttgccagcctttctgtgctctcaggataactgcatgaggtcacctgtcaagggcactgagctaagcacattgagtgactcttctaccaggcatgtccaaccttctgacattgcaacaagaggctgactgtgacgaagttcacccagaaggaccatgcgatcaaattaccaaaagaaaaaatatctcataaggtcttaagtaacttgatgattcttgagggtagcattcacagttgtcctcagacccatgcagtcaaggactggacacacctgttacagcagagtgttgaaacctactcaaacctgcatggagaattctgagaagtggaggggagggccatcagactttgtgagcaacagcctctgctctgctctgcagccttctgtgttctgcaagccgctctgagcccggcttctgagtcctccgagtctgagtccaccaggctccgcttctagccccaccccgaccctgccattgtttcacaaaaggagaattgcgatattactagccagctttgggttgggggaggtcttgaggccaagtgttcccttggtccggtcaatgtttccaggagacccaaaagcatgataggacacaagttcattgttccattttttataccaaaaggaggaggaggaagaggaggagaaacccatttgataaatgaagccatgggagtcaaggaacctaaagagctttctcaactataaatagaaatgaagcaatggctcatggtaccacagggatggaaacatgtttagtgaaaaaagccagcctcacagaagcacatgtgagactccaaagtagatatgctcaggggaggcaaatccaaacacagaaagcaggttagtggttgtgtcaatcacttttcttattcctgtgataaaataccgaacagaaacaacttaagggagaagcctgtttgggctcatggtttaagggaacacaatctatcatggcaagagtttatggcaatgagaatgtgtgactaggacatcttccacatctccaccaaaaagcaagagagggcaagaaaaggaccaagctataaactccaggctcacctgccatgacccacttcctccaccaaggctccagctcctaaaagcaccaccgcagccagaccaggatcaccagctggtaccaaatgttcaaacccatgagcccgcaatggatagttcacattcaaaccattaacactggatgggagtgactgataacgggcatggattgccttgggggtagggaggtagctataaaatgccctaaaatctatcacaatgacaattgtgcagctatggccatattaaagcagccagggaattttttttaatagatgaattgtgtgaatgatattctagttgagatggtagagggaggtaaactatatggcttcccataagtggatgtaatgggagctggattcacacatggactttgtaagtgtgacctctgtgcccttttgtcggtacccacagccgtctgatcctttcagccttgttcactccttcccgctcttcagttccctcctcccttgctccaggtccagtagaaaataacatggcctcctattgccaagggagtggaggctggatttgatgctgagaagggagaacggcaagccctccctctgcattgtatcctccaaacacttctctttatggtatctttctctttttatgaagtgccagcatggtgtgggtttctttttaactgacaagaccagaaaaagccaacactggaaaatcacgcaaatccctccaccgctgcaaaaatacagttctgcatctcgccttccgctgttgctgtgtgtgaacacatgtgtgagtttcagttgtttttctcatacccagagtcaagaagcatccagcttgcagaagatgtactgggttttcagtgcgcccaatggtctcacagttactcttaggctggtttgtttgtttgtttttgaggcgtatttccttcttctgtgtcagtgattatattttattgcacttggttttggtttggctctaatgagtagactaagccctgctgtttggacagggatgatgtcaccaaagcagagctattctcttgcaggctaagcactgtgggatggctcttgagtgtttgttcatgagtagacacaagaatagccaagcttacacttggaaacaccaccattcagtcgtgtagggtataaaggatgctgtcctgagctcaggagccttaggctggcaagtccacaaaactaacacagagttgaattcagcactgagatgtgtgcaactgatctaagtgcaaagaaggaagatgattctatgtagcgcctctcaaacatgcctacggcatgtagatacttagtgttttttttttaaggtttatttacttattttatgtatgtgaatacactgtagctgtcttcagacactccagaagagggcatcggattacattatagatggttgtgagccaccatgtggttgctgggaattgaactcaggacttctggaagagcagtcactgcttttttttttcttttttttttaagatttattatttattatatgtaagtacactgtagctgtcttcagacactccagaagagggagtcagatctcgttacggatggttgtgagccaccatgtggttgctgggatttgaactccggaccttcggaagagcagtcgggtgctcttacccactgagccatctctccagcccgatacttagtgttttaaagacagggaagccatgcaccatacagttcccccaggcttgcatgttctttgctttttcctgtatggcacaaaatgagaatatttcctagcaagttaattcttgagatttgttgacttttcggattgggggactgaggaggtagttcaattggtaaagtgcttgccttgcaagcgtgaagatctgatttgagccctaggacccacattaaaaagtcaggcatggtggcctgtgcttgtaaaccccaccactgcggccagccaaactagctatttggtgagttccaaaccaatgagaaacggtctcaaaaagcaaagtggatggtgcccagggcacaacaatcaaggttgtcctccagatccacatgcacacacatgtacctgcgtgtgcccacatacacactaaacaaaacacttgatttcgaattaaaatccaacaacccaccttcgggtgctacaaaaatctgtattcccccagttccctgggctttctaaccatttccatggctcaggaaccctcaggccctcaggcaccacagttgagcacctggcacattgcaggttctctaagcattgcagagatcgaagctgtccagattcagaaagccttggcaccagcaaaacagctccctcgatcaaagggacaggcccttctttactggaacttgggtgaccgagccaaggctttagcatggtgcctccaggccatggtgcccacagttctgccaactgcggggaccgcatgacacagtgttctgcttctccagccttggctctctgcaagctgcagagaaactttccaacttccttattttttttttttgttttgttttgagcgtaaagctctaagttgcctcagtgcttcccttacacagcccccggccctgagatgtggcctctccagtgcccacatcaccctcccttggaagtagcattgccttagaagcctgtgccctgtgactccatcattcctgtcctggaggcaggcaagcaatatcctggacctgttccccgagccccattgcctgctccatacttatgagaggctatcaaaatgtggagctgttctattctgtgcctgctagggacagggtgatgagctggctgtcaatccttccccatctggagctcttccgcaccttcctttcttcctcctctcggtgtcttgtcgcctcatcctcctatcccccatgctgcagtgcagcctgctagccttgcaagtgtgctcccctctcctagatggggatcactctgaataagctggttcactcactagtgttgggtgtgcatgcctagccccactgctcattcattggagcatcatcccagagatgctccatggagaagcatcagtgctgccttccgaagtccagagtgtggtggagcactcggaccaaagcacagaatggaccactcacgatggtggtccctgcaatcggaatacactgtaggactaagagacacaggcgtcctgcacacatcaggaagtttactccagacatgaccttctagtctttgaagatgagtaagaacctagcaggtggggaggaaaagaattctaagcagagaggacagcgtcagccgagatccaaggatagggcagcatatggcgtgtccaggaagaaatgcatagcagatgaaggctcagtagataattctagaaatatatgtgggaacagatctcataggccttgagtgaggtcatgctcaggcattgatgggaagttctggacatctgctaccccatgactttgtccttcaaccgcatgtctcaagggacgtggcatgcgcacagaagacgctgagctcagcttactgggaatactgaatggttcaccatcaggactgtaaacccagctgcctgatgcttctgctgggaagacttcaagggtactggatcgctgtactgggcttgcataatcatgagtgcagtgttcccaatgcttattctacatagtaaaaccatctgtgtatgtgggcaccaagagttggtcattcaggagtcagatgctatcttggagggcaaagtcatagcccggccctcatgaagagtggccctcaggctgtgggaaaacctaacctgatctgtcttaccccgtggctgtgaggtttgcatattgttaaaaagacacatgaaaggtcaccatcttggtattgtggtaacagctgggtctcctggactggctgtcaggtgcagcagaatctgtctagagaagatttccatggtgaatagcatgctcccttccataagaggcgctcacagttgaatagggcacagcttgctttctagcctgggtttgtaccctgctcacattgatgggcaaacaacctcaggccaccaaggtggccacggccagtgtcactaagcatgccatcattagaactggctcacacttggctctgcatgtccctgccatcctgcagcatctttcagttcaccattaagaacctgtggtggccatgcctgatggtacagatctgtcatcccagcagctctggaagccgaggcaggaagatcaaatgttcaaggacagcctgggcaacttagtgagaccctgcctcaaattttgaaaaaaaaaaaaaagttttttttttaaaagggggagatatttccatggtagagcatttgcctggcatgtgggggaccctgggttcaatccttagtactacaatgaaaaaaaaaaacaaaagggcttgctgtgttcttacaacatggggtcagagccaccagccacatgctggcaggcaaagcaactgaagcaggaagtggggcaagttcctccaaaaaagcctgtggtgcagtgaggggctactctgacctgttcaaccccagcaccctgtgacctcagatgaatacattttttccctgagtcacttgctttcgtctgtaaagtggggacaagacctatgaccagaggtcatcaagacagtggcagtaaaactgcagcccatggctggtctacggcacgaaccctgactgttccctcctggtgtcacacttggcactcctttgcataggggtcttactgaggaaccatggacaaaagagtgtgtctgctattcttccaggaatccatccagcctggctcatgtccttccatcccttaaaatggtgacactgagcaggacatgagaccaatgtttctctccatatggagccactctcatgagctcagagtggcctttcctccagaagtcatatagcccagtatcttttgagaggccatgagcatccctgagtttgctgggatatggtacccagaggccaagatctctcaagtcaggccttgcctcatggcttccatcacagacaaggctaggaggactagttgatagatacccagcaggacagggcttgcttaaaggtgggagctgtgtcctccctcacgtgtccactagcctagctcctcagtgtcaagaccctcccgggtcacagcagcttgcagtgcgaagatacaggtccagttctaccacccagagctctctggttcccttttcctgtgtgtggcagctgcaatggccatagtaaattctagtccctcaccttttattgtagggttccatgttactgttgagacacccattggggagacagcaaaaccaagacctaagatacagtcttcctgggttatctagctgaatagctgcagaaaccccaacgctgaaatctctatcacaggtattctccaaggcaagggcacagaactgaagccgggcctctcttgtcccctcccaggtctactccaccctcagctagcaagtgcacaggggacttcccctccaggcaggaagtggtgggagaagtttaagagtccaagaagggaaaacaaccttacgcaaaagcaaggacccttcccccgctgctagaaggagaaacagggctaaccgactctgctctgttttcctcaggtttctgggactcctcgctgaactcaagaggctctgcagagccactcagaagcccagcccctgggacccctgcatcctccagcctccggcctacaacccattacgcaaattgttcctgtgaaatcgagctctccgtgggaaatgaccgcctgtggtttgtgaatcctattttcatcgaggactgcatcctaccggctgatccacctccactgcctactggcagctaccctccacgccctacgcctgccaccccggatgctacctcacccacctccaagggatccccacgtcgccccccacctccacccccgttacccactgttcctcctactggccctgcacggcctcttgcgcctcctgtaccgcctgctggccctttgcccaactcccccctaacgcccacctctcaccttgcaccccatgcaccgggcccccctggccactcaaaccaaccacccatgacagcctgcgagagtctccctcgcccagctgtaggcctgggcccctttggagaagaagagatgaaacctgggacaactcccaatcccttgcaccaagcccctccccctccattacccctgaagaaggctcttccagcagcccctcccaggaggcgcatttctgagagggtatctctggaaagccagaatgtggggacttcaacagacagggaccactcaggcatttctaggacagcatcactcaaccttcctccccagagcaccgtaagtagccttggggacaggcctccaaggaccacggagcaaagccaggacacagaggccaaagccagccatgctgacagcataccagtgcctcctgggaaggccaaacaacccccagtaccacccccaaggaagaagcgggtctcccggcagctggcctcaacccttctcagtcccttggagagccccatacaggaggcatcctctgagaaacaggcgactggtgcatcttgggaaggcttgagtcctgtccggcaagctggcatgcagcacctccaagttcagtccagcagctgtccccaaagctctccagagttcaagggttcccaggcctcactctcagacagcctgggggtgcctgcctcggccgctgaccaggactcctactcaaccagcagtgcagaggaggagctggagttcagcagccccaacgtgaagaagaaaccctcaatgatcctggacaaggcccgccaccgcctcagcttcgtcagcttcgccagcgtcttccatgccttcctctccagcgaccgcaaactgtataagaaggtggtggagctggcacaggacaagagctcctacttcggcagcctggtgcaggactacaaggtgtacagcctggagatgatggcccgccagacatccagcactgagatgctgcaggagatccgtaccatgatgacccagctcaagagctacctgctacagagcactgaactcaaagccttggtggaacccaccctgcactcggaggaggaactcggtcagtggcagctgggagggcgggcgggcgggagagcggtgcataaatacactcaggcgcccctggacacagaacagcctctggggcccctttgccttatgtcctctttcttcttcctccctgactttcccacaaatctcctgggcccaaatccctctctcaggaaccacttcttagagagccgattcaaggcagccaacattcctgactactggcaaacagcccaccagccctcccctcccccaccggcctcaaatctcggtgatgacaggtgttatttttccctgcagccacctacacatctgcataaacaatggaaagactcaggcagaccacagtgctgtcgctgggcatcatagtacctacctgtagtcccagcacttgaaaagtagaggcaggaggatcaaggccattctcaactacacagggagttgagaggtcagcctgggctaccctgtctagcaaagcaaaacaacaaaacaaaacaaaaaaaaaaaacgtattgagagattttggaactaccttataaacattgctgtccttccaggcactgcctccttgtggtcctgaacctttcctcctctcctcctcctccttctcctcttcccagtaattaagagcatcagttctggactcaaaaaggatgctttgagtcactacaagataatgtctcataatgagaggtcctaggaaaaaagaatgttaagtattgccttccctgagggaaatgatcttggatggatggatgattgggtgggtgggtggatggatgggtgggtggcaggcaggcaggcaggcaggcaggatggatggatggatggatggatggatggatggatggatggatggatcctgagaaccgatatagttgacaggccaccgtattagggtccagtagtaaggtggtgagtgatgtgttgaggtttaaggctggcagttgcctcttcaggaggctatacctatgtgtgtacctcaccagggatagagggctcacctgggcaggatgctctgggtgttgcattcgaaagccacctgactttatccactaacagctaccatgtcccagagacccaagcatttgctctacagagcttctctgtggaggaaatgagttatataaatatatatctatagtgctgtcagagcactatgcctccacctgttgtactgagaaacaaaaaaaccatggcagcaagccagctaatcatatggccctcctgccctcaggaagctcttattctgacaaatgacaggtaatctgtaagaaagccaggaagccataaaggaagatgacataagtgtaaagtaggcaggaagtgaggtttggtggcctggggagaggtaggtcacagcatcacaaaccctgagatttagcatttctgcaaaggaccttgctgtggcaagttcaaagcaggaatgccagggcctcacgtgtgctcagcacggctctggtccttgagctgagtaggagcagagagactagaggcaagaagagctacactcatgacaagatacactgggggcaagtaggttgggcaggagacagcacaatgagacaccgggcacagatctagtccatggaagtgggcaaagacgcagctgacttcatatggctctggatagctaagagccagtataagcattactgggagctcatagctacaagccggaaggcccaaaccaggagaaaagcccagggtttctatgtcataaagatagtctcctatctcactggacatccaggagatggaatggaagctgctgagaatgagggctgaagacagatgtctggaacccagaaacacacatgcagccatgagactaaagtagatgtgcccagggaagatctcaggcagcatgcaggttgggaggccatgaacaggcatagaagaacatggaaggacgtggacatctcactgcagcccagaagaagctatggttggtcatgtgtgcctgaacagaggaggagaagacccatagcctaagcacaagttggagggtggggtcttcttccaggcagaggtgatgccacagagacaggcagagaggtgggagatgaggcaggaggagtagtaggcctctcataccaggctgtgaacctcgagctgtggatttggcctcgaggggatggatcccagagggcatgaggagagttatgaagagggatggtgatccagagccatccagtaatggctcagggcagggccagttgtattagttaccagtctgctgctgtaacaaaatacctaacaaaagcagcgtgggaagaaaaagggttactttgtttcaagtttgaggatacagtcgctgtgagggggaaggtagggcccaaagcaggagcatgaggcagctgcagtcacagtcaggaagcatagatgaatgctggtgttcagttcctttgttccttgttcaatctaggtaggacccaaggccacaatggaatcatgctgctcacatttagggtgggtcttccacctgcattaacctaatcttgaaatttcccttcagacacgcccacagattgtccccaaagggcttctagatccaatgaggttgacactcaatatgaactgtcaccagtataaggcgatcctgggcaaagcaaaggaagtctgaacttgacttgtcagaaacagtgggatgacagctgtccctgggtggccagctgccaggacagattctccacaatgttgggtgagagacaggcaatttgtgctctcctggtaaaagggcagaagcaggcacaagactagcttccagccaagcctctgtgagagagaaaagccatccagcctccctcctagagtgacgggacttcaggcttcctcttggaagggtcagtagtcaagggatgaggccattccagagggtcacccagagcagcagccatgagtcaaagccttgcttagcctccagagaccccatcagggcccaacttgtctattgtttcttttgggttgtttggtttggtttggttggttggttggttggttggttggttttttgagactgggtttctctgtatagccctggctgtcctggaactcactctgtagaccaggctggcctcaaactcagaaatccacctgcctctgcctcccgagtgctgggattaaaggtatgtgccaccactgcccagcaacttgtctattattagaggggcattgtggcatccatgttacagagttatcatgatatccaagctccatcccacagtttgagcaggactgcacttgactccggtaatagctgcatagttaagggcaagctgtgtggatggctgtgcagcatggggagtttgaaatgcaaaagtctaggggtaaaggcaggcctggcaggctgaaggagcagtgcagtcaaggaatgcatgtatcggtgacaatgtaaacaaatcatgtggattttgagaagtgcaacaggcattaagattaattctgcccttaggacacagctgcccagattgcacactgcataaccgcagtatgtctagtgccttctgaaatgtgtgtttataggcaagctctgatcccagccctgggaagagcactacattggagagaccaggatagtgggtatcacaggttctggtgccagtgcacctgcagagtgacttgcatgtcagagctaagtagaaaccagggatggaaaggctgtactgccagacagcggggctaggcaggaggtagctcctcctctcacttttgtgctctcaccccgacagaggccatagtggagtcagccttgtacaagtgtgtcttgaagcccctgaaggaggccatcaactccagcctgctggagatccacagccgggatggctcactgcagcagctcaaggagaaccagctagtggtcctggccaccaccaccaccgacctgggtgtgaccaccagcgtgcctgaggtggctgtcatggagaagatcctgcagaagctgaccagcatgcacaaagcctactcaccagggaagaaaatctccatcttgctgaagacctgcaagctcatctatgactccatggctcttggcaacccaggtaagcaggcttggactcccccacagaactaaggcaggatgaaagtagaaggtattccctgggcacaccacagggtgatctgggcaagggaggaaacggtgcctcccagtgccttcaagacaggtaatgaactagccatgcttgtgcccgtgcgcattaggaaaaggcaccctgtgtgtttgcagggagtgctaaaacatggtaacacacacagaaccacagagcctcgatggtggagggtgggagtccatgatcaaagtggggcagggctgtgctctttccaggctctgggtaggatctgatcgagcctcacccctaagtccgaaaacccagaggtctccactcagcaatctcccatgtgctctctgtgtcttcatttccctcttatgaggacacgggccacagtggattagtgttgccctactccagtgggatttcatctcagcccaccacatctgcgatgaccccattcccaaaagagtcacctttttagggaataatgttggcccctgcttatgcccatgaccagctggagtccagggtagtgagcagagcctgacatcatgacagagtgccaccctgacctgtcttgtcacaagataaacccacattcaaggggtgaagcacatgtcccctttggatgggaaaagctccaaagtcgcattgcaggggatgtggggaggaaggaaagaagggaggtagtagaatcacaggctccatttgtagccactttgccacggcgctcctctaggtacacaggcaaaggagcccgtgctccacagggaataaacgctagctgtcactcatcctgcagccagcccttcagctgggtgccctggtgcaggtggccacctgtgtacttggtagccatggcccatgaaaaagagtaccactgctgtgaccttgtgagacctggaacaagtcacttatctctcatgggagagaagccaagattctagtaggtcagagccacacttagggacttgcagatattagaaacaagctgtgtcgttttaccccagtgcccagcaccaagcagggtcaatgcctggggatggccaagagggtcctcttcctcttcaagttccttacagatgaacagcccagctggccctccggtaacagaaaagagttgtttggcatggcactggggtgtggaacaaggttcctgcatcctagccggcttcccacgtgggcctggaagaggctgcagccccaggttggagccctttttttgtgtaggaccaatatgtgttctgcaactgagaaaacgaactgagttcctgaagggcagaagccacatggggataaagctgcacagtggttgtgttgtcatagagaagtaccgtgtcgggaagagctggtctcgtgtgcaggccaggagacagggctaagctctaagtgtaactgattcctacctaaaagtgcccagtggaggaaggcagcaactgtaggcagcctccacaattcaaagccttattctcatttatgtctggcagcacagccagctccagagtcctaggacccaggagagggtatccagaatgcctgacagccccagtgagaccttgaaggccaggggccccattattgctgatggaaacaaaccaggaacgtggcaagccttctcttctaaaacagtaacaagggtggcaggcctagggtgtcctgcatggggaggtgggggggaagcagtgcaatttggtaaagtcagaaaggggaggacatgaaaaactagacccgaatgtctatccgagctcttatgcatctagcctgactatccgggtaatggaggcaccaggctcagtttcctcctgtgtaaacaggtgcagtctctggggctcaggtggactgtggttagtgtgtcaccagatgctcacacttgctgactgtgtgtgtgacccatggctatgtctaactgcagaatcatttctcacaggccttgcaggactcagggcaaaggcagagccaaggactctgctgactagggtagaaacagggctatttcattctccaagttccagttttaagaccatgaaatataagccaggcacagggagggacacccagacactgtgagcattcttaaccatgaattcaggctactgaaagcttgccctgacagcagggatggagagtggggaggggggggaggctggctagaatgaagaaaacaatattaggggggcagagggtggggagggagacaggtagccagttctccagcaggaataatggaaaaacagagccaaggggaccagacatgtcaggcagcccaggccggaatctcaggccaaggtctggtctgggaccagaagccagggtgcatcttatcaggaggcagtgagttccctttgaccaaggctgagccctggagttatagccccgtggctataactccatctagggttaccccacccagagcatcttcatttgagaggaagcagatcacccacacacaccatcccacttctgtgtttaaacgcccacttctgtgccctaatttagatgatgaacctgttgggattccatgtgggtaccatgtgggtgctgtacctgggttagacagatcctttttttttatctttttttttctttttttatctttttttgagacagggtttctctgtgtagccctggctgtcctggaactcactctgtagaccaggctggcctcgaactcagaaatccacctgcccctgcctcccaagtgctgggattaaaggcgtgtgccaccactgcccagccctagacagacccttaaaagctatgggtttagccaggggctgtgaggtacctaaccaccaacatcagttttcccattcttatactttgtaagttcccaagtctatgtgttctgatggtggggtacagaggtcactgtctacccaccctgtccttggaatgaggaggttgtactgttatgggcatggacaaccacagaacaaccaatgagacttccaggtccttatccactctaacaaagccttgaaccgggacatgtgggtggtaatagaaatggagacagtttgttaagaaaggggcacaggcaacaacccaagaatgggaataggccagggagctagaaaggtctgaggctgcaggccctgggctctgagtatcccaggcttttgtgggtcacttacctagcaccaccttccccagcacttgaagaccgctggagttttctcctttgtggtcccatgtattacttgtagcccacaagaggggtttccatcctccctcagccattggcttcttgatatgtcagtcttgatgcctccgagccctcctttcctactctactctcctatctcagaaccacattgtagattccaggtggggttctgtgaggcacctgatggctctccaggtggagcaccgatgcctgcacctcaggccagccttacctccaacagccccaccagaccagtttcaaggatagtgttttgcatgggattttacatttgaaataaaattcctgggactgacnnnnnnnnnnnnnnnnnnnnnnnnnnnnnnnnnnnnnnnnnnnnnnnnnnnnnnnnnnnnnnnnnnnnnnnnnnnnnnnnnnnnnnnnnnnnnnnnnnnnnnnnnnnnnnnnnnnnnnnnnnnnnnnnnnnnnnnnnnnnnnnnnnnnnnnnnnnnnnnnnnnnnnnnnnnnnnnnnnnnnnnnnnnnnnnnnnnnnnnnnnnnnnnnnnnnnnnnnnnnnnnnnnnnnnnnnnnnnnnnnnnnnnnnnnnnnnnnnnnnnnnnnnnnnnnnnnnnnnnnnnnnnnnnnnnnnnnnnnnnnnnnnnnnnnnnnnnnnnnnnnnnnnnnnnnnnnnnnnnnnnnnnnnnnnnnnnnnnnnnnnnnnnnnnnnnnnnnnnnnnnnnnnnnnnnnnnnnnnnnnnnnnnnnnnnnnnnnnnnnnnnnnnnnnnnnnnnnnnngctcagctttatccagaggttctgacttggtacagcagtcactttgccaactgagccatctccccagcccagtacattttttttaacctgtcatctgaaactgatttcaaacttgaaacctttaagtgtaaatggttcattgaaacaaggactcctgggtaccctgtgagttaacttgtctcagcaatcgtcaagtgccttcccctactccccccccccaacacacacacccaaacacacacacttcctccctaaatcacacaaggtctatatctggatcttttccagtcggtgctgtcctgagtctctattgtagacctgggagtgccaggctgcagagctctcccatgacggctgtggatgtgtccctgtgtaaacatctccagatctagcatctctatctgaatcacaggtcatcgctgatctacaaatatccttgaggatgctgaaaggcttaggaattccacatcttacagccattattttgtgtagcttcctttaatgtgctgtgattcaagggtctttcttggactacactcattttttttaaatatctatatcattttaattgcatgtgtgcctgtatctgtgtgctaagcatgtgactgttgagggcaggtcccctcagagtccagggacattgggcctcctggaactagagttacaggcagtcatgagctgcctgatgcgagtgctgagaagcaaagtagggtcccctgcaagagcagtgtgcactcttaactgctgagccatctctccagccctaaagctgacacatgagagaatgcatgttttcttcctgcctccatctttgccacgtaggccacagtttctcaagtctgtcgcactttcctcatagttgctgacttggctactttctcattgctttgatcaaatacgctgaccaatgcaacctgagagaaaatgaggtcgtttaggctaagagttacaggtttggcccatctcagccgggacatctaggcagcaggagcttaaggcggctggtcacattgctttgcaaggtcaaaaaaatagcaataaatgctagctagtgttcagtttactttctgccatttttacagcccagtctcactcaaattaagctgagtctcctcaattaatgtaatcagttcctgtgattggcatgcccagaggtccatatcccaggtagctgtagattctattgagttgacagctaacagctattacagttacatgggagtgttgttgtttttttattatttacttttattttatgtgcattggtgttttgcctgcatgtatgtctgtatgagagggttggatcccgtgaattacagacagttgtgacccgccgtgtgggtgctgggaattgaaccctggtcctttggaagagcagtcagtgctctaaactgctgaacatccatctctttagcccctggatgacacattcttagctgcatctcagttgactcagattcacttcagacttgacactagtggtttcaagactagacttccccattctctaacctaccccactccattccatgttcccagcatctcatgctatctggccgtagccttgtgactgaagtacagaccaacatccctgtgctgaaggcctgagagccattgggaatccttcagcaaggcccagctgcagcctgtgttgagccaataaccttgagcgtgttcaacaggaccaaaccacgcttgcccaacactgctcctagacctcaggctccatagacctctggcttcctaggcttcaagaaccctggactttaggcaacttaggccttagaccacctagacctctacccatcctaggcccccaggtctcccctctgaacatgaagaccaccacaccgcctctcctgtcatcaccacacaggagagagaaatgcatgcacagattaagtggcccatttaaaggagaatacagcagcctggatatgagtgggatcagttgagacagtaggaaaagggccacacttgaagtcacaggagcaaatataactagtcataccatcctctcctaagaggtaaatgctgtcacacctgcctagacccagccaaaatacaagcctaaagccacattgtgccaaacctatgccgcactctctgtgccaggccaccatctagcacaagcaccaggtttggggagtgcagttgagagcaagtttgagggtcctgagtcaggtaggctgggaagttaaggtgacaaatggccttggataagcatccatcgtacctgggagctatgaggtgctacagagtttacagaacttagagtagttagtcttttcaattcgtattctatatatatctgacagagaagttattcccacctcgggaacatacagagctaggcacgggatgcctaaaagattcctgtagtgggaaaaatagatcaaagccccctcagggaggaaggaaagaccaatataatataataataaaccaatataaatgcagaaggcacggaaagggcttagaatgctgaaggactgccctccatgcctttagctgtgcctgaactcgcagcttgcttggaccaacatctggattcatagagctagaaggttggctgtagagccaagagcttggtaagaaagaccaacttccctcattatctacttcctcgcagaggcacgtgacccacaaatccactgatggttcaggcagggacagtggctggagaactggatgggaggaggacctatgacattgcctgcatgtggaagagacagagaggtggttttaaaaagatctatgctaaatggaatcctaatgactaaagtcacctgtgtttattactgagagttcccatgcttatgtagctttaatgtcctgggcgctgccatgtagagtggaaacatgagcctacgcccatctgatgtctccctgggctaggaaggcatttagagtaagggtgagacactcagtgtccaagagagggaaggtttacttcagcttacaactccaggttacagtccattgttgcagggcagtaacatcaaggcagactgcaacctgaagcctcatacccagggtcaagagcagagaggggatggaacacttggatcctgtgctcagctagctttctgtaccatagacagttcaggacccaacccatgaaacaatgccgtctacctccaagatgtgtcttcctacactgaacagcatttcctacctgccgctttatgatgacgtctcccaagtgactatgctttatatgacacacatcagtcctgataacagactgggttgattattatctcccagtattcagatgaagaaactgaggcttgtcatggcctgaggagaggcctgatcgtgcagaactagaatgacctagctagggtcttcctaatttcctatttcagtgtgcagggcccccagatgagtgctctctggcctatctctctctgaataagaattctctctttgctaggcagaggtggcatgtatctttaatctcagaactcaggagacagaggcaggtggatctctctaagttttgaggctagcctggtctacataatgagttccaggacagccagggctacacagagaaagcctaactctggaaaagaaaagaattcactctctccaaagttccccagcccataagatatgtatgtagaaggtctctgccaactcttggcattgtgtgccgcaggtggtgaacagatggaactaggagaaacagaagctcaaaacaggaaacataggctgaccctggctgggcacgaactctggtccgtgcaaaccaggtgttcagatcacaggagaagcatttcaaagctgtactcatctccccagggagtgctgcctgttgtacagctggaagagtcagctaggagctgatatgctccaagtgtgctcatagctggtgttggtctgtaagccagcatcagggggaaagacatggatccggtcccactggtgaccagcccagaactctgagcacaggcctcccagctctgagccttgacctgcccatggtgaggttgaacctgtgatgtgtaaggatgttggtgcgctggaggagatagctcataccagttcaggggagctagttacacatctcctcccaagtccttgttcaggtctgcagtttgaacttggtcactgtggaagtggttacatcataggaattggccagcactacaggtcagtttctgtttctggctttcgcttggaaattctattgtgaagcatctcttctctcagtcagctgcatatacacaaggggctcgggttagaccactggcagtggtggatctcaggcacagtggtagtctctggagtagtgattgatcttgggcagtgggagatcttgggggcagggatggatctcaaggagagtgatgttctcaagcaatggtcgacctcaggcacagtagtagatcttgagtcagaatggatctcaggggcggaggggggggggggaggacagtgtcggatctcagggacagagatggattcaggggcagaggtggatctcagggacagaggtggatctcgggggcagaggtggatcttgggcacagagttggatctcagttttcactgcagatgcccatgcagcagtccttggcctgtgaactaagtgtgatgagaactagatgacccagcaagcagcccagggtagcctcaggggaagaaccaggaaagggcaaggaaccagaatttgttaccccagcccagtgctctttctcagttccttcttgtcgccccgtactgagccaccctaggagttgttagggtcgtgactgttgaaccctgcagagcctttctcttccagggtaacctcgggtgcatgagtggctcacagggagctggcactcacagccttcatcctcttctccttgcagggaagccctacggggccgacgacttcctgcctgtgctcatgtacgtgctggcccgcagcaacctcactgagatgctcctcaacgtggagtacatgatggagctcatggaccccgccctgcagttaggagagggtgagcttgccacccctacacctaccaccatctcccagcaacccaggtggcctggcaaggacttcttagttaggccctagggacatgcacacaagccctgcccaaatagctcattgaccaggaagacagtcaggttgcaaagaaacgtggcaaaactgggaatggtaggaaagtcaaagaggctgggagcatgctaccctgacagtgcagtcagggagggcttctggaggaggtgatgcctcgagtgagcactgaagggtgagcaggcgccaacggataaagaagaggaaggagccggtcatagtggcacacacctttaattccagcactccgacaacagaagtaggtgggtctctgtgagttcgaggccagcatgttccacacagttaagttctagaccagccagggatgcagagtgagaccctgattcgaaaataaaccagtaaaactaaatatattaattaaaaacaaagaagaggaggaatagtattcttcctggaggcccagcagaagttagtggtttgacaagtgatgcaaaaatggcagacattgtctccagggagtgtggcgagtagagatctgttcttagatagataaggtggctcctgggactcagccctggccaggacttgtgtccataggaagaagtcactgaggcgttgagggctctgtgctccctggttgaatgaagaaagggtgtgatttgctgcggcctgtctcagtttcccttcctcgtccctccacccaccacttcctccgctagggcctcagccacccctccactaagaatcacttgaggtacagaagccccgatatggactctgaggaaccgtggcatgtcctatgggcttccaccctcgaagaatggagtcagtctcccaggcacaagcgtccccttagggctttgtggttctcgagtggctgtccccctttgcatgcgtttgcatctgccacctctggaggtggcaagcctgacataagtgcttcagtgaggtcttctaagctcaggggaacagggaaagcgggagagctttgctattgtctgtagctctgagctgtggctgtggcacctggagctacccccttttgctctttagttacatgttacctgcaattggagcacctggttttcctgtgaagtctggggattcagaagaagcaagcttttctcagtccatccacccttctacccaccatccatctgtccatccacatgtctacccacgcatctacccatcaactacctattcattcatctacctacctactcatccatctacccacttttccatccatctgtccatccatctatccatccatccatccatccacccacccatccatccatccatccatccatccatctatccatccatccacccacccatccatccatctatccatccatccatccatccacccatccatccatccatccatctatccatccatcatgccatccatccatccatccatccatccatcatccatctatccatccatccatccatccatccacccatccgcatctatatcagcctatctacctatctacccaccaattcatttatctatctacccatctctccatccatcctccattggccagcccatccatccatttcctcaccagtccatccatccataaacttacctacccactcttcaactcatccatacacactctgtcatcccccacatctccatcccccacatctccatccaccaacccatgcactcattgaaccatccatgccagaagtctgggagtcttgtgagaatcaacaaacacctcactctcacatttgggacctctgtctcctcaaggcttttcttgggtttcaccatgcccatggaagcacccagacaccaaagaaattggcagggatctctagccagcactgctgaaagtgtgacacccaccctgagacagtgtctacccaagtcctgggaaacaaggcactgtgcccgtgtctgcactggatctctctccacctatggaaacactgtctcctatgcgttcgcgtgacccctcctgcctaggatggagtatgatttatcccagatctgatagctggttcctgtgatttttcccagtaggcatttgtggcaggagagatgagggccttcctgtaagcagcttggaggcctgatgtgacccccttcttatacccaccccatctcagggaaataacctggctagagccaaccaagaatccaaacatctcccacacgtgtcttcatagaccttttgcccatgtgccctccctaacctgtgcccagctaatctcaccaatggatttatttaccaagcaatccaccacatgggaaatgtctgcaaaactcatagtggtgtcgcctgtcacctagtgctcatagtcggtactacatggtctccatcaaagagggctagaagggccatatggggtgtataggacttgaagggctatgagagcacccaacagggcttggagttcctccctagtgcctcagagagaaccagaagctcccagaactattgtctgccctcatatagttgtgtgacccaagcgtaactaagccccgccccttacatgcatgacatagaaaggcaagtgacttttcaatatgctcattcatctccaggactcagaatcagagcacccctaaccctgccctgctctccctgccacagcggcggactcagggctgtgcctgctcagccaagcttaaggagtctggaagcgagcattttcattttcatccagggccagttcagataccagtagatctcccatagttaggatgggaagatgaattggggtgggtcccaggcagaatcagcctcatgtccaagaccattggcttggccttaatagccaggaaaagcaggctagagaatatcagaaaagctagggactgggagaaaggatgctaagggcaggggcggtaccgtgtgatcctggccatatcaccctcttcttctatgattcaatttcttccctttaaagaaagcagcagttatcaacctgtgagtcgattgcatattacatgggttggtttttgtgggttggttgcatattagatgtactacatatttacattatgattcatagcagtaacaaaattatagttataaagaagtgaggaaaataattctatgactggggagggggttggtcagtacaacatgaggaaccgtattagagagtcacagagttaagaaagttgagaaccactgcattcaaagtgaaggatctctcaggctgcagagatggcgcagtggttaagagcactgactgctcttccagaggtcctgagttcaattcccagcaaccacatggtggctcacaaccatctgtcatgggatcccatgccctcttctggagtgtctgaagacacatgctcatatacataaaacaaataaatttaaaaataaaagctaccaaaaaatttaaaaagtgaaagatgtcagcaaggttctgaagtcctaacaagttgatggccagataaacatcccagcaaagcattgtctttgaacttaaaattccatggctgctgcagcttcaaataccttaaagcctcaattacttcagggaaaccttaaagattaagattagttttaaagaagagaatttggtgggccaatattttagtgggtaaaggcaggcagttgccgccaagtctggggacctcatttcaattcctgggactcttgtggtggaagggaaactgacttctgcaagttgagtgtgcccacaaatacatgtacacatgtgcacacaaaataaaaatttaaatgtaatacttttttttttaatggacaggatctcgctttgtagctatgtctggccttgcatttgctacgtagaccaagttgacgtccagctcacagagatctgcctgcctctgcctctgcctctgcctcctgagtgctgctgatattatggctgcatagcatcaaatatttttactattttaatccctaaaaacttcatgtgataactaaaatttcctgtgcatccttggaaattgtttttatgataggtaatacactcacggtgctcttcctgttaaaacagtgtttactacagtgagaaggtgggctcccagcgcctcctccacacacacccaggcatccatgtctctcggtttcttacgtatcctatatattttaaaacacttaaaaatcgcattttacatttcagacatcattgtaagagtaccgagcttggatgacagacttgttggaattgctgggtttcttgtcctcttcccagtctggccacattgaataagtatccttagccaggtgtggtaaaccaaccatacctttaatcccagcactcagaaggcagaggctggtggatctctaggagtttaaggctagcctggtctttattatgaatttcaggccagggctaagtagtgaaaccctgtctaaaaataattatatatatatatatatataaactgacttctgcaagttgagtgtgcccacaaatatatatatatatatattctgtatttttatattatataatcatataattatatgtaattataaataacatttctaatttattataatattaaaatagtcatatataattatatatgttatatatggaatattccacacaataccttcttgaagtgggctaaggaaagatgtgagctaagctgtttctatacagtgccaatggctgaagccccagtgcggtgaagtgaagcctttgaagcaggttgtagagcgtggacgccccctggtggctatgaagggaggggcatgttggaagcaatgggcagagccgcacactttgagaccagctctcctcccaatgtggtggatccagacctttctcgttcagacagtgtccttgaccccacaggttcctactatctgaccaccacctacggagccctggagcacattaaaaactatgacaagatcacagtgacccgacagctgagcgtggaggtgcaggactccatccatcgctgggaacgcaggcgcacgctcaacaaagcgcgggcctcccgctcctctgtgcaggtgatgctggggactaagtgtctggggctacaaactgtataggtaccatctgtgcgctatgcttggttgctttggcctgccagccctactatcctcagggtgagcagtgggtcttgcatagaggaatccaaggttctacctgccaatcttcctagctctgcaggtcctgggtaggcttagaagtgccaccaggcaggtgctataacccaataggccaagtggtatgggaggaacaagacattccacatatcccaggctgcatcagatcgattcacccatatgtcctaacagcccagatcatctccctgctacacacacacacacacacacacacacacacacacacacacaacacccacacaccattcttctcggtgctgctggccaaggcttccccattgcagcaatcatcacccgctgttgtaaatcctctatatgggaaactctcatacgtggcggacaatgctcctggttcatgtgtgtcagaggcctgaaacccagggtctgggacagaacaggacggtgataggcagaaaatagaaggagttgggccaagaggccagacagccctccagagctcttcagagttatgtagactctgtgtagaaaatggagtccagcctctgggaggcagaaggtctaaattcttgacccagctttgaactaagagttgattctagccatcctcatttggaagcgatggttactaaacttgtcctgcagtctccagccccctcaggaactccacttcccatccatatcagccaactgagtcctgcatccctgcccatgctcatagctgccaacctagcatctctattccttcctggattcaacagcaccttagaaccagtgggaaaggaaaagaaagctatgcctcagcttctgccactttccctggtgtaaatactccgccccccccccccaacaaggtaaatctgtgcttgcatcgctgaactgggaactaggacatgcacaccatagactggcccaagctggtatgcattggcgtgagggagtgccaacccaccacacatacacacccaacagcacccctgtcccacttttcccttctgggaagaaacagaagcctacggtgaggcccggaccctggcactctgtaagtgcataccaccctttaacatagccattagcgccttcctggttgtggccgtgagccagccacagatattgccactccatccatggctctcgtcctcagtctacagctgaagcaacagtggtcagggtcacacaacaaacagaaccacactcaaagctaggaaagggcagggagtctgtggacccgtactgcatatacttccccactgccataggcatcacctcacatcctaaactcaccccttcctcagctcctcacccccagcttcccttgatcctcttcatatcctgcctctaaaccagagacaacccctgctctaagaggccaatcggctccacttgtctgagctgtgaggcgctaggatgataatctatacccgcagctttatcctgccttccagcaatggcacccgaggtgtggggagataccgaatgaatgcatgattgacccatgatggcaagggagaatagtgaagagcctgcagactggctaagggcaggggatgggactcttgtcattgccatggctcaaaaatgattgaatcagctgggaattgatgacgtggctagtaatggtgcttgacaggcaaatttaacaatgtgagttcaatccctggaatctttgtaaaggtagaaggaaggaagcaactccacagagttgtcctgggacctccacatgggcatttggggcacatgcatacaccatgcatacacacaagaattaaatcagtatttgaaacctgactcaatcaccctaaataagtccagtggggaggtgagacccagagaaggaaagttacccaccagcctcagtggcagagtaagaaaaggacaccgttgccctaactctcagcttcacaatagcttaaggtccaatgtcaccatgctcctgtccgctggccctagctcccaatgttgggatgaaagtgacccagaatgctattggtaacctcacacctcctccatcttgcctgcaggacttcatctgtgtgtcctacctgaagcccgagcagcagtcacggacactggcgtcacgggcagacacagcagcccaggcactgtgtgcacagtgcgctgagaagtttgaggtgtcacagccccaagactaccggctcttcgtgctggtggacgggcgctgcttccagctggccgacgaggctctgccgcatcgcatcaagggttatctgcttcggagcgagcccaaacgagacttccacttcgtgtaccggccccaggacagcggcaaggatgcttcaagccagccctgtatagtagtgcgggaacccaacttcctataagctgtggtggcaggatctcctgagaggaggctagagggattgggactgggctctcattggccgctctccttaaccacacatccctgccatctaggtgcctgtgtcagtcacactggtgtaacgcccactgagcatgcctaagccaatcaggtagagtcattgcctgaggcaccaagttcttagttggatgtaagggaaaccaaggctcaggtggaagaggctcttgccagctgcagcaaacaagcccaaccctgctcacaccaggttcctcaggcaattctcctggtcctgtctcacctcctagcccccatctttagtctttcctgagaagagctcactttccccaggactggctaatgaaggggttcctggccccagctgctccctgaccctcggggatggagctgagatgttccaccacaacccaagatctaagagtattgttttgaagagacagccctgcaccgcatccctgcctcagaatttgccttcagctaccagagtgcctagtacaacggggctcctgagctccactggaagcaaccaagccagctccagggacacatggacaagttcaaccaatgccataaaattgggagtgggagggtcattaaaggcctgttctgtgatggaaacaccacaggtcatcagtgttgatgagatgcactatgggggggggggggttaataaaaacccttttgcaaaagctaac

SEQ ID NO: 640 - DNA, 3505 bp, Mus musculus
gagggacagcgccagcgccacgcggaggtcgctgcgtccccaatcgcctgccccacgatgcgacgcgccgaagcgccctcgagcgcccaccctgccgggatgttcctggtgtgccgggacaacaacctgaagcaattggtgctgtgtgtccacttcccttccctgaagggcagctcagctgaggtgctggagtaccccatcaaagaagaaaaggctatactgtacctggaaggctcagttcttgtgtttgaggacatcttcagactgattgcgttctactgtgtcagtagagacttactgcccttcactctacggctgccccaggccatcctcgaagctagcagcttccttgaacttgagaccatctccaacctgggcctgggtttctgggactcctcgctgaactcaagaggctctgcagagccactcagaagcccagcccctgggacccctgcatcctccagcctccggcctacaacccattacgcaaattgttcctgtgaaatcgagctctccgtgggaaatgaccgcctgtggtttgtgaatcctattttcatcgaggactgcatcctaccggctgatccacctccactgcctactggcagctaccctccacgccctacgcctgccaccccggatgctacctcacccacctccaagggatccccacgtcgccccccacctccacccccgttacccactgttcctcctactggccctgcacggcctcttgcgcctcctgtaccgcctgctggccctttgcccaactcccccctaacgcccacctctcaccttgcaccccatgcaccgggcccccctggccactcaaaccaaccacccatgacagcctgcgagagtctccctcgcccagctgtaggcctgggcccctttggagaagaagagatgaaacctgggacaactcccaatcccttgcaccaagcccctccccctccattacccctgaagaaggctcttccagcagcccctcccaggaggcgcatttctgagagggtatctctggaaagccagaatgtggggacttcaacagacagggaccactcaggcatttctaggacagcatcactcaaccttcctccccagagcaccgtaagtagccttggggacaggcctccaaggaccacggagcaaagccaggacacagaggccaaagccagccatgctgacagcataccagtgcctcctgggaaggccaaacaacccccagtaccacccccaaggaagaagcgggtctcccggcagctggcctcaacccttctcagtcccttggagagccccatacaggaggcatcctctgagaaacaggcgactggtgcatcttgggaaggcttgagtcctgtccggcaagctggcatgcagcacctccaagttcagtccagcagctgtccccaaagctctccagagttcaagggttcccaggcctcactctcagacagcctgggggtgcctgcctcggccgctgaccaggactcctactcaaccagcagtgcagaggaggagctggagttcagcagccccaacgtgaagaagaaaccctcaatgatcctggacaaggcccgccaccgcctcagcttcgtcagcttcgccagcgtcttccatgccttcctctccagcgaccgcaaactgtataagaaggtggtggagctggcacaggacaagagctcctacttcggcagcctggtgcaggactacaaggtgtacagcctggagatgatggcccgccagacatccagcactgagatgctgcaggagatccgtaccatgatgacccagctcaagagctacctgctacagagcactgaactcaaagccttggtggaacccaccctgcactcggaggaggaactcgaggccatagtggagtcagccttgtacaagtgtgtcttgaagcccctgaaggaggccatcaactccagcctgctggagatccacagccgggatggctcactgcagcagctcaaggagaaccagctagtggtcctggccaccaccaccaccgacctgggtgtgaccaccagcgtgcctgaggtggctgtcatggagaagatcctgcagaagctgaccagcatgcacaaagcctactcaccagggaagaaaatctccatcttgctgaagacctgcaagctcatctatgactccatggctcttggcaacccagggaagccctacggggccgacgacttcctgcctgtgctcatgtacgtgctggcccgcagcaacctcactgagatgctcctcaacgtggagtacatgatggagctcatggaccccgccctgcagttaggagagggttcctactatctgaccaccacctacggagccctggagcacattaaaaactatgacaagatcacagtgacccgacagctgagcgtggaggtgcaggactccatccatcgctgggaacgcaggcgcacgctcaacaaagcgcgggcctcccgctcctctgtgcaggacttcatctgtgtgtcctacctgaagcccgagcagcagtcacggacactggcgtcacgggcagacacagcagcccaggcactgtgtgcacagtgcgctgagaagtttgaggtgtcacagccccaagactaccggctcttcgtgctggtggacgggcgctgcttccagctggccgacgaggctctgccgcatcgcatcaagggttatctgcttcggagcgagcccaaacgagacttccacttcgtgtaccggccccaggacagcggcaaggatgcttcaagccagccctgtatagtagtgcgggaacccaacttcctataagctgtggtggcaggatctcctgagaggaggctagagggattgggactgggctctcattggccgctctccttaaccacacatccctgccatctaggtgcctgtgtcagtcacactggtgtaacgcccactgagcatgcctaagccaatcaggtagagtcattgcctgaggcaccaagttcttagttggatgtaagggaaaccaaggctcaggtggaagaggctcttgccagctgcagcaaacaagcccaaccctgctcacaccaggttcctcaggcaattctcctggtcctgtctcacctcctagcccccatctttagtctttcctgagaagagctcactttccccaggactggctaatgaaggggttcctggccccagctgctccctgaccctcggggatggagctgagatgttccaccacaacccaagatctaagagtattgttttgaagagacagccctgcaccgcatccctgcctcagaatttgccttcagctaccagagtgcctagtacaacggggctcctgagctccactggaagcaaccaagccagctccagggacacatggacaagttcaaccaatgccataaaattgggagtgggagggtcattaaaggcctgttctgtgatggaaacaccacaggtcatcagtgttgatgagatgcactatgggggggggggggttaataaaaacccttttgcaaaagctaac

SEQ ID NO: 641 - protein, 907 aa, Mus musculus
MRRAEAPSSAHPAGMFLVCRDNNLKQLVLCVHFPSLKGSSAEVLEYPIKEEKAILYLEGSVLVFEDIFRLIAFYCVSRDLLPFTLRLPQAIASSFLELETISNLGLGFWDSSLNSRGSAEPLRSPAPGTPASSSLRPTTHYANCSCEIELSVGNDRLWFVNPIFIEDCILPADPPPLPTGSYPPRPTPATPDATSPTSKGSPRRPPPPPPLPTVPPTGPARPLAPPVPPAGPLPNSPLTPTSHLAPHAPGPPGHSNQPPMTACESLPRPAVGLGPFGEEEMKPGTTPNPLHQAPPPPLPLKKALPAAPPRRRISVSLESQNVGTSTDRDHSGISRTASLNLPPQSTVSSLGDRPPRTTEQSQDTEAKASHADSIPVPPGKAKQPPVPPPRKKRVSRQLASTLLSPLESPIQEASSEKQATGASWEGLSPVRQAGMQHLQVQSSSCPQSSPEFKGSQASLSDSLGVPASAADQDSYSTSSAEEELEFSSPNVKKKPSMILDKARHRLSFVSFASVFHAFLSSDRKLYKKVVELAQDKSSYFGSLVQDYKVYSLEMMARQTSSTEMLQEIRTMMTQLKSYLLQSTELKALVEPTLHSEEELEAIVESALYKCVLKPLKEAINSSLLEIHSRDGSLQQLKENQLVVLATTTTDLGVTTSVPEVAVMEKILQKLTSMHKAYSPGKKISILLKTCKLIYDSMALGNPGKPYGADDFLPVLMYVLARSNLTEMLLNVEYMMELMDPALQLGEGSYYLTTTYGALEHIKNYDKITVTRQLSVEVQDSIHRWERRRTLNKARASRSSVQDFICVSYLKPEQQSRTLASRADTAAQALCAQCAEKFEVSQPQDYRLFVLVDGRCFQLADEALPHRIKGYLLRSEPKRDFHFVYRPQDSGKDASSQPCIVVREPNFL

SEQ ID NO: 642 - DNA, 197418 bp, Homo sapiens
  misc_feature (1)...(197418): n = A, C, G or T/U
aaacccctgggctcaagagatctgcctgcctcggcctcccaaagtgctaggattacaggagtaagccacggtgcccagcctcctttgcttcatcatttctcatctcctcacctggcttctcctccacctgctccttacgtgaaagtgtttccctgcattccaacctggagcctctttctcttgcccagtggttctccatgctggctgtccactggagtcatctctggacttgaaaacacacagacacagaaacatttgttgacttccgatggcctcactgggtgacctgaggtgacctgtctcatatttctaacatcatcacacaggaatgtcccttctccctctttatcttgcatgactctgtgcctgtcctcctgctactccctctgcttcaaacaacttccccagttctctgtcttgcagaggagagcccatacttccttcaaggccttcccagacccgcaggccagaatgaatcacctgcctctggtttttatgatcttttgtttgtaagcttgcttctattgttatttggtaatcattcatttggaatgttcttgaacaaactcaatctgaaatattctcacctgtggcccccaccaaacatgggtaccaatctggggatgtctaaactcatctctcatactggcctttgaaacctagaagcaacacaaaggttttttttcacacactgattcattcaacaaacatgtactgagggcctactctgtcccaagcatcatgccaagtgctggctgcagagatagagggagctaagtgtcccccaattctgggaggaggtgaactcgggggctgcaggagcccagagaaggggcacccaaccatctcagcagtcaaggaagacatggactcaagccaagccttaaagaatgaagggtgtcaagggtgatgaaggggagtcacgcacacagacatacatttaaatcacagcaaacattttgtgatttaaaaggaggcaatgaataactaggaaaaagtatgatatagagattatgaaagaattccaagtagctcaaaccggaaacttcatgggggctacggtgggctgaataacgcgccccagaaatgtccacatcctaatcctcagaagctgtgactatgttttcttacatggcagaagggaatttgcaggtgcgattaagtgaaggatgttgagatggggagataattttggattatatgggtaggttcaaggtcatcacacggtgcttataagaggtggccaggagggtcagagagaggagatgagctgatggaagcagaggtcagaataatgtggggtccatgagccaaggaatgcaggaagcttctagaagctgggaaaggcagaaaatggattctctccaagtctccagaaggaaagcacccctgctgacaccttgattttagcccagggaaacccaattttggatttttgaccttccgagctgtaagattataaatgtgtgatgttttaagccactaaatttatggtgattgttagatcagccataggacatagcacagggcccaggagtgagagcgggaagagagagatgcaggtgagggtatgtctgagagtgggagggccttgaggggcagccagtggggagccactgaaggcggcttcccagagcagcagctgctctggattccagtttctgaagggccacccgattcagggtggaggatggctgggatgagggaatggtaacaagaccagaacaacagccatcagccaggagctcagaaatgaggtgaggccgtttgcggagaggagaggtcgtctcagggcagatggtcagtgtttgcagggtgacttgtaggtgcatgtggaggtgctgtcacccacagaatttgggaactgattattgagagaagggggagagaggaggagagcaaagctcccagccctctgacagggaagcccaggggaggagcaggtttggggcatgggagatgatgagtcccatttggaaacgtggcatctggcaagtctttgggatttgggctgcgtgatttggcctctcagagaccctcatctcatcccctgcaaaactaggatggtgaacctcctgcaaagggttgttgagcccattatatgagataatgcgtccctgtcacctggcctggtgcctccaacttagccaacacctatgcatggccgccacgatggcaggcagaacacagacaccgtgcaacaaagaggaactgctcccctcaaagcttccactcttgttcccttgctgccttctctccagaaggctggtctccccagggtgaaggagggcatgatctggacctcttaaaatttgaacactgggcttgggcgtgaaggggattctggagcctcgtgagtgcctcaagcctgggcgcctgggatgaaggtttctcctacaatgtgggagacagctgcccaccttgaggcttggccctggggcttggggatggaagaggagatgggatgggagcctctcaaactgccttctccgggatttcagctgtggaaggaagagtgtgtgagagaaaagctgtgggaagcaaagggggcctagagctcttgccatgctcccccttgggcctctggaagaagcactgggcatggtggtcaaagccagctgggctggcccacagagtccaagggagggcagcatggccgggcatgcagggagccagcttcccatgtgtggtgctgctgacctgcaagcaggggctgacttgggccttctgggccagagagctggatgtggcagaggggtcttcgggtccagtgagttgctggaggctgagctgacacagtgcagccactgggctgtgaccaagctgggactggacttcttgtgcaacccctcaggctggagcaaactaaaatagtcagtcatcccaggccagggccgtcttcttggggatgttacccatgcagttgcacagagcttgtgcttagagggggcccacacttagaagtgtcctgcactaggcttaatgctctgctgttgcagtctgtaattcttgaaatctgtaccttttttttcaggagggggtgagtgtttttattttgcaccgggtcccaaacatttcgtagcacatcttcccataggccaaggtcacccatgaggaccacaccctgcatgtcagaatctgcagcttctgtcaacgagacccttgggcagtggggacattgagtctccctatctggtccttgtccaaggcttcactaattagcggcagctgaattgaacccaaacttctccaaacatgcctcttggcacccctgtcaggggtagggcaccaggcagaagtcactgaagagcccacccaactagacatctgttctactcttataaaaatcaataaaggaaaaaaattaaaaataaatcaataaagggaaactgacatgtgtcatgaacttacaatgtgacagacactgttagccactttccatatactcctcacaagcagccatggagtaggtatacctctacccatcttccagaagagaacacttgggcccagagagggtaagaagaaacttgcctaaggtcacacagccagcaagtggggctgagacaggaacctgggcttgtggttccaaagcagccagagcttctgcccctccctgccccaccccggcacccagccaacctcaacagctctttaaggaagcgagtccccatttgggagtgttcttacctgaagtcccagaagcctcctgctgagtgcacacctgtctgcagactgccacctgggatgacagcagaagcccaggctgggactgtggctgagaagaccagtgtgggatcagatttcccctcaaactgactggcttgttgccacaccataatttcaaatgaaccaccctggtttattacactgaaacacacttgagaacacatttgattttcagaggaagtaaatatccccaaaaaggagaagcgaaacaaaaacaaatcacatccttacccccaagtagttatggaacatcttttttgctaagcacactatacaaggaagtgtcagaggcagtcctggtcctccaagcaaaagacaggcgagcaggattagcaatgattagcaattgcagcacctctcaatagtgggcacttaagttttcctaggcggtgcaggcatacctcggagacattgcaggttcgttggtggttcagttccagaccaattcaatacagcgaatatcactttattgtgcaagtcatatgtatttttttggtttcccagtacatataaaagttatatttatactgtagtctactaagtgtgcaatagcagtatatctattatgagaaaccaatgtgcatacctaaattaaaatatgctttattgccaaaaaatgctgaaaatcatctgagcctttttgctggtagagggtcttgccttgatgttgatggctgctaatagatcagggtggtggttgctaaaggtcagaacggctatggcaatttcctaaaatgagacaagaataacgtttgctgcatcgaaggactcttcctttcgtaaaagatttctctgtagcgtgcaatgctgcttgatagcattttacccactgtagaacttgtgtcaaaattagagtccattctctcaaacccagctgctgctttatcaactaagtttacggaatattacaaatcttttgttgtcatttcaacaatgtttacagtgtcttcaccgggagtagattctatctcaagaaaccactttctttgctcatccataagaagcaactcctcatccattcattttatgagattgcagcaattcggtcacatcctcaggatgcccatggaattctagttctcttgctattcccacatctgcaatgacttcctccactgaagtcctgaacccctcaaagtcatctactagggttggtatcaacttctttcatactcctgttagtactgatattttgaccttctcccatgaatcacaaatgttcttaatggcatctagaatggtgagtcctttccagaaggttttcaatttactttgcccagatccatcagaggaatcactatatgtggcagcaatagccttagaaaatgtatttcttaaattataagacttgaaagtctaaattattccttggcccatgggctgcagaatgaatgttggtgttagcaggcatgaaaacaatgttaatctccttgtacatcttcatcagagctcataggtgatcaggtgcattgtcattgagcagtcatattttgagaagaatcattttttctctgcagtaggtctcaacagtgggtttaaattttcagtaaaccagatgtgctctttactgtaaaccagtaaacagatgtgctgtcattcaagccttgttatttcatttatagaaataatgaaatgttatttcatttatagaaatagtgaaatgttatttcatttatagaaatagtgaaatgttatttcatttataggaagagttgatttagcatgattcttaagagcctgaggattttcaaaatggtaaatgagcattggcttcaacttaaagtcaccagttgcattagcccttaacaagagagttcagcctgtcctctgaagcttagaaaccaggtattgactcctcctctccagctgtgaaagccgtaggtagcattttcttccactagaaagctgttgtgtctccactgaaaatctgttgtttagtgtagccgccttcctcagtgatcttagctagatcttctggataacttgctgcaacttctgtatcagcacgtgctccttcaccttgtactttattttttatttttatttttttaaataccccttggtgatctgcacaccttgtacttttatgttataggatgacttctttccttaaacctcatgaactaacctctgctagcatcaaacttctcttctgcagcttcctcacctctctcaggcttcagagaatagaagagagttaagaccttgctctgactaggctttggctgaagggactgttatggctggtttgttcttctatccagaccactcaaactttttccaacttagcaataagactgtttttctttcttatcatttgtgtgttccctgaagtagcttccaccagataagaagcttccccaataatacagtttgggggctgcttggaaagctgtttgtcttctcagcaacttagtaccctctctctgagtttgcccacccctcacagccaagatgggtccatgagattactcctcctgagaagcgggaactgggactgtgaggtgctgatcagtttcagtatagctgcaatagagacatgtactcttgggagttgcaggatgatctctcagtagaggagggaaagaggtctaggacctgcagaggggggacaatgaggcagaatcccagagagccacgctgaagaaggtctctattgtcccatgggagagatccccagcatgtctatctgggccccctcccttccagaactgggggaatccctgaccacccatggggaccacaaggcacacctatacctgtgtcagattcaccttcctgccacacagaatctcagaacaggcagaggtaagagatccaggcagatgccaggccagcccctgtggggcaactcggctctcagaggtgcttctttagccagtacaatgtttagaaattagggccaggcacagtggcgcagtggctcacatctgtaatcccagcactttgggaggcagaggcaggtcgatcacctgaggtcaggagtttgagaccatcctagccaagatagtgaaaccccgtctctactaaaaatacaaaaattagctgggcctggtggcaggtgcctgtaatcctggctactggggaggctgaggcaggagaatcacttgaacctgggaggcagaggttcagtgagccgagatggtgccactgtactccagcctgggcaacagagtgaaactccgtctcaaaaaaaaaaaaaaagtttagaaatcggaaactttccattaaaaattccagattttcagcattttttaaactgtaagggctagggtgctcaggccctcattcctgttggacagctgttggtgagaacggagaagaggctgtcccttttgcctggttcccagttgaccccaaccctaccccgtcggtgcagttttatttccatctgtcctgaggacactgattgattttgcaaaaacagagcttgtctctgtccgcctctcttttaaagatttctccaaatctttaaaatggaggaaatggacatgtaaaaccttgttgggggtcagaagaagatggaaccctcgcaagatgagctgttttctgatgatctacttttgccaaacaaaatatcccaaacagcaaccattttattggtcaggaattcagagcatgaggacttgggaatgaaaagaggacccaggaagagagcagagggcaagcttggccaaggtgcaccatgggccacaaccaaaaggggctgctcagattcttggaattgtgactgtctcctctatggtcatttatcagcaacagggtcatggcggggctccatctggtgtccacctgaggaattctggcttctcagagcaggtgagcattggggctaggcccatggaagccaggctttaagagacttgtcctgtgtttctcagcagtgatccagggagctgaaggaaacctttcagatcagcctgggagggggctgaaggactgttctaggtgcagtagttatatagaccgcttccctggggtccagggaggcctgagagtggcctgcagacttgttttagaaacaactaaggaataataatggggccctggaggcaggggtcttcttgtccatctcatttgtactcactgtgtttatagatgagcaagatgagcctttgggaagagacttgctcaaggccacccacccagaagccgctggggttgaagttgaacatgggtctgtccgcaaagcccatgttttcaaacagggctttgaaacccttggaaacatgttacagccctgttgagggagacggcggaggagatgactcattcccatccaggaggaaataattcagcctctggaggagaggaaaagtcagtggggggtggttatgacctaacgaagggaacctgtaggaatctgggcagagggggaaggggtgtgagctggagtagtcagggtggcctcctggaggctgtactttttcccccccttaaaaaaaaataacagctttattgaggtataatttgtatactgtacaattcacccacttacagcatacaattcaatggtttttactgtagccagagttgtgcaaccatcactacaatgaattttagaacattttcatcaccccataactcttagcagtcattcctcattttcttctcttccccaggattctgacaatcactagagtattttctgtctctctggacttgcctatactggacatttcatataaatggaatgtggtccttcgtgactagcttctttcactgagcataatgcttttgaggtttatgcatggtgtagcatgtgccagtacttcattccttttcatggcctaataatattccactgtatggatgtatcacattgtgtttatccatttgtcaactgatgacattagattgtttccaccttttggctagtatgaacaatactactctttatagtagtattatatactatatatatagtatatactattataaacttatacatgaacactcatgtataagtttttgcatgaacatgttttcatttttcttggctacataactaggaatgcaattactgggccatatgcttaacttgacgtttaactttttgaggaactgctagactcttttccaaagtggctgcaccattttacatcccagggggaaggctggacttttcgtgtatgctcagatgtgaattcttttctttctaacttctagaaggcaggctgatttggtggaaatccagggaagatggaggaggagggtgtgaggagagagcagcagggcagagaggcctggggatcctttcaccagagccctgggctcagtcctgtctggtcctcacttgccatatggccttgagcaagtcacctccactctctaggcctcagtttccttatctctaaaatgatggtattagacctcgacgattttgcccccggaggacacttgtgatatctagagacatttctggtcgttacagagagaggctgatgctatgggtattttatgaatcatggagaggccatggataccgttaaacctcctgcagttttgaaggaggtttaataacaaagcattagctggccccaataacaaagcattagccccaataacaaagcattagccggccccaaatggcagtagcggccaggtaaagaaatcctgcatgagactgaggtgacctaatagggtccagtcctgctcagtcactctgggaaatgctctgggaaaacactgggctcgggaggcatttttgaacacccaggcacttagaagaggcctcacggtcccacctggggttgctgtgggtcttgcatttgtgtcagctgtctggcgttctccatctgcggtacccggcacaggtgaattagatgccaggcttgatggacgagcagtccgccttgttgaggagtgagctccttgtcacgggaagcatccaagaggaggcggcgtgcacatctgtcaggaatgtggaggaggcgccctggctctggtctgaggttgcccttgaacgatttcgaggctccctcgggcaaggctgtggctccgagtgggacgaactccccgccagctctgggcctccccacctgccggcccgcggtcggcgccggcacaggcggagggcgtcttccttcccctgcggccccaagccaagtggaagacttttctctaagtttccctctccgaagccccgcgggcctcccgcgccccagccccagccacagcctgtggaggcggcaccccgaggttgggcgcccgtgcggcgccttggccccagcaccccccgccccgaggcccggccccgggggcgcggccgcccgggcctccgtgtgccccagggggctccgggccgcgagccgctgccgaatggcttttgacaaaaaaacccttgaccaccaaggccagcctcttcctgaaagccccgctcgctccgatacaggaagtagaagggagcgagagccccagagcgcggcggcagcggcggcctggcccttccagagggccagagccagggacatgcgggcgcccgggactccgcgttccgcgcggcccggcgcctgagcgcctccgttccccgtcccggagctgccggcggcatgatccgacacgccggggcgcccgcgcgcggggaccccacggggtaagtccgggcggccgccccctcctccctcgcgatccccacggcccgcgtcctggccgccccactccacttcttgtcccagagagtccttcgggcgcgtgacctcggggttgtcgggctgatacgggacccccaccgtggccgaggccagaacctggttctgcggggcagggggcggccctggtgactccgctggacccgatgttggctaaactttcaaggccaggcatttcactgggaacccagtgcacactttaggctgctggtggacggattacgagggagtgcgtcgctacctgtcagcgccggggctgcccgcgtggacgcggccccctccctggcgtctgccccgcctgaactttgcaaacaaaactcgcggtcccagccccgccagcctgctgcacccgctgctctgcgagtcgcagcgcgcgccctcgggtactagagccccgctgggcgtggggtcggagacccggacccccgcaactttgggtgcccgcggcccaacagctgaccggccctcctggaccgagggtccactgggcccttttcccgccgcccctctgccctggccgtagacggtgaccttcggaccggccctggtcgagcctagtgcttgggtagggtccagggcgcacgggctgcgcgcgggctgtggatgcatgacgccgaatggtttgggaactgacttggagaggagtccccggtggctaagtccccgctccgcctccttgtcgcccccagccccacctcgcgagctcgggcattgctcggggctgggctctgggagaaagtcctctcgccttgcccagctcagagggcgtcctgagaagcttcaggtgttgtagagacgcccggtcggaggcggattcccggggaaagcctatttctgggtacccaggagcgcgtctggggaggccattcccagctttttggtttaaaagtcccgggcctacttctctgatggacaccctgccgctccctggcttggcagtgggacctcatctcccaggccctcagttctctgctctgtgaaacaggagagttgggcccatcttgtgcagtcctgaactgggggacagctggaggtgactggctctcactcagctgggagggactgggagggggccttaagctcatctagatctgaacgtctcccttcccttcttctccctccatcctgccagcccggaaattctggatgctggtttctttctctcgaaagcgacctctgcaaagacaaataccatccggtgggaagaactgggaatccgttggggaagagccccccaaccctcacacccacttgcaagtatctgccacacccaagatggcagggtgaagccggagaggagtttctcagggaggaaggggaggtgaggggccagggcgctggcctcaccggcttctcattttccccagagatgacctagtgtgatccacttcctcttgtctttttttgttcattactgggtcggttatttaaactctctgtatctcagttcacttatcaataaaatgataaataatagtaactaccccttagagttgttttgaggactaaatacacagagttgaatacattagactatatggtaaacccttaatcataattatcaccattattatcatttgttgggtatgatccctccatttgccaaatgtgtaaccttagacaaatgacccggcccctgcctcacctgtaaactgggggtgctagcaacacacaccacatagaattgtttcgtggattggctgagttcatagctaagtagctgcccccaggcagcttaggggaaacatccgttcaggcctgcttagaactgtgcttggtacattctagcactgtatgaatattggtttgttgctaaaacatggctttgttttggaggaccttttgggttggaaggactttgaagggtagaggatttgctgatggattggagggagagaggagtggaggatgactctggttgggctctgtctgcccagggtccagtgcatcagggacagatgccgaactgtgcggagtctgctgagagtgggttctcagagtccactcaggccagtagctttcagggggtagggagagacctagcaggcacccccatgcagccccaccatagcaactagaccagtcaccttttcacatttttgctatattaaaggtctgcttaagatttcatttggaaaaggattccactgctggaaaaaatgtggctgtcattgacctaatcaatcccctaatttaacaatgaggaaccagaaacccagaaaggggaaatgggttccctggtattgggggaggtggtggtggaactcatgtctcctgagccttggcctgatctaatacaggggtcctgctggagccctgaagaggagccccttaaccactccaggctgagacagggggctcttctgggtggggcccacctacagcagggccagtgatggattcagggtgtgagctcgcagctccagctctgtcccttgaccttggcttcctggattcaaggagctaatgttccctggaggtcctgactggcacttagctaggagacctagccctttccagatcctaacagaggctctgatgcacaggagcaaagggtcacctcaccatctcaagtctgctctcctgcccccccaccccgagaagccccagtacatcctctgagaagcagctgggagtgcaaggggctgggggtgcagggtccccttgggttgaaggagtcgcagcacatttatccctgaggccctcctcatctcccctacccccttggtgcccctctatccgggccctgggtccctgatctgtgatcttcactgaagctgcaagtgtgaaaagcttgaaatgccacagggcacccgcattttaacccaggagatacagaaatcaaaactggaaacctaccaggaattgatctcagctggaagcagagagaggcatgatatttgaaggaggacacccagacccttcaccatccccttaggcctccctggagctccattttggagacaggagtctgaggtggtctgtggtgcctcccagtcccttgccagagcagagacggaaagaatgggtgacagatggccacaaactctgtctctgtaaccccctggaagattccacctgtcatggcaagacatggcaagctgtgtcatctaggcagtgatgagtgagcaccattgggtgggcagctcggaggaggggagtgcctgagcaaaggttcgggaggtgggaaagtgtggtggaggggcttgtggggcagggagtgcacccttcaaaacccagaggtacatgacacacattgctttacaaagcgactgttatcagataacaggggttgaggaaacggaagacaaattttgtctggggagagaattacagaagaggggcaaaagtataaagggggctgcccacagaaccccatccttggggcctgggtcacctaggggattgggggcatctgtgtgttcagaaagagccttaacatggggtaaatgacacccaaggccccttaacttcctgttggcccccagctatctgatcctattagggagtaacctttagaagagagtggggggccatgcgttatcatcttgttattgggtaattgattggtgctgctctgatggccaactccagaatgtcctgttgatacaactattgccccgaaccagcatttattctgagaaccaggaagtcgaatttctcctgcccaccaggggtgtctgaaacatggatgttttcccccaagattggagccaaagatgaaaatcacaactttaatgacttccaaactggatctcccctccgtcctaccccacagtgggcccttctggtggtttggttgttgccaatcaagctagagggactctcaggccaggcagggaaagtggtgtgtcccccaacagctccctaattgccctcaggtgacatgctgtcctatttaaaaggtccctcaagaaagtcctgccctctgtaccccagcccagccctgctggaagccagtgtacagcttcacatcttctgtcctctccaacgtgcagagcttgtctgtggtcttgtacctttgcccatgaggttctttctgccctttttacagggctcacctcttccatgtagccttctatccatgccagctcacagagattcctcctttttgaatattcatagcctttttcacatgaaccgcttgtttgcctagcaatttgaaagaagccaaaacctctttaatatcatgacttcctacttcagttacaaacttccaaagaaaggggtcaggtcttttagttccatatccttgtgtcctacatgcacttggcactccataaatgcttgaggccaatgatacgctgattgaaggctgcacagccttttcttttgtgtccctggagcccctgaatttctggaggtgtttacaaggtggcctagatcacagggcggggctaagtagggggagacccagggcttggggggctaggagcccaactccattccgcagcagctggtgacccccaccacaaggctaccacactcctctccaagtctggaaagcagaggccacccaggcaattgagtagggaccctgcttggccccaactcccctaattttatcctccccagctgtgctcctgatacttgtcagggagaaaggatgggggaaggagaggccagccctggatactgtgtctcagccggaagaatggagaatagcttggtgtacagacttgggggagccctggggcatcagtgggtcccaaatgcgggtctctggaccactgagaaactgggaaaataagggtggcctgtgtgtgtgtgtgtgtgtgtgtgtgtgtgtgtgtgtgtgtgtgtgtgtcagcatcagtgtcagccatggctgccaacgtgtcttttcttaggcagaactgtcctttgctggtttggaagaggcgtgggtgtttgcatgttgtaggtcatcagtagggctagagaatctggggtcctgtctcctctagtattttaggattttattctaggaagctgctcccttccctctggacctcattttcccatctgagaaaagagctccatgttctcaaggtccctgctcgctctgacagtcggctccctgagttaccagctagcaggcaacggaagctggtgtcctagagtaatagcattcaggggatcaaagtgcccattggagctgaagtggcccatggaacagtctagaacatgcaggcactttcacaagaaacaaagacccatccaggagacttttggctcattaccctgaccaagctacctggaaggaaatggtttttctttttctttttgttattgctgtggttttattttgaaaaacctagtcttgaaaaaagtacatttggttttgggagcccactttggggcaggacccatggctccttgccaagtggacagtgagctgggaaggtttctcaggcggggagccctggtgtggctggagtagcctctcgagggtggctgggctggtaaggtggagcctgcctggccatcagctgtgggagctgtggaggtgctgaggagatcgcagacagccggggatacggggcctggctgtttagagaccgtctgtgaagcctgcccctgtcagggttggagtctgaggggcggccctaccaacagaggatgagacaggtgtccaggctgagggatggcgctctctgccaggcctcggtctccctgcccagggctgcccagagttagccaacgcgtccctgtgcaggtgggggcggcagtgacgctgtgtgcctccctccccacgcacagtgtagtacagcgaagccagtccgtccctcctgccagcgtggccttgatggagaagagaggagtgacgggtacatgggaggccttccctcagcctggcgtccacagggcagtgggaaggcattactatctgtgtggtgtcagcgtttatacaagagtctggaagccaccactgtgtcctctcctctactctcctgccagtagggcctctgtgcagccttggcatgtttcctctccacaggggtaggggttggagggactgcccccaaagcagaaacagtgctgatagtcagaagctttgaacatggctgcagaaccccctgccccaatttgacctcagtaatacccaggggtgcccccacctcaaccagtacatgtttaatggaatgaacgagcctgcaatgaaatgtcggttctctttttagcagaaatggcctaggccgtggttgtggtcaaggcctgttgtctgtaagtgacgtgacggcacacactcaggccacatcctatggggtaatggtgcttgcatccccaccttctggaactgagagagccccagagcctggctctacacacaggcctggagccatggggaagcaaggattccagtagaggggggtgggagtggggcctttgagcccatcctcgaggggctgccctaggggggctctcctagaggatactcccctgtgaaggtggcctccattttgctactgactctgggacgtttagcaaagctgagaactttttattccctagttaagagatgcgccaccctacctcccgactgacatttaacacggggtgtcaggcactgatgcgaaagcctgttctctgaaagataagctggagagaggggtggacagagggcaccccaacagtagcagagaagccttcccctcctccaaagtttcccagagctaagttgttctgtgagtcagtaagtgtgcttcttcacccatcttcacggactgaagaaataaagggctttgcatctgaaattcacaatctgatgatctctggctacagggaacaagctgtcaagaaagagtcaccggggaccttttcccctaacctccatgttcccagcttccttaatctcagtcaatgtcagagattgataatgtaaatttctctagggatgttgcagttcaaagcaaggacttatctctctaccgatggcatctggtgacagcatttattatcgttgcttctttctgttcttgacatttttgacggagcatccatctaaactatattcaaggactcttctcgcaatggatatcttctcatttatcttcacccatcctcctaatcatcatccagacatccacctgtccattctattcaccatccatccatctagccatctacttatccacccatccatccatacatccacccaccaacccacccttcatccatccatccacctatccacccatcgacctatccaccctcccacgcttctatccatccatttatctatccatccatgcatccatccatccatccactcacctacccttccatccttccatctatcaatccatctatttactgagcacctgaacacctaggagtttccagtttatctactaaggaaaatgatttgatttggatgtttgtcccctccaaatctcatgttgaaatgtgatccccagtgttggaggtagggcctggtgggaggtgttagggtcatgggggcagatccatcatgaatgacttggtgccatcctcacagtaatgagtgagttctcagttcacatgagatctggttgtttacaagagcctggcacctccctgctctctccctcttgctgcctttctcgccatgtgacatacctgctcccccttccccttccaccatgattggaggcttcctgagcctcaccaggagtagatgctggcaccatacttctcatacagcctgcagaaccatgagccaaaataaacctcttttctttgtaaattacccagcctcaggtattcctttatagtgaggcaaaatggaccaacacagaaaataagagaaatatgtgcgtatttaaagcacagggtactgtataaaaagctgccgaacttctgttacagttggctgtgcagagtgagtagggaggactccttgacagagctggcatgtgaattggatcttgaaagatacgtaggattttaaccactgaaatcaagcatatgcagagaagcgtattgcagataggagaaacgcaccgagtgggaaaggacaagttgtgtgtgggagccctaagaatctggggtgggggcagagagaagattccatgtgtgatgggcctggaaaggtggttggggcccccttggctatgggtgggcaagtttgacttttaccatggtggtgaagaccacagttctgttcttccgggcaagacactgaaacagaacctgccagagcaccttcttccccctcctctgttaggtaaaagtcaatctctatagcccactgttgttgccagggttacctgagatgatgatgttcttgtctctttgggttgtgagaccggtggggggctctcacctgtatgtatgtggtgtgtgtgtgtgtgtgtgcatgtgctattgattttccaaaaaatgtattatagactttaaaagttcatacacagacacacccaaaacagggaaatttaaagcatcaaacatttttatcacccggtgcaagtacgtgttaccttgtattcttttttcactgagtgttacctctggtacacattcctgtgtgctgtgttgtggacctatgttgcctacctgccatcttcgatggtgtcatcatattatgatcattttaatggtcagagttatttcatgtgtctatcttgacttctttccaagtcccctctgttttaaatgaaactcctgaaaacttctgtggatctagggtttagggaccatttccttgagatctgtcaccatcctggagcctttgagtccaagagtgaagcagagcctgctgattggcccctgaatttttgctgggtgtaagttttagctgaacatttcccaattttcttgcagctaggtgtggccatatgactaagttcaggacagtgagatataagtggggagtataatttgcttggagaaccccttaatgggggtgtccttctctcctttcctctctcctgttgcctgaaatacagatgtgatggctggagttgaagtggccatcttggactctgagacaaacttaagcatagaagctatgcaggatagaacaacaatatattatagtaagggtcccaaacatgtcagaccatcatcccagctacagactgcttaccagttttttatgagaggaatacatactatcttgtttgtttgttttattttattttatttttgagatgtagttttgctcttgtcacccaggctggagtgcagtggcgatcttggctcactgcaacctctgcctcctgggttcaagcaattctcctgcctcagccttccgagtagctgggattacaggtgcctgccaccactcttggctagtttttgtatttttagtagagacgggggtttcaccatgttggccaggctggtcttgaactcctgtcctcaggtgatccacccatcctggcctcccaaagtgctgggattacaggcgtgagccaccgtgcctagccatactatcttgttttaatttcttattttagattttctatcacttacaagcttagttctaatgaacacagagagctttctatctctgtcacatagcaccagattatatgcccgaagtactcagctgctttgcagggcgacctgcaagtccccatttcctagtggaggcaagaaggaggaagagaggggagagaggagaggcagctttgcatccactaaggctcttgtttcaaggactagattgcaaacattttttttttcatattaagtgtttatgagttttagattttgccagaagctttgaactgtttattctgactctcaaatccttgtgctttgacagggctaggtttgctgctcaaggcagccatgcctcttcccccagcctcagttctgtgctttaggctgagaactcgcctaggttaaccctccccatgccagtgttctccagctcctcctgagagttggtgtccccgccacaccagcacaagaaaggcctggagaccgggtgcagtggctcatgcctgtaatcccagtgctttgggaggctgaggtgggaggatctcttgaggccaggaattcaagaccagactgggcaacacagcaagaccccgtctctacaaaaaattttataaatgagctgggcatggtggtgtgcacttgtagtcacagctactcgggaggctgaggcagggggatctctcgagccctggagttcaaggttacagtgagctgtgatcacaccactgcacttcggcctgggtgacagagtgagatcctgtctgtatccaaaaaactaaacgaaaataaagacccggggcccagtttcaacaatgcctgtgttcttgccggatgctgccgtcactcattcattcactgtctcttcgttgaaacagtcttggggtctcttgggccgtatcttggcacttgctgagtgtcaagcttgttttatgctgaccactggccactgggagtcttcagtggccacttcacctctttgcctagccttgggaaaggtttgtcctgaaactgctggacttgaattcccctttccagggacagcacaggcctgttctgagcctgtaagagcctgcctggagctgctcaacaacagcctaagaccactcctggggcataagaggccccaagaatggcctgggatttagctgggtgggctgtctggaggagctgggccagagcccgttgaagtggcctgaaggacagtgagggtcttgtttccactgggcaaggcttccccagccctagctctgcagtcctcaggcgtcagagcttcgtgccactctggaaactcttcatccagcccctgcttgcagatgaattggtggctcagagaggggaagtggtttccccagggtctccggacctgtgggctgtctccaaccaaggctgtctccaaggcttgtgcagcacccaggccgctccatggcacgaggccccagagatggaatgtgggcacatctgccttcactagctgcctccctctctagcctctggaaggggctgagctctttcctgcctctgggcctaagtgcaagtgtcccacctctacctcttgcaagaagcctcccaggctgtgtgaggcctgcagggccgctgtacaccgttgcgcaggttgtttactgctcacgtgttcctggctgaggcaaagctgggtaggggctgaactttcattctcttgccaagccttgtgtcatggtaggtgtgtatgggggtggggtgggggttggcctgcacccatgggcagcaaggagcaccctcttctaatttatgcagaggcaccctacaggctaccaaggaccccagccacagaagagccggcagcacaatgggcgctcgcccctgatgcctgtggcagctcattctgtgtgtagccccactagactgtaagctcccaccagcagggacagtggctcttcctggcagggtgtggggggatggtattgccaggtcagcaccataaagggcacagaatgctccaccaagaacactggtgctgagcgagagattgaggggagggaaggaggatctagtgcagggctcggtaagtgtttgctgagttaatatatggtgtgttgatgccaaagaggggggtgaaagggaagtgcccaggacagagggcctctgggagagggaatggggcccactaggaggcctgccagggtggaggggactgtgagctgtgaacatctgagaaacagggtgggccgccaagggagagggtccagccacaggaacagtgcagggtcggccacagtgttggggaggtgccaaagcccccaattcccctcagccatagactctcaggcagcgtcaggccctggagccccgctgtggcctgcatggcactgcaccagccagaatgtgatcacccatccttgtcccagggaccctcagtcttgtggggacgcaggagtgataggcagtgctgtggccacagggtgcaggatggtcctatggagtgccgggggtccctggctggctgaagggcatcctgctcagactggggtggcatctggggaaacttttcctgcggcatgagagccacacaaagccatgcctgggagtttcccaggtaaactcgtggtgggggtggaggggctgctgcaggctccgtgtgcctgtcattgacaatcttctggacggacaggagaggtgaccagatagcagaggctcttgggctgtatcctgaaggcaatggagactataggcaggaatttttaccccatttaaaaaactgagctattgcccgggcgaggtggttcacgcctgtaatcccagcactttgggaggccgaggcaggtggatcacttgagctcaggagttcgagaccagcctgggcaacatggcgaaaccccgtctctactaaaaaattttttaaaattagctgggcgtggtggtgcatgcctgtagtcccagctacttgggaggctgatgcggcaggatcagttgagctcgggaggcagaggttgcagtgagctgagatcacaccactgcactccagcctgagtgacagagtgagaccctgtcttaaaaaaaataaatgggccgggcgcagtggctcaagcctataattctagcactttgggaggccaagacggatggatcttgaggtcaagagatggagaccatcctggccaacatggtgaaaccctgtctctactaaaaatacaaaaattagctggacgtggtggcgtgtgcctgtagttccagctactcaggaggctgaggcaggaaaatcgcttgaacctgggaggcagaggttgcagtgagccaagatcgtgccactgcactccaggctggtgacagagcaagactctgtctcataaataaataaaaactgagctgtgtctcagtgtcctgggactaccataacaaagtgccacaaactgggtggcttaaaacaatataaatgtattctctcaaagccttggaggccagaagtctgaaatcaagttacagccattctccctccaaaggccttctgggaggatccttcaagcttctggtggcccaggcaatgcctggggtcccttggctcgtggctgtacctctccattctcggactccattgtcacttggctgtgttctctctgtgtctgtctgtgtttctccccatcttttttttttttttttttttttgagacagagtctcgctctgtcccccaggctggagtgcagtggcacgatctcagctcactgcaagctccgcctcctgggttcacgccattctcctgccttagccttctgagtagctgggactacaggcgcccgccaccacgcccggctaattttttttgtatttttagtagagacggggtttcaccgtgttagccacaatggtctcgatctcctgacctcatgatccacccgtctcagcctcccaaagtgctgggattacaggcgtgagccactgcacctggccatttctccctttcttataaggacatcagtcgctttggatttagggcccagcttactccagtaggacctcatcttagcattacatctgcaacaaacctatttccaaataaggtcactttctggggcgctataggactacatcttttggggggatgtgatgggacctgtaacaaactgtaatttacacggagtaaaagtcactctctttagtgtacgtttctgcacgttttgacaaacagacagccatgcaactgccactgcagtcaagacagaaaattccatcaccctccaaaagccccctgggcccttttgtagtcaggacctcttcctccgcagacccccgcgtttctgcttcgtccctacgttctgccgtttcgagaacgtcctgtgaatggaatcacagtgtgtcaccatgtgcctggctttttctcagccacatgcatttgaggtctgcctgggttgtcgtgtgactcgagagtccattcctctttgtcgctgagaatatttcgttgtgtggatctaccagtgtgtttatcccttccccgctcaggcctgtttgggtggtttccagtttggggcgatgacaaatacaggcactaacaaacgtttgcatgtagattgtttcatagtggagccacgcgggcaggcttgcatttgggctgctatgtgaagaaggatgtgggggcagctcagggaggggggcgtggaagggggctgctggggggtcctggcaagggctggtgcctggactaaggcctcggcatcaaggaggggaaaggtgggctcagggacaggagggctcactggagtgtattgaggaggctgagtgaatggagcctggcaggagatgggtgtgccccgtgggggcggggaggccgcctttattccctcccaccgcctccctcctagggcgatggccatcgtggctgagtgtagctgtctggacatgtggacattgagtggtagaacagtacggtgtggtggtcagggctgtgagccctggagtaaactgctggggttgacgttccactctctgcctcagtttccttatctgtaaaatgacagcctctaattcagagttgctgtgtattacatgagtggacgtatgtaaggacctagaacagagtcaagaacgtagtaggcgttgtttccatggtcttctgaagggccctggttccacacccccttgtccactccactcacagtttgcactgcctcttgtgaccccgtgggggtgtggacggcatgatcatctgggaaatggggggcaggtccccagcgccaggtctgcccttgcttactgtgagacctctccgatcattgcttcttccattcatgcagtgtggagatacagggctgcactgtgtcccgggtggagtgtgagcagtgtgtagcacagcagccccgcacagtaggcacttcgcagcaggcatgaaaatgtgcggcttcatgatgtgtgcatgacatgatggggagaggcctcagtgagcggttcgcgggacacactccagttctggggctggcagaggctccccatgcagctgccacaagtagccccttttcctccaaaatttgtcctctgcctctgatggaagctgacagaggtgatggcccagcagcctctgagctacacggcccatggtaagctggtgcctggcctgggctccaaggagggaggtttagtgggtcctggttcaaatgctacagcagcccccagaatccaggccggctggtggagacccccctgctctgagatagggttcatatccaggttggctatgattgataccagcctaacaaagggatacttacagtcaattctcattgttcacagattctgtgtttgcaaatcagcttacttgctaaaatgcatttgtaagccccagatcaacctttttttttctttttttttttttgagatggagtctcgcactgtcacctgggctggagtgcagtggtgtgatctcggctcactgcaacctccacctccccatttcacacgattctcctgcctcagcctcccaagtagctgggattacaggcgcgtgccaccacgcccggctaattttttgtatttttagtagagacggggtttcactatgttggccagactggtcttgaactcctgacctcgtgatccgcccacctcggcctcccaaagtgctgggattacaggcgtgagccaccgcacccagcccagatcaacacttttgaagtcattcaaggacataggcagagtgatgaaatattccagttgtccggcgggcacattcccagctgaggttgaacagggcgacactctgtttcccttcagctcctgtgctgcaaacaagtgtccttgtcgaggtcgattttgtgtcatgttttctcattttcatgctttttttggtggtttcactttttaggatccgaagcgtagtgttcgagggctgcctcgtgttcctaagtgcaagaaggctgtgatgtgccttacagagaaaatatgtgtgttagataagccttattcaggcatgagttagttctgttgctgtgagttcagtgtcaatgaatcaagattatatatttaattcggtgcccttcaacagagacacacataaaacaaggttatgtattgattggttgataaaaatgttgtgaccagacgcttgcaggaacctatctttgtatttcccctaggagcaatgattcagtattcgctcagtgttcatggtgactttacaaaacaaaaccacaatgaatgatgagaatcaactatatcttcctcgtgtagataaatcttcccctaacctctcccctgcactgtgcacacttctaccatcagcagctcatgcctctgggttaagaagtgcccagtcttagctatggtgtttcctgaaaatgcacaaatccttgggatatgcactatccctccagtcttggggccttggtcccctctcaccttcagtgacattgaagtgttcgaaaggacagtttccaagaaaggtagtggtcaatgctaatattttattttctgtgcttctaacagaaagactcttgtagggagtagtgtatcaatcaaggcaaataaaaagcagggatttttcactttcacagatttgacactactaattgcagcgattatgtctggagcatttactcagggtcgagtttttgttgttttgttttgtttatcagttaatagtcatagccccctgaggctgagactgcattgcccagtttacaggcgaggaaactgaggcacagcaaatcacttgatcaaagctcttagcaatagcagagctgtggccacttctcggtggattcagccacctgaacccaggtttctctgagtccagagcctctgccctagcccctgaactccctgcatctccgtgctttatcccaaggttctggggccctactgccttttctacatccacgtgtgcctggatcctggaagggatgctgctggaacctctgcaaccttccaagccccactgaggggatgaactccctatcttctccccaagttggttctatgtggacaacccaggtgaagaacctgggaggcacagaaaggtgcatccagccccacccaccaatctctgtcttgtcatctgctggcaaagtcccaccctacagtcactgtcttcggagtctttgggggtcattgtaacctgggtgggatgggtgtgcctgtcatgcctcaggactcctccttacagcatcttacctcctcattttctccctattgtccccaaagtaaattcaccagtgtcttcgtcagcttgggctactgtaacaaaatagcaccgatggggtggcttacaaacagtggctctggaggctgggaagtccaagatgaaggcagcagcagattctgtgtctggcggggtccagtcactagacaccaaaccctgtcatagatggaatgtctgtgtccccacaaaatgtatgtgttgaaatccaatcctctcagggcacacaaacattcagtctatgacagccagtgtcctcagcttcctctaacctctcactcttgaaaactcacccacagcgacttcatgccttagcacaagggactttgcatgctttaaaatctgatgggggcaggtggacataaatgttaacagggaacaaaaacctggtggtagaatttctagctgggggtgcggaatccacttggctttgcaagggcacctgggcctggcaggcggcccctgtcaagaagcgtcaggactgtagtcggcctggggtgggcacatgatacgcttattccccagcagaggaaatgtggtcacagcaactgttaggtgggttgcagggtgactcagtgtcaccagggggtgggagcaatgtgacgctgtgtagtttcctgcaatgggcgtgtcagggctgctatccttggcctgcaccctcacgacactggcagtgcccgtggaagggcagctatggagaacctgcagtgcgttctgacctcctccctagcgtagaaacagtggttcactctgccaaagcacaactctcgcccccctagttattttaaacccctccccccagtaagcccatgaagtaagtggaggcaagtctcccatctcttatcttttttttttttttgagactgagtctcactctgtagcccaggctggagtgcagtggtgtgatctcggctcgctgcaacctccgcctcctgggttcaagcgattctcctgcctcggcctcctgagtagctgggactacaggcgcatgccagcatgccaggctcatttttgtatttttagtagagatgaggtttcaccatgttggccgggctattcttgaactcttgacctcaagtggtccacctgctttggcctcccaaagtgctgggattacaggcgtgactcccttctcttatcttactgctaggagaacctaggcttaaagagggagggagacttgcttaaggtcacacagcaagctaacagcaacaggctagaatagaccccagataactttccaggatacagggttttctgcaccacccagagctgcccaggatgagtaatgtccacagccactctttattgagccattgttaagctctagatgccttagtccttctggtcctcacaactaatcccatggggtcatctcattttagacactgaaaggccagcctcagagtggaaggcagggcacccaggctccttgtctccccttctgggggaagttatttaccatggtgcaactcctcccctctccctctcccttctcagcctcagcaggggagggggaggctgccatctcctccctaatgtcccccactcaaccccagatgatgaggaactgctgagtaagcagcaggcaggacagaggcgggggtcacggggccacggtggaatgtatgggctgccacaggttgcaggtactcttagaggaagggtggtctcctcagagccgtctgagattcctgccctcttgctcattttcccagcctggtccatccctgggtaggagaaggcagccaaagggaagtgggcatgggagttgggaggctcttgaaagccagggagcttggaggggacgagactcaggaggctcatctcaggcaaagacctggtccaggaagtggccttgacatgtaccagcctcccgtggaagctcccaggaggaggggccggcaaacactgcaacagatggcacaggactggatttgctttccagaagaactttccaaacagggtggtggccaaaggtactaacaacactcaacatgcatatagttttcctctttatttcttttttccttctatttgaaaacaaatcccacaaataacacacgaattcacatatacactgaaaagatgtaaactttagaaaagtctagatcagcattgtccagtgtgatagccactagtcacatgtagctattttacaagttaaattaattaaaatgtgtcagtagcacaaccattatggaaaacagtgtgcagattccttaaagaactaaaagtagaactaccatttgatccagcagttccactactgagtatctacccagaggaagagaagtcattatacaaaaaagatacttgcacacgcatgtttatggcagcaaaattcacaattgcaaaaatatggaaccagcccaaatgcccatcagtcaataagtagataaagaaattgtggtctctctctatatatatgatgaaatactactcagcaataaaaaggagtgaattaatggcattcgcagcaacctggatggaactggagaccattattctaagtgaagtaactcagggatggaaaaccaaacatcatatgttctcactcctaagtgggaactaagctatgaggatgcaaaggcataagaataatacaatggactctggggacttaggggaaagggtgggaggggagtgaggaataaaaggctacaaattgggtacagcgtatactgctcaggtgatgggtgtaccaaaatctcagaaatcaccactaaataacttactcaggtaaccaaataccacttgttccccaaaaacttacggaaataaaaattttgttttaaaatgtggcagtagcctcatttcaagtgtttaataaccacatatggcttgtggtgaccatactggatgatacaggtaaagagaatttccagcaatgacaaaattctattggatagcactggctagaccagaagctaggaaaaccccaccagccaaaaatactgtttggaatcagtttggttctttggacttcttttatatatatttatatatgtgtggccatccatagagatagccttcttgagtttataaaacccctccacaaaatgattatatctgatctgcccagcatctcagccctatgggtatgagactgatgttccccattaaaaaaaaatatcctttgagtcatgtcatttttttttttttttttttttacagatggggaaacttaggctcatagaaagtaaatggggctgggcgtggtggctcacgcctataatcctaaaactttgggaggctgaggtgggcggatcacttgaggtcaggagttcgaaaccagcctggccatcacggtgaaaccccgtctctactaaaaatacaaaaattagctgggcatggtgtcaggcacctgtaatcccggctactcaggaggctgaggcaggagaatcgcttgaacctgggaggcagaggttgcagtgttgcagtgagccaagatcgtgccactgcactccagcctgggtgacagagtgagactccatctcaaaaaaaaaaaaacaaaaagaaagaaagaaagaaagtatatggacaagtgtggagaggttggaatgagtttgttccttagggacagaggtccttcccctgagtttgtccagggcagctgaggggcagccaggcagggggtctctgctggtcttctcaaatccctacaccttccactatcttgtatgtgagaggctctgacaagcacattgatctgggaagattcatgcctgggtgtctattctcccatttttattgttccccctgaagtgttcacctgttactttttttattgtcattataatacacatttattgtaaaatttggagtgtacagaaaagtgcaaagaaggagaaagaaatcacttcatctcaggatgaattgccacagttgtttcagtttccactcacacctgcagaataggagagctccggttcttcctcatcctccccaggccttggtagtgtcagcctccatcgtgacacccatggggatgggctctcactgttcaatttacgattccccgatcctcacgctgttgagaatcttttcacatgctcacagccatgtggagatccacagtaagaagcgccaggtcaagcttcttgcttatttccctattcattgtctggtcttttccttatcggtgtgtacactgtgcttatgagccctttgttgggtgtgtgtgtaaaaatatcttctcccactcagggcttgtgctttcattcttttttttcttttctttctttctttttttttttttttttgaggcaggttctcgctctgtcgcccagactggagtgcagtggtgtgatcttggctcactgcagcctccacctcccgggcgagctttcattctcctaatgatgtcttgatgaacaggaagtctttgttttactgcattcaattttatcagtcctttcttttaagattggcgggtgtgggtgtgtgcgtgcacgcacgtgcatactgtttaagaagtctctctaccatcagattacgaagacattctttactttcttctagaagcttttttgttttaccttccaccttttaaattaggacacagtctacctggaacagactttttttttttttttttttttttagacagagtcttgctctgtcgcctaggctggatttcagtggcgtgaccttggctcactgcaacctccgtctcccgggttcaagcgattctcctgcctcagcctcctgagtagctgggattataggcatgtgccaccacgcctggctacttttttttttttttgtattttttagtagagactgggtttcaccatgttggtcaggctggaactgattttttaagttgtgaagaagggaccaggcttcatttttccctcagttggatacccagttgttcaacaccctttattgacaagactgtcctttcctcatgtgctactattgcggctgtgcagaaatcaggtgactgtaaatgtgcggctctatttctggacttttctgttccactgacctgtgtgtctgtccctgcagtaatgtcacaccatcttaatcacttcggctttatcataagccttgatatcctgcagaacaactaataccccctcttcaagtgcagcctggatcttctcagcccctttcatctccctctgccttttcacacaacacctttgggattctaactgggattgcactgatgctgtagaccgtttgtgtagaattgatagcttgacagtattgtcttccacgccatggacaagatctgtccttctatctctccattcgcctattgtgtgtctgtgatgtgtaatgtttatatcataagcactcatcagtaggaatttggcagtgattagaaacatagactattgactcaaaaaactgccagggttcagccgggagcagtgactcacatctgtaatcccagcactttgggaggccgagttgggcagatcacgaggtcaggagatcgagatcatcctggccaacatggtgaaaccctgtctctactaaaactataaaaattagctaggcatggtggtgggcgcctgtagtcccagctactcaggaggctgaagcaggagaatcacttgaacccgggaggtggaggttgctgtgagctgagatcgcgccactgcactccagcctggtgacagagcaagactccgtctcagaaaaaaaaaaaaaaaaaaaagaaactgccggggttcatatcccagctctgccagttgctaattctgtagccctactgactatgtcttggtttcttcctctctaaaatgggaatgataaccgagtaaccttatagcattcttttaaaggattaaattggttcatgtatgttaaccagcaacagcaatgcatggcacacagtaaatggtaaactctggaaacataatttatttccgagtaggtaatatgctcataggatttaaaaatatatatatatataatgaaaaagatgtacagtgaagaagttttcccacctggtcccttcatgtccctgtttataccccttcctgacactagcttcctgcatcttcttccagagtttctttatgcaaatacaaataattattctttttctttccaacaagggagtacagtatacatactggtttatatgtatgtaagtggttaatatctccttaaccacttagtgactgggttgtttcatatggtactaatatttcctacattgcttttgtccttcagccacccacccaccctaggaatctttccatgtcagtacacagaaggtattctcatgattcttcttacagttgtatagtattccattcatttccctggtcccttactgatggacatttaggttgtttccagtcttttctccattacagacaatgctcccctgaatccagtgagcacttttgtctgtgcgtcattttgcatacatgcaactgtacgtataagttcccacgattgctgggtcaaggggcctatgtgtttatgtgtttgcaattgtgatagaagttactgaattgccctccatgaaggctgtactaatttatgcttccaccagctataagtgagtgccttagggactttttttttttttttttttttttttttggagacagagtcttgctctgtcgcccaggctgtagtgcagtggcacaatcttggctcactgcagcctctgcccccccgccaccaggttccagcgattctcctgcctcagcctcctgggtagctgggattacaggtgcacgccaccacgcctggctaattttatttattttattttatttatttttttttttttgagacggagtcttgctctgtcacccaggctggagcacagtggtgcgaccttggcccactgcagcctctgactcctgggttcaagtgattcctctgcctcagccccccaagtagctgggactacaggcgcccgcctggcttttttgtatttttagtagagacggggtttcaccatgttggccaggatggtctcaatctcttgaccttgtgatccacctgcctcggcctcccaaagtgctgggattacaggcttgagccaccacacccggccacacctggctaatttttgtatttttagtagagacagggttttgccagtttggccaggctggtctcaaactcctgacctaggtgatctgcctgccttgacctcccaaagtgctgggattacaggcgtgagccaccatgcctggcccttagggacgatttttaatggctatatattattccattgtttgtatgaggctgaacatcccaaattgctttctttataggtaaaaaatggttggatgttgccagtttcatatggtactaatatttccttaaccactccattgttgaacactttttcttgaacccttattctatgccgggcttgggcacactgtggtagatgggccagacactggaacacaaagcttgagtttgggggagaccagcatgttacaggcagtattgtttgattgtttctagttttccacaactgcaagtcacgtggcagtgaacatctttgtctgttaagcttcatttgcattttaaaagtatctctttgagatctattctagaagggaaatggcctacactgtgcggtcttagccagaacaagagtgcagagttctctaaatacacctgcacacagcccagctcaatgccacatatgaatgctcttaagggaaactttatttttcaaagtttcaagttgttttaattgttttctgagtaggcgatatagtcacacggttcaaattccaaaggtacaaaagggttcatatcccagctctgccacttgctaattctgtagccctagtgactatgtctcggtttcttcttttctccattacagacaatgctcccctgtacaggggaggacccccttcccaccctgtcccccagcctcccaggccccctcccaggggtctgtccttgcagagatggcctcagctcatcccaatatatgtgacaggtgtgctcagggcctgcccgttgctcttggtgacctgggtcttttgtccttgctgcctccagcttcagtccctccagcttggcccctaaatcctgtcttctccagtaactatctccatgttcagtgaagtttctggggatcttggggtgggggggatgtcagctgctctttcatatgactgttgtaattattattacgttaagcccagagtggggtctgggcccatactaagtgctgaataaatacttactgggcgaataaatacttactgggtgaataaatggtggatactaacatcactgaatgcttgctggactctgggcactatcctgaactcttcatagcaaactcatcaggtagtcatgcttatctttcccattttaaatataggcaaattgaggcaaagagagcctgagtcacttgtgaagccacggacctgggattctaacccaggctgcctggttctcaagcccatgcttaaaccatgaggctgcatagctctggttgatgactgaaggccaaattgcatgcagtaccggggacaggattggtaccgtcacctgtaagcttgggcctggtgggagtggacagacctgcccaggacaggtggtggggtcagcaggacaggcaggctgagtcagtttagtcctggatgacccagataggcaaagtggctaggacctttgaaccagagaagattccagagggagggagggtggaggaactcagtccaggttcctaggatgctgggggtgtacagagtttgcaagagcagagcccaaggagaaggcagagcagctgggactagaggcccaacagagcaaagccatgagccgtcaaccacagtggctgagctggggcctggggtgggtctggcgtggtgggagccaccaccagaagggcctgcggctgaagctggctgcctctgccggcaccaccaggcctccacacgttggggtcagtgtgggcaggtggagcccagtagggacagcggggcacctagctggagtcaggaaggcaagactggtagctggagagtgctggacgcacactaagtgacagaaggcctgcagcgcacacagatgtggaaagtttgaaggcctttgacctgccagaccccttgatgtgggctgtgacgtgtgagctgaggcagtctggcctgctgtcagcgcttccgaggtccggaagacctgcctaaactgacttcccctgctagaggctgtgggcaggggcccatagagcctgtcccctgttcctgggactgacccaccgagggtcgggggtcttaggctgcactctattccccacctcctaatggaaggtcttttggtttcccaagggaggagaaacccagggaactttctcacaagattttccagacacttcttggagccacaagcatctgtgagaaactgccagggccttgtacagttatttagcccctggaaataggctggaggcatttgttgagtgtttgtgctttgtgcatgcgtgagagatcctagttctgaaactgctacttctcttccatccccacgggacctccatggtcagcctggaactgtgtttttgtttctgtatgcaccaaagcctgggccagaggtagaactaggaagcagctgtggctcagcttcacacacgtctaggaagaaggatctggcagacacaaagccatggagaagccagcctggccgcctgccttctcccaggctgttcactggggcagggccagcctggcttggaagagaagccttcaggtggcagctagccaagggtcggttgagtcacagaattgcagaattcataatgctggaaggaaccttagtccttggtctgatccatgctcaggaaatacctagcacagctgctgctgctctcccaggcagagcccctggcagacatcactagcagattcctgcattctttcagtcgagccttcaacataacagtctaggcagctgctgtcagtcaactggggttcacatgggaagttcaacctacttgccatcccagatctgatccaacctactatttgtattaagaggctgctgaacctggagaaggaaagtgagttgcccaaagtcacgtagtaaacaacagaaccagacagtgtcatttcctttatatcatatccattcttgtaatggttacagcatttgccatgttactacccatctcataaacccttgttatctccattcatctccacaatgtgattccaccctccagatccaaattaatttcccaaaagcattgtggagctacagaaaaactgatgttaggtcatgttaatacaagtagagtatctagctgtagagaggtgatggtcacacttctttctgtgctgctcagggcacacctgggtattgtttccatttgggactccacatttcagaagtgcaaagaaagaaggatactcattatactcggataaaagcagtatgatgaggaggctcagaaccactccatattttatggtcaattgatttttgacaaggctgccaaaacaattcaatggagaaagaatcatctttcaacaaatggtgctggaacaatgtgggatatccacatgcaaaagaataaagtcagacccctacctcatgccatacataaaaactaactcaaaataggacaaagacctaaatgtaagaactgaaatgatgggcaaattttcatgatctaagactaggtaatggtttcttaggtatgacaccaaaaccacaagcaacaaaagaaaacctggacaaattggacttcttagattataacttttatgtttcaaaggacaccctcaagaaagtagaagtgcagtccatagaatgggagaaaatatttgcaaatcatatatctgataaggggcttatatccagaatatattaaaaatttacaactcagtaatagaagacccaattcaaaaataggtaaaggatctgaataaacatttctctggggaagatatacaaatggccaataatgggtcaggcgtggtggcccatgcctgtaatcccaacattttggaaagctgaggcaggaggattgcttgagtcgaggagtttgagaccagcctgggcaacatagaccctgtctgtacaaaaaataaaaaattagccaggtgtggtggcacatgcctgtgatcccagctacttgggaggctaaggtgggaggatcacttgagcctgggaggttgaggctgtagtgagccatgatcacaccactgcattccagcctagttgacagagcgagaccctgtctcaaaaaaaaaaggccaaaaatgaacagatgctcaatatcaatagccaccgtagaactgcaaatcaaaaccgcaatgagaaactacttcacaaccaatagggtggctgtaataaaaaagacagacaatataacaagtgttggaaaggtgctggagaaattagaaccctcatatgctgctggtgggaatgtaaaatggtgtagccactttggaacacagtctggtagctcctcaaaatactaaacacagaattaccatataatccagcaattccacacctagatatacacccaagagaactgaaaacataggttccatacaaaaacttgcacatgaatattagcagcattatttgtaatatccccaaattggaaactactcaaatgttagctgatgaatggacaagtcaaatgtggcatctccatacaatgggatattgcttggcaataaaaagaagtgaaacattgatatagaagtactgataaattccactagctgctactacatggatgaaccttgaaaacatgatgccaagtgaaagccagacacaaaggaccacatagtgtatgcctctgtttgtaggaaatgtccagaataggcaaatctataaagacagaaagatgagtggttgcctcgggctagagggaagggggcagggctggggaggagtgactgctcatgagtaaggggtttctttgtggggtgatgaatatgtactaaaattgattgtggtggtggttgcacagctctgtgaccatgttaaaaaccactgaattggattatttaaatgctgttaaaaaacgaaccaccctatctggaaattcttggagacacccagctcagcgtcaaccgcagttgacaaaccttccctctgggttgctgtgtggaagcctggggctgttccagccggaaaacagaagactctagggcggtagatgcacaagccatgttcacatagtttagaggctttatggggggtggggggagtagtcctcatggccctataaaatgtagaaaaagcaacaagaggaaacacttcaggggaacggatttcatctcaatagaaattgagaattgcttctcagaatgggttgcctggtgaggtagctagctcatgtgattaaaggtcttcaaacagatacaactgctgcttgctagggatggtagagagggaactgaagtgttagggttaggctctcaaaagcctattgttaactatccagaaattttgctagccaggtgcaaacctttagagagcttgacctcagcaatggtgggagcatttacaccccacaccctggaaactggcaattgctacacatcaaggcttttgcttttttttttttttttttttttttaaatcttggctcactgcaacctccgcttctggggttcaagagatttttctccctcagcctctcaagtagctgggattacaggtgcccgccaccacacccggctaattttttaatttttagtagagacgggatttcactatgttggccaggctggaaggcttttgctcttcatttacttattcattgtcctagacgggtgttttattggcacatctctgatccaaaccagatactccaacaggtatctctgcatgctcacctgcctcctaacagtctcagatccacctccctgccctgtgggaattccttctccactctgtcccatgtctaattcagccctagcttcctccatgaactgttcgtgaagcctccccacccccccatctcatttagtagttaccatttgctaaaagtcagctgtgggctgggttctttagttacactgtcccattcaaccctcatgcagtccttgagctgagtggcagagtctccctgctttacacaagaggactctgaggctcaaagaggtagaggagctcaggaggatcacaggccctatctagcctgaagcctgtacctgttcaccacactatggaatgaggagtggggagttctcccagccccaaatgcctgcaggccacaccgcactcttcccgcctacatctacacctggaaccaggaaattcagagttagatgtcctctggcatcagctgttctttgtctccaatgaccttctctggcttctgctctggtggcttgtgacagctgtggggggggggggggggtgggggcgggggtcccaaaaagtcccctggggctgattctttggatggccagttgaatctattcccggggctagactcatcttgatgaccttccaacatgggactctctgacttctgaactgactttaaaatgccaagaaaaaacagctggagtggtcatggggacagggcactggcagaaggaacaggccagggtgcctgggctctgctccactccacatttcctcgacttgtggcatgctctgggacccgggggtatgtgtgtttatacatgagagcttttttttttaaattaaatatcaagtttagagaagtctagagaacaacattgcaatgccctatgcacccataattcagctttgttaattcctatcactttgccatgtttgcttcagatctttttgtttggtttaataaataaatcattgcagaactggttgaaacctccttcgcacccctccctgatcctatttttctcctcagttcaagggcagccatcttcctgagtttggtgtgtgcatgtatccacaaacaggtatagaactgtggtgcgtgtttttttatactttacataaatgttttcattccttccgtaatttgcttatttcactcattagggttgatttttttgtttgtttgattgctttttaaaacgttttcttttaactttctggtgtttttttttttttttttttttgagacggagtcttgctctgtcccccaggctggagtgcagtggcacagtctccactcactgcaagctccgcctcccgggttcatgccattctcctgcctcagcctccaaagtaggtgggactacaggcacctgccaccacgcctggctaatttttttgtatttttaatagagacggggtttcaccgtgtgagccaggatggtcttgatctcctgacctcgtgatccacctgcctcggcctcccaaagtgctgggattacaggcaggagccaccgcgcccggcctaactttctgttttgacgtgatttcagactggcagaagagttacaggaatagtacagtgaattcttgttggtacactcctttcgccagattcatcaattattaacattttgtcacatttgctcgtttgcactctttctttctccctctctattttttttcttttttctttttctttttttttttttttgagatggggtcttactctgtcactgaggctggagtgcagtggtgcgatcagtgctcactgcagcctcaatctccccgggctcaggtgatcctcccacctcagcctcctgagtagctgggactacaggcatgcagcaccacacctagcttctaattttttctaaatgatttgagagtaagttgcagacattttatctctttaccccacatacttcagtgggtatttctcaaggacaaggatcaaaatcaggaaattaacattcatgcaataaacagaattttgagatttaaccatctgtgtagcattgattctggcccttttcttttcttttctttgtttttttttgagacgtagtcttgctttgtcccccaggccggagtgcagtggcatgatctcggctcactgcaacctctgcttcccgggtttaagcgattctcctgcctcagcctccctagtagctgggattacaggcacccgccaccacatctggtaatttttgtatttttagtagagacagggtttcaccgtgttggccaggctggtcttgaactcgtgacctcaaatgatccacctacctcggcttcccaaagggctgggattacaggcttgagccactgtgcctggcccctggcccttttcttttattgataaataataggtgtacatattttgggggtgcatgtgatcttctgacacattcatgtaatgtatcagaatcaaatcgggggattgggatatccatcaccttaaatatttatctttttgctgggaacattcgaactattctctacttgctgttttgaagtatataatagattaatgtttactatagccactccactgatttactgcatttcctgccttttaacagctgtgtcattgtccagggtggactgagtcacagctttatttatccattcgcctgtggcgccattggctttccccattttctccatgtagtaaatgctgcagcagcagtggccatctgtaaacgtgtaaacgcgggtgttcagggaatggggccgctggaatctgggctccagcatttcttctcttttaaattttgatagattgttatgatagtgggcgtaactgttttcattctctggggagctttgccccccgcccccagcctcagaccattcctcctgctgtaacaagtgagaagcagttggggtgagtagggcctgtttgggggaatgagatgtccctggtggactaggttggccagtgtccccaaagcaacaggtgtccctgggagagatagggcatgaccacatgtgtggttgctacatccagaaaaatgtgacctactaaaagtgttaacatgggccaggtattaccagctccattgtacaaataagaaactgtttatttaaaattatttttattttattattattattttattttattattattaatataattattattttattttattttattataataaaataaattatattttattttatattatattatattatattataataaaataaattatctttatttttttattattataaagtaaattatctttattttattattataaaataaattatctttattttattattataaaataaattgtctttattttattattataaaataannnnnnnnnnnnnnnnnnnnnnnnnnnnnnnnnnnnnnnnnnnnnnnnnnnnnnnnnnnnnnnnnnnnnnnnnnnnnnnnnnnnnnnnnnnnnnnnnnnnnnnnnnnnnnnnnnnnnnnnnnnnnnnnnnnnnnnnnnnnnnnnnnnnnnnnnnnnnnnnnnnnnnnnnnnnnnnnnnnnnnnnnnnnnnnnnnnnnnnnnnnnnnnnnnnnnnnnnnnnnnnnnnnnnnnnnnnnnnnnnnnnnnnnnnnnnnnnnnnnnnnnnnnnnnnnnnnnnnnnnnnnnnnnnnnnnnnnnnnnnnnnnnnnnnnnnnnnnnnnnnnnnnnnnnnnnnnnnnnnnnnnnnnnnnnnnnnnnnnnnnnnnnnnnnnnnnnnnnnnnnnnnnnnnnnnnnnnnnnnnnnnnnnnnnnnnnnnnnnnnnnnnnnnnnnnnnnnnnnnnnnnnnnnnnnnnnnnnnnnnnnnnnnnnnnnnnnnnnnnnnnnnnnnnnnnnnnnnnnnnnnnnnnnnnnnnnnnnnnnnnnnnnnnnnnnnnnnnnnnnnnnnnnnnnnnnnnnnnnnnnnnnnnnnnnnnnnnnnnnnnnnnnnnnnnnnnnnnnnnnnnnnnnnnnnnnnnnnnnnnnnnnnnnnnnnnnnnnnnnnnnnnnnnnnnnnnnnnnnnnnnnnnnnnnnnnnnnnnnnnnnnnnnnnnnnnnnnnnnnnnnnnnnnnnnnnnnnnnnnnnnnnnnnnnnnnnnnnnnnnnnnnnnnnnnnnnnnnnnnnnnnnnnnnnnnnnnnnnnnnnnnnnnnnnnnnnnnnnnnnnnnnnnnnnnnnnnnnnnnnnnnnnnnnnnnnnnnnnnnnnnnnnnnnnnnnnnnnnnnnnnnnnnnnnnnnnnnnnnnnnnnnnnnnnnnnnnnnnnnnnnnnnnnnnnnnnnnnnnnnnnnnnnnnnnnnnnnnnnnnnnnnnnnnnnnnnnnnnnnnnnnnnnnnnnnnnnnnnnnnnnnnnnnnnnnnnnnnnnnnnnnnnnnnnnnnnnnnnnnnnnnnnnnnnnnnnnnnnnnnnnnnnnnnnnnnnnnnnnnnnnnnnnnnnnnnnnnnnnnnnnnnnnnnnnnnnnnnnnnnnnnnnnnnnnnnnnnnnnnnnnnnnnnnnnnnnnnnnnnnnnnnnnnnnnnnnnnnnnnnnnnnnnnnnnnnnnnnnnnnnnnnnnnnnnnnnnnnnnnnnnnnnnnnnnnnnnnnnnnnnnnnnnnnnnnnnnnnnnnnnnnnnnnnnnnnnnnnnnnnnnnnnnnnnnnnnnnnnnnnnnnnnnnnnnnnnnnnnnnnnnnnnnnnnnnnnnnnnnnnnnnnnnnnnnnnnnnnnnnnnnnnnnnnnnnnnnnnnnnnnnnnnnnnnnnnnnnnnnnnnnnnnnnnnnnnnnnnnnnnnnnnnnnnnnnnnnnnnnnnnnnnnnnnnnnnnnnnnnnnnnnnnnnnnnnnnnnnnnnnnnnnnnnnnnnnnnnnnnnnnnnnnnnnnnnnnnnnnnnnnnnnnnnnnnnnnnnnnnnnnnnnnnnnnnnnnnnnnnnnnnnnnnnnnnnnnnnnnnnnnnnnnnnnnnnnnnnnnnnnnnnnnnnnnnnnnnnnnnnnnnnnnnnnnnnnnnnnnnnnnnnnnnnnnnnnnnnnnnnnnnnnnnnnnnnnnnnnnnnnnnnnnnnnnnnnnnnnnnnnnnnnnnnnnnnnnnnnnnnnnnnnnnnnnnnnnnnnnnnnnnnnnnnnnnnnnnnnnnnnnnnnnnnnnnnnnnnnnnnnnnnnnnnnnnnnnnnnnnnnnnnnnnnnnnnnnnnnnnnnnnnnnnnnnnnnnnnnnnnnnnnnnnnnnnnnnnnnnnnnnnnnnnnnnnnnnnnnnnnnnnnnnnnnnnnnnnnnnnnnnnnnnnnnnnnnnnnnnnnnnnnnnnnnnnnnnnnnnnnnnnnnnnnnnnnnnnnnnnnnnnnnnnnnnnnnnnnnnnnnnnnnnnnnnnnnnnnnnnnnnnnnnnnnnnnnnnnnnnnnnnnnnnnnnnnnnnnnnnnnnnnnnnnnnnnnnnnnnnnnnnnnnnnnnnnnnnnnnnnnnnnnnnnnnnnnnnnnnnnnnnnnnnnnnnnnnnnnnnnnnnnnnnnnnnnnnnnnnnnnnnnnnnnnnnnnnnnnnnnnnnnnnnnnnnnnnnnnnnnnnnnnnnnnnnnnnnnnnnnnnnnnnnnnnnnnnnnnnnnnnnnnnnnnnnnnttattttattttattattttattattattgagacagggtcttgctctgtcacccaggctggagtgcagtggtgtgaacacagctcactgcagccttaacctcctaggctcaagcgatcctcctgcctcagccttctgagtagctgggaccataggtgcacaccactgtgcccagctgattcttttaattttttgtagagatagtgtctcaccacgttgcccaagctggtctcaaactcctcaactgtagcagtcctcccaccttagcctctcaaagtgctgagattgcaggtgtgaatcactgtgcctggcctatttaagatgattgttttcttttttgagacagagtctcgctgtgtcacccaggctggagtgcagtggcaccatctcagctcactgcaacctctgcatccctggttcaagcgtttctcctgcctcagccttccaagtagctgggattacaggcatgtgcagccatacccagctaatttttttatttttagtagagatggggtttcaccatgttggccaggctggtctcaaactcctgacctcaggtgatctgcccgccttggcctaccaaagtgctgggattacaggcatgagtcaccgcacctggcctatttaagatgattttaaatcatgttagcaatgcataattattataaaaatttgaaacaaacccccttaacgtctctgaaataactctaatgacatcttacatagccttctggaaattatttctatgtatatttctatgtcactgtgtgtgtttgtgtgtattcccaagtggaataatgaacattattgaataccctttctttgccaggatacgtaaacatgaaattttttttttaaactttcaagagctggaagagtagagtggttagaagcgtagactctggagccagattgccagggtttgaatcccagttctgccacttattggcatgtgacctttggtgaattatttaacctctctgtgcctctgtgtcttcacctttacatgagaccactaggggtagggtaggtatattcggttcctagggctgcagtagcaggttaccactaactttgcagcttaaagcagcagaaatttattttcttgtggttctcaaggccagaaatccaaaaccaaggtttcagctgggcaggttccatctggaggctctaagggaggatccgtcccatgcctctccccgagctcctggtagtggctgtctacctctggcactccttggcttggggcatcataactccagtctctacctctgccttcacacggacctcatctgtgtctctctgtgcctttccttcttatagggacacctctcattggagttagggcccactctaaacttaggatgatctcatctcagtagccctaaattatatctgcaaagaaaaagatcctttttccaaataaggtcacatgtacaagtactggggttaggatttgcacatatcttctcgggggacacaattcaccctctgaggttgaatcaggcaggtatgaggatgactgaattaacaggatttgggggcccacagtgggcaccgtatggtgtggactatgaatacatgaaacaggcaagttgctgccctggctggcatcaccagggctccctccctcccacgccggcccctgcactccctctgtgtactcatggtgctttgtctggagggactgtgccatcctgtaacatttatcaccagagccacactggcttctactggcccaaaagccctctaaggccagggaccaggcctctccattcctgtagaccccctttgtcttgttgaagctgggaggccacgctgccttgggtcaggttggtaggtggggtagtgacggccttttccggttctccctttccgtcacacactcccacctcccgccccctggcgtgttctggccaagtctatacaggaaggcctcggttcccaccgtgaggctgcattggaactctctgagctgcttcctggggctgacataggcagcccaaagccggaaccctgtgaagctgggaaacttctgcgccttccccctacccctaataggcagcatctagccagggccacacaccccaagctgccatgctcaccactctgtccccacatttggtcagctccttgggctagctatccacgctggagtggagcttccctcttctactccccaggctgaataggcctgaatgtagacaacaggcaccatgcccaggagctgggcacactcaaggccaattcccgccctcctttagggaactggtgagaaaatccccatagaagctgagaggttgagtcctgcagcccagggactgggttttcctgagtgtctgctggcactgcgtctggcagggcgttctgggtgggtgtccggcggcagccataggatcagaagcctgtgggcctgctgctctgagctcattgctctattccccatgagtgggagaacaacccgttgtggagcaatttctctttctggtggagctgctccaaagcttccaaggctctaacaacacctttcattatccaaggtccccggttctgcctttgcagggtccttagcggagtgggagttcagctggtgagagggagggcgtgggtgtcagagtggccggctctgccaacagatggctgatctgatgctggttgggcttagcgacggttcctggcagttggagctgctgtggccaggccagttgataagtgtcatcacagctgtaaaacaaagcctgcgtgtcacccactctgggcacttccatctttgccatcttgccacaagtcacttcaatcaaatgtgcctagtcccaaaatcaaggttttaaagtgagagaactgtagcaggaagaggaagagaagcgttataactcgggggttggagggttggaaaaactgtaacatttactgaatagtgtgtcaggcactgtgctaagtagttgacagctcatgaaattttcccagtaaccctcttaaataaagacaattacgttgtttttacttatttttatttttgtttagttttatttatttattcattcattttgagacagggtcttgttctgttacccaggctggaatgcaatgaggcgatctcagctcactgcagcctccacctccaggctcaagcaatcctcctaccttagcctcctgagtatctgggactacatggggcacacgccatcatgcctggctaatttttcgaaagttttttgtagagatgtggtctcactatatttcccaggctggtctcaaactcctgggctcaaacaaccttcctgccttagccttaatcccaaaatgtttggattacaggcgtgagccacagcgcccagcttattatgttttcacaggtgattaaactgaagcccagagaggtaaagtattaataactggccagaggtcatacagcctgcatccaaacccaagacttctaatacagcaggcaggcttcatctgaaggggccttaagggatggggagaactgttatgccagtagttcactattaaaaatttaaaagatacagaagacttgaaagaactttgcagtaaacacccatacacccacaagtaaccctcaatgtttttctctatctgttttgttacatatctttacatatccatgaatgcaccttactttttaatgtatttcataggaatttgcagaccaccccctgaatgttatcatgactagagttaactagagttcagtgtttagttaggattatcttttatagttttggtataaaatttgcatgtggtaaaagtgaatgcacacatctaagtgtcctgtttgaacttcatatagatggattcatgccatatgtacttttttgcatttggcttccttgactcagcataatgcttctgagattcgttcatgtggttgtgcgtgtggttaattcctttttattgctgactactgacccgttgtgtggacatgccaccgtttgtttatccattctgccgctgatggacactggaaccaggtggtattgagctattaggaggagagctgctttgacattcgtatgcaggtctttctggacgtatactgtcatttccctcgggtgtatacctaggagtggaatcgctgggccatagggtaggtatatgtttaggtttattaaaaagtgccatatctttgtctaaagtgctcgttccaatgttcgttctccccaagagtacactagcattctgattacttcccattctcaccactatgtgatgttgtcagtcattttaattttagccattctagtggttgtgccgtggtatcgcattgtggttttaatttgcatttccctaatgactaatgactttgagcattttttcacctgcttattgtccatttgtatgtcttcttctttgaagtatctgttcaaatctcttgcccattttaaaaattgatttgcttggtctctgttggatatatgttttgcagatatttttcccccagcctgatgggcagaagttttaaattgtgatgcagtctaactttatctattttttcttttatgatcattgctttctgtgtctggtctaatgcttttgcctaccagttggaaataatcttgggaggaagaaatagaccctgaaggaggtgcaggtggacagagcagcatgagcgtgggctccaggtggagaagtgcatgttctgttgggtgatggagtggagccctttgtagggggtgtctggggttgaggggcagaggcccagaaagggaatgccttaaacatgaagggactggaccggattctttaggcagtggaatccattgcaagttttagagcaggaagggatgtgatcacaagacagtgagatgtacagtcctcgtgatgttggagcctggggcagagtttccactcagtcagtcaccctgagagcagcagcctcgtgcttcaggatgcaggtggggctgccgggctgggaagcaggtttatctctgtggattcctgcagaccctcctgggccctgagaccacccaggtccccccagatcttcatgggcccatttattcttgccaaggaagcctgagcacagggctaggcatgtagctagctggaagcccagccctggggagtgcttgtacatgtggatttagggccaatgctccctgtggctccagatgctcatggggccctccccctaccccctctgctctcacctcctgccactctcacccttctctcattgtccctccttgcacttgctccaggagcaggaattgcaggcttgggagtttgctcttccttctgcctggacatctcttccccagatacctgcagccaggcacttattccacagtcaccttttccgggtgtcttccctggccacccagtttggaactgtcccccatccctgggaccctttcctcttcctctttggcagtattaccatctaacatcctctagtcacctatttgccttgtttattgcccgcctcttcccctagaatgtaaataccgtgaaggttttgggttttttttaactgttttgttcactgctctaacctgtgcctggaacagcatttgacattggcaggtccacagaaactaagcacagcccgagtgaatgagaggcccactccctcattactcccagaacctctctgtttgatcgcagctttggttctgcaggtaaaaaaaaaaaaaaaaaaaatggggatgagcccaggtcacacctagggccacccagcaaatggagaagcttccttctcccagtccccattgcacagatgaggaaacagaccttgagggggaaaggacttggccaagtgctaagccatagttcgtggcaaagaagaaatgaagctgattgccctcaatccctgctattgaaagtcctaactggcccgggggaggctggggcccaagcagggatgtttaaggatgattatagcgtcttttggtgccagaacatatctttgtgtttccaagtggggttagaggagcctgcagcccaggggtttcttttcttttctgggaaattcagacctccatcattttaacttttcccagacgagatgctgggaccacactcagggcctgggaagtggttgcatcagtatcagccaggccgccctggccttgagctccaaatgagattgttcggcctcaattccacagcctgtggacttccacagagccatcctaccccgcccccaccagccccaggattcctgccattccccgggacactcatattttcctggtgacctggctccttcttctaggtaggctgaaggctgtggaccgaaaggggaaatccacaggcagccgggagcacacacaacattcgtgagagtcagggccccccggaggatgtgggagggaattttctccccgggtacagacttcacactgaccttgacacacccctcctcatgacaggcagtcccagtcagttctctcgaaaaccactgctcaaaattcacaacactgctgcccctgtttaatacagcgctgcctgacccctccaccaccctgagaacccccaggacccctacagccctgccttcaggggtggttccactttcctgtgcccttttacagggcttaccctggcctcgtcccctgccttccccaaggggctccttacagcacatgccctggatgcttctggaaccaatgccaaccttgatccctggtacccctgggcaacatcacagagacacagggcaagatggaaggcaccatccacagcttcatggctttctgggtacccttgtctgtgtgattaaggttttcacccctgcaggtaccttgagagacttggtgccttaggtagaatgcacacagaccttctggcccacccaactcaggatgcgaggctccgagatgttgttcctccttttctggaatcaaaaccagcctgtgtgtgttgggatggggaaggcaaacatgagggtcttggggagggtctgggatcccttaaaccggacagaactgtgaacagtaggcagtgctcatttcccagcgaagccctcagtttgactttgctgtttcttgggtctgtgatcctccttcccccaccgtgctgtgttgactcatcctcattctgggggctcaggcactgttgactgggaaggggtaagaaggaactttctagaactgtcctatatcagcaccatccaatggaaatctaatgcaagccacatatgtcattttatatattctggcagccatattaaaacaggcaaagtaattttaataatattttatttaacctgacacatttaaaatattatcttgctgggcacgatggttcacacctgtaatcccagtacttcgggaggccgaggtgggtgggtcacttgaggtcaggagtttgagaccagtctggctaacatggtgaaaccctgtctctactaaaaaaatacaaaaattagccgggcatggtggtgcacgcctgtaatcccagctactcgggaggctgaagcaggagaattgcttgaacccaggaggcggaggctgcagtaagctgagatcacgccactgcattccagcctgggcgacagagcaagaatctgtctcaaaaaaaaattatactaacttgtaaacaataaaaatattaataagctattttatattctttttatcacagtaagtttgaaatcctgtgtatattttgtgcttacagcacttgtcagttcagacaagccacttctggctagtggctacggcagcacagatctctctatcttgatttgggtggtagttacacaggtgtagacatatgtaaaaatgtggctagctgtacactcaagatgtgtgcatttcactgtgtgtgttactctttaaaagtttttaaaaagcctcttcaaggctctgctcaaatgccactcgttttcctgaacccatcccgggttgcagtgagctgcttctgttgaactgtgcttctgttacatttatacttgtaccatagctgtgtctcgccatttcctcacagactcaagtcttgggtctcacagacccaagaaacagtgagatcaaactgagggctccactgggaaatgggcactgcctactgttgacagttctgtccggtttaagagatcccagaccctccccaagaccctcacatttgcctaccccatcccaacacacacaggctggttttgattccagaaaaggaggaacaacatctcggagcctcacatcctgggtcgggtgggctgacgtgtgtttcctacaagcaccctaagatgaagaccatggtttgttgatttttttttaattccccaaagggccactgactacctcatgctgaataagtaagcgtggctgaatggaatccccaggtgttataaaccttctctgggctggctgcaggatagctgatcattgaattctgtttttcagtccggttccagttgttggcaaaggagaggaagaggaagaggaagatggcatgcggctttgtctgccagccaacccgaaaaactgccttcctcaccgccggggcatcagcatcctggagaagctcatcaaaacatgcccggtgtggctgcagctgagtctgggccaggcagaggtggccaggatcctgcaccgggtggtggctggggtgagtgggggcgtctcccacttggtaggcacacacacctgtgaggaactcaggcgtgctccacacctgccctggctcccacagggaagcagctaccatgcagatgactgcatgtttatttccctttcctacatttgtcagcttttgaccacaattttctcccagaacacaggcatggggggctggtgagaggcctggtttcttctttggggagcaggtgtttgtgactggagagcaggtagtgggtggcttgcaggctctcagggcatttgggcacctgagaggcaggactgatgcagtcaggaggaccatgctggcctgctctgactttgggggctcagccaggcatccagggtccagagagtgtcaatcagagccagggtaaaaaaaaaatggctttatgctccctgttttacatatgcaaataaggggctgtgtgatggagtcaaaagatgttttggaggtcaggctctgtgagctgggcacacggcttaaattttctaagcctcacttttgttgctttgaaataggggcattcacaccacccccgaggctcttattcctattgcatgggaagatagatgatggatggatgaatggacagatggatggacagacagacagatggatagatagatggatggacgtatggacatacagacagatagacaacagataagtgggtgatagatgatgaaatatgagtcagagctcatcatatgttcctttcacctcccacacacattttctcctatacgctgcttccttttaaaaacaacttgaatttgtttaattaccaaagtgatacacatatgtgttcattatttaacaaaaacccaagctggacagacatgtaaaaagtaaagatcttttccacctactgtaaccaaactcactccccagaagtgttttctttttttaattgagatgaaattcacataatataaaattagccatttaaaagtatacagttcagtggcatttagtacagacacaatgtggtacaaccaccacctctatctatctagttccaaaacatctcatcattcaaaacaaagccctacactccctcccccttctcccctcctgcagccccgtaaccaccaatctgcctccgaagtcacgttgcatgcggtacgtctgtctgcacattttccatgcatattcatgcatattcacgtagcggcaagcattccctgagtacttgctttgctccaggcagtcttgcaagttcttcatgtgaatctgcccatttaacctcacagcagccctaggaggtaggtgttgccaccttgcccattgtatagatgaggcaactgcgatgcaaaggcattgagtgccctcccccaggggtcacagtgagtaaatagcagagtgggaatctggacccaggcagtctgggtgccctgtgctatgttgagcacacacgttttatttggcttagctggacttttgtcccccagccaccgtgcacttttgatggtctctcccctgctgtggttgcagcgcttgtctgcctcccaggaagagtccagacgtataagtacagggctcagatggcgaatggactcgttcacctcggacgaggtaaaatgcatcaagtcgccagttgtacctgaaaatcggaattactagaacttatggggccttctgcaaagtcctgacctcctcttgctacagaggcccctgtcacagggagtgggcactgtggtggcctggaagcacagcagtgtcctgccaagaccagggggaccgctggcctggcaaggcctgggtagaaaataaaaccagggtctcctgccagtgggtgttcagccagcaccctctgtggtccccagttcccctggtaggttctcaggaatgagcttcccacccttgctgggaggatgcagctcgaaaccagcccaaggggaaaatttttgatgccaggggatggccatgttctggatttttcttggtcatcaagaaggacatgtgcagggcaggtgtgtggatgggaattaccagacagtgggggatggtcccaggagaaggtgctggctctccagagcaagctggatgggacatagtcatgactgctctgtcaaaagattcagttctctcttcagaaaattagcctgggcgcggtggctcatgcctataatcccagcactttgggaggccacggcagggggattccttgagcccaggagttcaagaccagcctgggcaacatggcgagaccccgtctctacaaaaaatacaaaaattagccaggcacggaagtgtgcacttgtaatcccagctattcgggaggctgaggtgggagaattacttgaaccggggaggtggaagttgcagtgtgcctagatcacgccactgtactccagcccaggtgatggagtgagactctgtccaaaaaaaatgattaaaaagtttaaaataagcacaactaaaaataactgtagtggttccttttggagaatgcttagtaattccaggctctgtgctttgcagatatcatcttgcaatcatcctgtgaggtcaactctgccattatacccatttcacagataatgaaaccgaggctaagaggagtgctttagtttgggtttccccagaagcagaccctgagacaaggatttgagtgcaagtggattatttgggtagtaaccccaggaagcaccagtaggggaaccaagccaggggaagggactgatgccagtaaaaggtacattgtcatgagagttactcttgggggcagctggagctgaatcctcctggggaactctgggagccagcgtggaacacacatctcgtggttatcccaccggaagggtgagggagctgtgtattattcaccaactcctgatagtcgtgggtcaaaggctgtggggtgtgaggaggatgcatcttccagcaccttctctcttccttttgttttttcttttcttttcttttttttttttttttggtgagacagagtcttgcagtggcgcaatctcagctcactgcaacctccacctcctgggttcaagcgattctcctgcctcagcctcccaagtagctgggactacaggcgtgtgccaccacgcctggctaatttttgtatttttagcagagacagggtttcaccatgttggccaggctggtctcagactcctgacctcaggtgatcctcccacctcggccttccaaagtgctggcattacaggtgtgagccaccgtgcccggcccccttctctcttccttgactgtaagatctgactcttgccagaaacagtccttgggtgaagagatgcagagatggctagtggaaggagggctggagtccactaaaaagataagtctccacagggatgggtgggacaccagccacacctaccactagagtgggctaactttcccaaagatcacacagctagtgaggtacagggctgaggtttgaacccaggcctggctaggctcaagcccatccctccagaagtgagtagcaggagagacataaaagtaattttctgagatcaaccagtgctggatgggtttggatatgagccatgtttataaagatgggtgagatacaatcttaccactgtcctctccgagggtctggtggggactccatgcaccaatatgaaccgtaaaggcaccaggtggggttagctaagtgctctgtgaaaggcagggcagcgagttacctggagcaggaagagagcacatccaggtggggtgatctgggcagacttcctggaggaggcagacaccaagctgggccatgaaggatggatgggcaggttgggatgggggagctgacagagtctgctggagagtagcaggtgacataacagcaagggccaaggcccagaggtggatgtgagccttgctggggcccttggggatgaaagagagtggagggaatagagcctaccggaaccctggagagcaggaccatgttgcattcatctaccagtgacaccattgactgattcgggtctgggagcacagagtgagcctggctctgattgttcactgggacaaatgaatgaggacagcaggtgtgcaggtctgcttcttccaaactgacaaagccaggctaggttgctcggggcctgtggcaagaggcaaaggccacggggcttagttcattttcaaggtgagcacaagttaaagcaaggccttaggccttaatcccagcttcagtggtgcgagaaggctggacactccttcagccccagcaggggaggcacccaggctgccgaggcccagagaactctgctacaatccaggtgctgagtatagaagatgttgagaccacaggtgactgcattaaaggagtcaaccattcccttcccactgccacccactcaccacccccttctgagggcgtagcagctgggccagccctgagaacaacagagtggaggagctgtgtcatctgttgccttccctgctctctgcctttacgccccactcctccccgtgcacctctatattttcaagcataaggaagggcctgagtgcatgtgctgttacgaagattggcagcttttacccagagttgctatatgcatgatcttacttgatcctcagcgatttctgtcaggtaggcattagtgtgttcccattttcagatgaggaaacagaggcacagagaagtcaactcacttgcctgaagtcacacagctggtgaaagcagagtctgtgtggtgtgatcttcagctggcaaggcgctttgcttcacaacagcggtcccacagagctggcatccaggcgatgatgtcattgtttctaaagatacagacaccgggccggatgcggtggctcatgtctataatcccagccctttgggaggccaaggcgggtggatcacctgaggtcaggagttcaagaccagcctggtcaacatgatgaaaccacgtctctactaaaaatacaaaaaattagccaggcttggtggtgggcgcctgtaatcccagctactcaggaggctgaggcaggagaatcacttgaacctgggaaggcagaggttgcagtgagccgagatcgcaccactgcactccagcctgggcaacaagagcgaaactctgtctaaaaaaaaaaaaaaaaaaaaaaatataatatatatatatatatatatctctgccatatatatgccataaatatatatatatctgccatatatatgccatatttatatatatttatatatatttatatttatatatatttttatatatatatttatatttatatatatatataccgacaccatgggtggtccccaggctgtgggaactcaaaaggtcttcagagaccacctgggtctacccctgctggcaccgatgaaagacagtgcttcattgtatctagcgctggtgctcaggctagggattcaggccctttgttccaaatatctgtatgaccttgaccacatctcaccccttccccactatccacctcccctccctgcagcctgcttctctgataaggttttgggaacatattggcccattttttcatttgtgtgtatccagaagcaaggcaaccaaatagccacctttatttattctgcattcaggctgatttttttttttattttagaatagttttagatttacagaaaagtttcaaagacggtacagggagttcccatatactccacaccagtttcccccattgttaacatctagcattagtgtggtacattcgccacaattaagaaactgatcttgatacattagtattaactaaagcccgtactttattcagatttcctgagttttgtttggttttgagacaggtcttgctctgtcacccaatctggagtgcagtggcgcgatcatggctcactgcagcctacctcctaggctcaagtgattctcctgcctcagcttcctgagtagctgggattacaggcacacactaccatgcccagctaattaattttttactttttgtagagacgaggtctccctatgttgcccaggctggtcttgagctcctgggctcaagcaatcctcccacctcggcctcccataccactgggattacaggcgtgagccaccatgcctggtcagcttttacctagcgtcttttctctgctccgggatcccatcccatgttacatttagtcatcttgtctccttaggcttttcttggctgtgacatttgctcagacttcctttgtttttgatgaccttggcagttttgaggaacagtgatcaggtattttgtagaatgttcctccactaggacttgtctgatggttagactggggttaggggtttggggaggaagaccacactggtaaaataatctaatcacatcatatgaaggcaacagactctcggaatgacttaaccactggtgatgttgaccttgatcaattgctggggttgtgttcttagggtttctgtacttcaaagtcactctttcccccactgcctctctagactgtactttttggaaggcagtcggtgtgctcagcccacctttaaggaatggggaattatgctccacctccttgatttggtatctaataaattatttggaatttgtctgtacaagagatttgcctcttctctcccatctatttgttaagccatttacttatatcattgtggaatcaggggcacttttatactttggactataatccaatactactttaattattttgttgctcaaagttttccaactttggcccctcgagtccttcagttggctcctgtatgcctttgacacactgccctcactgtgcatgtgggtgtgtgttttgttttttggaacatgtcgttatttcctggcaatataagatactccatgctcatcttatatattttctgccccagtcctagaatcagccatttctccaagaagccgtcgttccttttatagggaatgatattagaaaccaagatctggggaccacaggtgtttgttgctactggagtgtcagttgcttctaggccaaggtggtttttaataaaagaaacctcttttaaggttgcttttggtgatgaaggaggtgaaaggttgggtcaaaagttgtagtaacctgagttgtgatatagaccagccatctagatggttcaaggcaccctccctaggtgtgagcccaaggagtaccgattctgttgagtattagtttggtaaaaaccttcagtgggccaggtgcagtgactcctgcctggaatcccagcactttgggaggccgaggtgggtggatcacctgaggtcaggagttcaagactagcctggccaacatggtaaaacctcatatctgctaaaaatagaaaaaaatagccaggagtagtggcaggcgcctgtaatcccagctacttgggaggctgaggcaggagaatcgcttgaacccgggaggcagaagttgcagtgagaaaagatcgcaccactgcactccagcctgggcaacaagagcaaaactctgtctcaaaacaaacaaacaaacaaacaacaaacttcagtgaagcccctctgttgtgagaccagggaaaaaggcacaatcatcaattattgcaggattactttggactaagcaccatctctcatttttccaacaaccctgcaaaacaggggtgtgatctctattctataagggaggaaactcagctctgagacggtaagaaaccagcctgagtcatatggctaccaagttgtggaacttgatttaaacccacaactgactgtctccaaaagctttaaaaaaaacagtgtcttggcctcaccctcagaagtgcttctctttttcttttggagtgggcctcagccatcagcatgttttaaaagcttcctgggtaattctgctatgtagccagagttgagaattgctgctctgtgctatgctaatgggaaaggtgggcctcagtttccccatatgtaaaataaagatattgggcaatatgtccctttattccatttccagtcctcagtggttctgaggatttgtggcttgactttcttacatctctgtacacacacaaacacacacacacatacccctaagctctgtcagagtcaggactgaggatatgaggacctttgtccaggatgggccccagccactggactgtcaacctctgcaggcacaacccctgtggacatagcctctcagaagagccagacacttctatttctgccctaatgggcatgattggaaattttccccaagcagctggaaaataatcctaaaataacagaagtggaaaagcagatagctctgaattgtccaggccaaaaatgaatagtaaaaacaaaaccccttatggtgcatttagctttggataaaaatccaaatgtatttatttggagaggaagaggggagcgtggtggctgcataattctctccctaagcatattctgtcccagctgttagtgaaataagttggtctttccaaaactcaccttggctgaagatagacaggaagagggtctgcagactggcggtaccatttcctggattgcgttaatttaccatgaaactcaccctcttgcaagcctcttagggactgggaaagacccccagggcactgatgctacaagagtatcttctagaagaaaggagtcttggaattgttcagcctacctcccttgctatagactggaaaaagccagctcagaaaggggaagtgacttgcttaaggacacagagcaaaccaatgtcagaactaggaaggacacaagtgtctgaccctcagcccgttgctcttaccattgcccgctgtttttttggtgggggcttgcatgggggaatcctaaatcatcaaagaaaatcgaactctcacagtggcaagagcccagcagtttgtacaattgatggaagaggatttttctgctttctgagggtccctaatgcaatgcagtgagggatgaaaaatggaggaaacgcgcacacacacgcgcgcgcgcaggaacagctgactcagcaaggccccagaccaggcttgttcccagagaggagagaggttgagtaaggacactgggcctaggaagctttgttagtggctaatcagggaaggctttcaggagcagtggcagatggagggccctaccgtgggcatgaatgtgaactgttctgtttgtaggaaacccaggcagccccctgtgagtgtcctggaggtggacaaaggtggccccggcactggcacttgtctccctgtgttccctcactgctccacctggctcatctgctctgcctggcttatcttcccatcgaggttgagctctgaagtctggagctgcccatcaggatgcctttccctgtccagggtgccccatgtcctgccctattgcccttttgattcatggagccatccatgaacactgacatcaggaatgctaggagctttgtgacattcgttctcagggccaggaggcaggtagagggggtctggggaaggaagtgttaccagaaaggggtcccaagccagaccctagggaagggttcttggacctcaggcaagaaagaaacaggggcaagtccacaaagtaaagtgaaagcaagtttattaggaaagtaaggggataaagaatagctactccatgggcagagcagcagcatgggctgctcgaatgaatatacttagagttatttcttgatcaaacaaggggtggattattcatgagttttctgggaaaggggtaggcatttcctggagctaagggtttccccgctttttagactatatagggtaacttctttactgccatggcatttgtaaactgtcttggcgctggtgggagtgtcttttagcttactaatgcattataattagcacataatgagcagtgaggatgaccagaggccactttcattgccatcttggttttggtgggtttgggccggcttctttaccacatcttgttttatcagcagggtctttgtgacctgtatcttgtgctgacctcctgtcttatcctgtgactaagaatgcctaacctcctgggaatgcagcccagccggtctcagctgccccagcccctatttaagatggagctgctcttgagctgtaagaaagttgctctggagctgtaagaaagtcaagatggatcacctctgacagaagtatgacatattgactgcttactatgtagcaggcactctgctaataccacctgtgcagccttttcaatgatcctttgaggcactgggttggtggtgaatgctttaaacttcaagtaacagcaagcccggctatggtagcttcagccataaggatgctattgttcgtctagtgggaagtctggaagttggggtccagggctagtttagcagctctttgatgccttcagttcccactgtgttccctcactactccacctgggcttctctctacccttctattcctccatcttcaagtggttggctttttgtcctcaggtttctcacctcatggttgcaaaatggcagctgcagctccagacacctcacccattcgaaggcaagaggtcacaggcaaatggctttctcctcctaggctctgcattattgttagggaacacatattgttccaaatgctttattgaccacccgtgatgtgatgaaggctaggaaagggggtgaatggccaaggagagcaggatggtcaagatcggctctgaccaaatgtgatacatctcctgagtcagggcacattgccgccagagccagaatcagggtctgttagcaaggagggggagaggggactggttcctggggagctaactcagtaagtatcataggcagggactattatgaccccatttcacagaaaaagaagccgcccagaaagctcagatagctccaagtggctaactaaggactaaacttggaaggtttggctccagagcatgcgggcagaaggtcttacatgaaagggttcaaggcccaacactctggacctgccgcttgaatgcccatcccctttcccgtctccttaccaacctgcacctcacactattttctcatctgcatggagggtgtgatattcagagcctcagggaaggagctgttgcaggtatctaaaatccctagcctggtgcctgccatggagtatatgcttatttaacaccagtgggttggttgggctagaggttatgtattgtagtggtcacaaacgtggcctggaggtcacgtgtcttgcattcttgttctggctctgacactaataagtgatgtgacctcaggaggtcattttacttctctgggtttctttggctgtagagtgaggggctggaccacatcactagctttgaaactttcccactgagctatgtgtattcgtcagcaatgcctgatggaagagagtagggggatacccaaaggtggaggccacatgtccgtatacctcatggctataccattacctactttacataacaaaccaacattcagtggctttcaacagtcactattttatatttgctcacaattctatggctcagcaatttgggctgggttcagctgagtggttcttctgttggtcttttctggggtcagtcatgcagctgcaatcatctagcaacttgactagagggggatggtctatgatggcctcactcatgtgtcttgtgttgggtgctggctgttggctgggccacacaactccagctggctagctcaggcttctttacatgacagcatagtccaaagggtgacatggaagctgcatgcctcttgaagcccaagctctgaactccacagtgtctcttctgctgcattttttttttttttttttggtcaatgccagtgccaaggccatgctgttttcaccaggaggtgaaaatagactccatctcttgatagggggagcagcaaagactttgtggctctttttaatctactgtggaggtgaatgctctttgagtcctttgtcctgtctctttggttcagctgcaagcatagtaataatcctattaatagttgtcatttatttgtctaatgatattaggcacttaaaatcatagcatgtgatttggatcagtaaatgagagcaatctataataataattaataattaggattataagttattaagtacattttctgtgccaggcattttatatacatgatcagcaattctcacagcaaccctgaatgatggatattattgtcctcatgtttagatgaggacattgagaccccaagaagtaaaagtaacttgcccacggctggtgaggggcagaggtagtatttgtgtttcactgtgtctctaaatagctggctgcaggggggcagaaagggagaagtaaggtgggctttgagacttttcacatggaaaccccaaaggtgttggagaaagggctctgggtggtccttcggctccccatcccaccatgtactcacttgtaacagccatcatgggcaacatccccttggagtatgacctggggacactcgatcagcgagtgggcagggaggcaatgtagatataaacaactcatgaagatggctgctgcctgacactgacttgggccaaaatctgccagatttaagctgagataattcaccataatctaaaatgttcttcaggcatcactgcggcacagtgatgctgtttttgaggtgctgtctgtgaataccttctagaagagtctccatgactagctcagcagctaaacctccccagagaggaacagaacagaccctctgattccagttggccaaggcagaccacagacctgggctctgcccacagcacgtacctgtcagtgtcaccctcacccatggccacctgggcaggaaacgtcagaggactcctggagccatgccaaactcagagtccgtccctgccccactctccatcgtgaactcacagcctccagcctcctctgccccaggccagcgccttatcatggtttttagtcagaagacaagagccacatgagagccctgtggccatgctgaaagggtgggtgatgggttcggagctggggagctggcagagtccaaccttggggactttccagccctgtcgacaagctgtgtagataacacagcccaacagcgagaggggagcgagatgcttcaccatgtggtggggatgcctggccctagtcctgctctggcagttgccagctgtgtggctctggggaggactgagtgataccagtcctggtgcctgtaaggcacctggcccagtgtgcacacgccagctgccgttttaacttctgcctccgtactgtggacttgaaccactctctctttagtttataatcttgcattcgcctcctcttgccctggatctgtaagtttcatctcttctggggtcaggcaatcccttctgattctctttcacagtaaacacacatggtggacagactcccaggtctaggtggagcctgagaccaggagacagaagcacaaaaccagctgcgggtggggtgagtggagcgtggtcctcagtgagcgtcctgttgggtgctttcctctgcagcttctccatacatcttacaaccagagaggcagggccttggtttcattttttgtttctgctgggtggtggcaggtgttgccacccccatttatggacaagaacacggaggctcagagaaaccatacaatcacccagggtcccagggctagtaactggctgctcagggccgtctgagggcccagaaagaaatacagtttgtgagcctgtccccagctggaggatctccctctgagagctcctgccttttttttttttctttctctcttggaatgtgaggatggagaacagggtccatgtccgaacaaagtgagaaaacctagaaatagctatgggctaggtgtgaaagagctgattcaatgcagagaagcatcgaaggacagcctagttgaagccagcaaccaggatgtttcatgccagtcaccctaggcagagatcagtgggggctaggggcatcaaaatagtaaggggagaaagtaactatcagtagagtaaaaatatatatgttgtactgtggccctgacccgcgtagacctgcaccctccaacaagaagtctacccttactataggcaagggtcttctattttattttcttctgtttcattctggaaaaagaaattttgggtggcattcgcagtaatgggtcatgacgtgcagtctgaaaaacactgcccttccttcctgtgccatccctgatacctaaagatggggcagccctgccatgtggctgtgcttctaaccagtgacctgggtgtgtgtcccctgcacgtgcaacacaaagagagcactttcccagtgtggacagaaatctgcagtttggttgcaatttaggagggctccagcctcagctcccaccctggctcagggccaggggtcaaagtttgccttcccaggggcaccactggctcctgctctgcctttctttccacgtcctgctcagcaggaaggccctgggggcaccccagagttccctcgtggcagatacacacacacacacacacactcacacacactgtccactttaactaatgacattcaggccaggcgcggtggctcacgcctgtaatcccagcactttgggaggccaaggtgggctgatcacttgagatcaggagctggagaccagcctggccaatatgatgaagccccatctccacaaaaatataaaaattagccaggcatggtagtgcgtgcctgtaatcccagctacttggaaggctgaggcaggagaatcacttgaactctggaggcaaaggttgcagtgagctgagatcacgccattgcactccagcctcagcgacaaagtgagactgtctcaaaaaaaaaaaaaagaagtgacattcagaaaatgtgattaattatggagtttattctaccacaaagcttgagggtagccacctgggagacaccgactccaaatgaacaaggccagcattgaaggtgaagttaaggttttacttatacaggcagagacagagaagttttagcaggatgacattttccatatgagaccactgcatgccccagtgatttgattggttacagattgctacaacctaggaagattactttattactcctgttaaattaagtttagcctaacgctgcctctttacatatttgaagttctgtctaaaggtttttctggacatagtgaactgtaacctaactggaggtgtaaacagactgtaaaatactcttgtggcaatcactgagtcttggccggtcaaaggtggccaactggtccaacggtgttcaaataaggcaaatgccgagctgtaaccaatccagctgtttctgtacctcacttccagtttttgtccattactttccttttactgtccataaatcttccactacatggctatattggagtctctctgaacctattctggttcaggagttgcccgatttgtgaatcattctttgctcaattaaattctgtgaaattaattggtctaaggtttttcttttaatactccagaagaaggggagtgttctgagggggtcttatctctgctgctgtttggtcttcaatatttacaggaaatcagctgcagaagttgcagttgcaggcagtgttgctcaggctacaaagccacattcctctcaaggctctaaataatttgaagttccaatagctttaagtcccaattattttaagtttgaatttaatttcacaacactcacccacactcacacacacacactcactcacaattttctgacaccggctgggtgtccaataatttggacactacccagagttagtgcagactccacgggctgctcctccttcagatgccagccacaagtgggcttcccaggcaactgcacttctgtccaatttggcttcaaattcaggagttcccatgatctccattcaggtttgataatccgataggacaactcaaagactcacaaagtgttatacttccaattacagttttgtataaaagatacagcacaggaaccaccaaatggaaaaggcacatagggcgaggtctggggcggggcagccacagagtccccatcacctctcctcctattcgcagggggagtccagatgggtctgcagcatcctcagttcttgcctcctcagaagaaagaatttgaccaagggggcataaggcagagtgagagaccgaggcaagttttagagcaggagtgaaagtttattaataaagctttacagcaggaacaaaaggaaggaaagtacacttggaagagggtcaggtgggtgacttgagagatcaagtgcatggtttgacctttgacttagggttttctgtgttagcatgcttccagggtcttgtgtccgtcccttctcccctgagtctcagagtgggcttcttcccctggggtgggctgtctgcatgcgcagtggtccgccagcacttgggaggggccgcatgcgcagtgtgtttactggagttgtgcgcatactcatttgaggccttcttcccttaccagtccggtgtttctagaagaaggtcctatacaagttacactccgccattttgcctcttagtgctcatgcttgagcccacgggcacagtttgtgagatgtaatcgagaagatgctgatcaccagttttcaggtttttttctatctcttgggagactgtgtttccctggggtgacagctgcaaccaattattagagagacagttaataaccgcctgcccatcatctgatggtcgcctgacattcctggtcagggaggggactctcctgccctgctgatacctgactacctactgtaacattttcccctcaagagtctaagaccccaattccttggggaaaatggatggtcagtctttcgtaactgcttcctgcagttatagagaggggcggtggtggttgttctgtgggtcttggcctctgctagctgtccgggcagtgtggctccgtgggttggtgaaagcagtatccagccaggtccaagggagataggcagaactttgcctctgccatgacccactgatgggaagtctggtggtctcctgtagaagggtgactcttttttttgcttttttttttttttttttttttgagatgcagtcttgctttgttgcccaggctggagtacagtagtgcaatcttggctcactgcaacctctgcctcccagattgaagctattcttctgcctcagcctcctgggtagttgggattacaggcatgcaccactatacctgactaatttttgtattgttagtagaaatggggtttcaccatgttggtcaggctggtctcgaactcctgacctcaagtgatccccctgcctcagcctcccaaagtgctgggattacaggcatgagccaccgtgcccggccaaaagggtgacttttttgaatattgaggggatgacatctctcactgaggatcagctggagacaaatcaggttattagatttagaagactgtcaaaacaaaataagggggtgaggacagctccaaaaaatcccaaggttggtgacacacccaggtagctaacactcctagaagctgggtgcatcttcctcccagcacatcagtgtgttcaccagccagaaagtccagaggttttatttcagaggcatgattgattaaatcattggccatgtgattgaactcaagtctccagtccccttctgttggtcacacggggggccgaaggttccaaccctctaagcaggtgcttagtctttctgtggccagcacctcccttgaatctaaggtcccaccaggagtccctgtttagtagcagaaactcaggtaagatcaaaaggggctcattatgaataataaaagacactctcatctctcaggaaattccatgggtttttgaagctctgtgccaggattgggtacaaagactggctatgtgtttctgtcttactatataccacacactcacattccctcacacactgctggttcccatgggcctggtggccaaggaggcagctccaccttgaacctccatagaggcaaagcaacctcatttctttgaaatacaccatgtcctggtgttagttcaatttcaggtgaatgcactagttcatggatgctgcagctccaagtagggtgacaatttggcaggagccgaggcttgtctctgagcctctgagcggagagccaggcctggcggaggcatctagatgtaagccaatgtcaagcaggaacaccttccaggcaggcaccacccccacccctgccatgaagcagtgtcgtttggggtaatacctgaggtttgtttcctcacaccaaggaaataaaggacacggacacacaagaaatgaggttaagagtggaggtttaaaaggtgtaagaacaagaaaagcactctcctgcagagagagggggtcctgaacaggtcttcggtccatggtgaagtgcaggaggttttatagatgagcttgaggaggcagtatctgatttacatagagtaccagagattggctggacaggtgtgccatttgcattgcatgcaaagaagctggcagccccaccctaatcttttattacgtagatggattctctacctggctatgttgcctgcttttctactgtacacatggtgacaaagaaaagggaagatgaagcctccatgttaaacatacctggcttccaggtagcccttttctgttggcacagctgccggcattcacccatgcaagcttccagcttgcttgtctatgtttgccgcttgagttttcaggctgttctttgttaaaaaagaaatgatttgggggctgctttttgttaaaagggaagctcagcagaggactctgttaccctcactatctgcctaaataatttctttttagctcctgtatcaccaggagtaccccttccatcgccccctattgctcctgcttctaattctctcttcatcctgctctgctggaggagaggggctgctaaaaactcatttccagccttggtttggtgactaatgattcattgtgctgctgctctggaagggccatacactcacggagaccaggatcttaagcctcagggccaccctctgtaagccaagtggaggcaaaattgagcactcaggatctagagttgaaggtcctgagtttcaggtctcagctccaccacctacaaccctgtgatcctgagcattacttgcctctctctgcctcagtgtcctcatctataaaatggggataactatagtgtttcccccataggtttaagaggagaattaagtgagatcatagaatctaatgcactagtatttgggtttgggccagactagggaggccattaattaataatattaatatggttatagtattttattaacaattatatataacaactatagaataacaatgattatgatgatacagcaatatagtaatattagtaatcaatacaatggcagcagaattgggatatcaccagagcaaggtcaggacagagggctcctcaggagcctcctgtgcttggggccgtatcctcacgttaccagaaagggctcccgatccagaccccaagagaaggttcttggatctgacacaagaaagaatttggggtgagtccaaagaataaggtgaaagcaagtttattagagaagtaaagaagcaaaagaatggctgctctatcctggtacactgtctcatactcatgctcgactgattatgcttatggttatttcttgattatttactgaacaaggggtagattattcatgagtgttccaggaaaggggtgggcaattcccagaactaagggtccctcccctttttagacataggctaatttcctgacgttgccatgacatctgtaaactgtcatggcgctggtgggagtgtcttttagcaagcagatgcattataattagcacataatgagcagtgaggacgaccagaggtcactttggtcaccatcttggttttggtgggtttgggccggcttctttaccacgtcctgttttgtcagcagggtctttgtaacctgtatcttgtgcccacctcctatcttatcctgtgacttagaatgccctaacctcctgggaatgcagcccagcggggtctcagccttattttacccaacccctattcaagatgggggtcactctggttcagacggacactcagatatcccagtgtccctgctccacagcctttcttcagcaaccttggccagacacctagttttccaaacgctaacccagaagcttggggctggagtgggagaggcttaagctccaggggtggggtcaagacaggagcagggaggggaagacatggaccaagtccttcccctatggagggatgccccctcccccttcctggggaagctgtgccacaggaggctggggagattccagaaggtgtcacctgccaaggagggatgagcttgctgagacctgccaagactcaaaggacattttaaaacagcagagtttgtgaaaggcagcagaatcccgctccccatgcttgccttcgggaccctcactggagcagaaccattgcttagagcgtgagaaggagaagcgagtgtccgtcaacatgctggctctgggtgagacctcggttagtatttggtttctagagcacagctgcgtcctcacagcctagagccatggttttatcagaagagagtaaacctacagcagaagcaagtcttcctgctcaggacttgggatctgcatgcagaggcctcatggcatggaggtcccaagcgttgacaccagtgtccgggggccgaatccagttcttcccttatagctgtgagatcttggccaggatcaccttccagagcgtgtcctgtgggccaagccctaacaggtattaactcagtcagtcatcacaccagctggaggaggggacgtcctgttataatcagagagtacctcagttccttcatctgtaagatggggataataataaaactcatggggtgatggagaggatagagcaagttactctatgtggagtgtcatcacagctcctgtctcagcgagagctctatattaagtattagctatttttattttttcaggggaaaaaatggtgtgaattgactaatatctgtgattgtttccagcagcctcccccagagtgtacgtgctggggtgagagttgaaattcaacctgactcctgtacattagagcttttctgagtgtagactcagcactgctcacataagagccagccaattccagccccacttacagaatcagtgtctcagtgggtgggggcataggaattttaagacctccccccaccatggactctgtgcctccaatacccttatagaaacattgacttcattgaacccgtcagtgggcaaatgagaaactgagcatgcaggatcctcaatgtggatgtgggccaggtggcgcaaggctcttggggcagaacccccagtgtccctgaggcatccttgatctccctagcctgcctcatcatttcaggaaccttccagatgacttccatctcgtggttgtcctcctcaccttcacccaaatctttaattcacggagctgcatccccttctttggtttcagatgttcctggttcgccgggacagcagctcgaagcagctggtgctctgtgtccactttccttctctgaacgaaagctcggccgaggtgctcgaatacaccattaaggaagaaaagtcgagtaagtacccatcttctctgttttcactttgaccacgcggcagcagcagcagcagagaggctgcaccttctaaccacagactcccctgtatgcactgatggtgtttaaaattagaaggaggaaaagctttcagtcactgaagttacttagccagacttgttttgaactcagttcatcatccaaagtcagtgtgaatttccactcaccctcgtcgcagctgggtggctttgcattctcatggccacattgaagtttcttcttgttagctcaatgcagggacgctggagaaagggaagaaaaggagaagacatgtctgcacccttgagtcctagtgtcagctcagcacacactcaatccatgattgcagacaagtcacttaatctttctgagcctcagttttctcttctgtcaagtggacataatagtcacagagcttttgtgagggtcaaagggacaaacactttgaaagacaaaaatctgggccaggcttgatggctcacgcctataattccaacacttcagaaggcagagggcagaggatttcttgagcccaggatctggagactagcctgggcaacatagaaagaccccctctctacaaaaaataaataagccaggtgtggtggcatgcacctgtggtcccagctacttgggaggctgaggtggaagattggcttgagccagggagagtgaggctgcagtgagctatgattgtgctactgcattccatcctgggtgacagagggagatctggcctaaaaaaaaaaaaaaagaaaaaaaagaaaaaagaaggacaaaaatcctgtgtgtgcatagtgctactggaagtgggcatgggcttcagtgggaaaatgtttggggaccccctctctagggcgggtttgttctggtagtacaatgtcaccgggtttggggcccttgtggactgctgggcacccatctgtgccagctttctcctcctcgcatggtataaccgctcagtgggtacttctccccctctgcccagatagacccaatttatcaagacgggaattgcaacagagaaagagtttgatgtacataaagccaactaaacaggagatggagttttattattactcaaatcagcctccctgaaaatttggaggctagggttttttaaagacagtttggcgggtaggaggggtatggagggggaatgctgattggttgggtcagggatggaatcacagggagttgaatctgtcttcttgcactgagtcagttcctgggcgagggccacaagaccaaatgagccagtttactggtctgggtggctggcatcagctgatccataagaaagaatgcagacctcaaacaccaatcttaggttttataatagtaacattatctacaggagcaattggggacattagtgatcttgtggcctctggctacgtgactcctgagccataatttcttttattcttttcttttctttttttttttgagatggagtttcgctcttgttgcccaggttggagtacaatggcgtgatcttggctcactgcaacctccgcctcccgggttcaagcgattctcctgcctcagcctcccgagtagctgggattacaggcatgtgccaccacacccggctaatttttgtatttttagtagagacggagtttctccatgttggtcaggctggtctcgaaccccccacctcaggtgatccgcctgcctcagcctccctaagtgctgggattacaggcgtgagccaccgtgcccggccctgagccataatttctaatcttgtggctaatttgttagttttacaaaggcggcctggtctccaggcaaggaggaggtttgtttcagggagaggctgttaccatctttgtttcaaagttaaacaataaactaaattcctcccagagttagttcagcctatgcccaggaatgaacaagggcagtttggaggttaatggcaagatggaattggttgagtcagatctctttcactgtcatcatttcctcgtcataatttttgcaaaagcagtttcaatggctatgtgtatacatgccaggcattcagatccaaacagcctgttagaagaatctatagaatattccaagcactggtttacatctcttgtaaatggatccatctcttgtaaatggaagcctttcaccctcagctagcagcagagtgacaacagttaagattcattaaatattctcaagtgtttgtttctcaagaaacatgtgtgcctggcactgggaagatgcaaagatgaagaaaacagagttcctggcctcaggggcctccaagtctggttggagggtggggacacactggtatgggaaacagacatcacttgctgtgcagtatagcattactgcatttgcattactgcaaagggacctctggctggggacatggaggatacaggtcactgtgggaaggattcaggagggtgtcaaagaggaagaagcctcaggctgggtcctgaaggtgagtatattagttcaattgaaggttaatcttctagccctagaagtagactaggaagggaatgcagaagcaggttacctttcctgctataaggaggtctttccgcagagacccagagccccacagaatggataaaacacaactcgctgggcacagtggctcaagcctgtaatcccagcacttcgggaggccgaggcaggcggatcacgaagtcaagagattgacctggccaacatggtgaaaccctgtctccactaaaaatacaaaaattagctgggtgtggtggcatgcacctgtagttccagctacttgggaggctgaggcagaattacttgaacctgggaggcagaggttgcagtgagctgagattgcaccactgcactccagcctggcaacagagtgagactccgtctcaacaacaacaaaaacaaaacacaacccacacattcatgtgttcagcagagagttatggagtgcccactctgtgccaggcactgttcactgcctctcagagctcacttcagatggagggaggggatgataagcaagtaaccatccaggatgactggcagatggagaggtgtgctatgaggaatgtgtgaacatggataattagctagctactgcaagaaccagcatgatggcttaaagccagaagctggtttcccactcacaggcaagattcctgcccagtggggaaggaacagggaccccaatggaagaagaggctctgccaccttcagcgtgcagcctccagtttcctaggactgactccaagccagtaggctggaagggggaaagagcatggagaaggcttgtggtcccgtcttcctgccaaggcctaggagtgggtgtgtcacctgtgccgcattccattggctagaacttggtcacaagatcacacctaactgcaagggaaactgggtctagccatgtgccctggaaaaagaacagcatctgggttttgaactgctagaagcctgatccatgggtagtaaggatagcgagtgtagggttggggcaaatcatttatatagaaaacttgattgacctctccgtcttgtgaagtccagcggggaagaaagtgtgaggttctcaaagaaggaagagagtgttatggttttcccagaccaagtatgcagcaccctctgatgacagcagaagaggtagggctgtttggggcatccactgttctccaagaaccagagtctcttctcatttggccagggccaggccttcttagcgggtgctcctggggtcacacagcccccggctgtgcttatggtctcctgggagatagagaggaccatcacctatctattagtagataatagagaccaggagggtacagacctgtctcttactaagagcaaccaggctttcagagactcggctgccacctgccagttacctacaactttcggaaacccaagagccagctgtgctcttgaatttccacagcaacattgggaaagtagctgaggttggaggttatgatgagctgagcttatcagccagtgctctaggagcctgagttgggagtgctgttcacggccagggtggacaggaaggcttcttggaggaaaggcacatcaggctggaccagcagactgtctgaacgttctgcccacgtcctttgcgccatactccttccccacctccccgcccagcctccagggtcaccactctgctgtctctccaacccagtgacaccccacacccctggaaaccaggacattgtatctggtttcatgtctcattttccattaggcaccaatgaaaaaccagagctggatggtcgttaaagcagtaaaaacaggatttgctcaaaactattgcaataaagacagagacctcggtatagaactgggctcaactccaaatacagcatgggcaagtgggggttatagccaaggagcagggtgggaggcagtggatggaaaatcactaaggggaaacatcaggggcagggaggattctggcgaaactgacccaacaggattcttgctgaaggcaggcagggtgatcagacagcacccgggggatggtggaggacgaggaaactgatcagatattgacagtgatcagatatcaagggggaggtgtttttctaaaccagtgaagcaggattcttgctaaaactggattttaggaggcacagatgggcctaggagaaggttcaggagcctgactaaagtttggtcaagcgaagaattttttcaagcctgagggacaaattgggtcactcagagacagagacggccagcctacttctatgggttctttcttcctcccagggccgtgtggccgaatctcactttccatttttaaacttttaaaaattcagtgctcaatttgctgaaaatatgatgaaaaccaaaaatctttcttgtaacctaacacttccatcatcgttcatgtgcattcactataaatacacaggtgtcatccgtaagtttgtgtgtgtgtggttttgctgtttccttttttactttttttttttttttttttccctgagatggagtcttgctctatcgcccaggccggagtgcagtggtgtggtatgatcttggcttactgcaacctctgcctcccgagttcaagcaagtctccagcctcagcctcctgagtagctgggactacaggcatgcgccatcacgtccggctaatttttgtgtatttagtggaaaccaggtttcaccatgttggccaggctggtctcgaactcctgacctcaggtaatctgcctgcctgagcctcccaaagtgttgggattacaggcgtgagccaccccgcctggcctgccgtgtccttgtattactccattgctctccaaacctcactcccctgaggtcagccactagcatgcacccagacaacattaagaaagcagcaggtaacttgtttctttgccgagttaatgtgccgctcctgcctctttgctctcttcctgtttgatgccctcctccttgacacagcagttgagacagaccatggaagccacacagctttttgaatcccgctgttttctcctgcctgtgtgaccttgtgcaagttactttacctctccaggcctcagttgccttgcctgtaagatggggataatgatggtgccgccatcacagggcactggaaagggttcgtgtgtctacactgcttaggactttagacactgtggccacggtgactgcagtagggggtgatctgagggggaagtggtcaagggaaaggcccaggcctggaactggggccttttgttggggttccccacacagagctgaggcaagggaaagagacgtggggataccccaaaaggggtagccagcttgatctgtgactctgctctgtttgaagaagaaacactcgctctgaccacttccgtttccatgtgcctggattgtcctctagtttcttgttaagtgtttccttgaaactctctgaagcagtcagcttgggctagtcttgctgtggtaacaaacaaccctaaccccagttgcttgcacacacatgggtgtgtacacaaagtaaaatgagtgtgcagctggccctccaacctgtggtttccacatccacggatttaatcaaacatggatcaaaaatattcaaagaaaaaaagatgaaaaataacaacacaacaataaaaaataatgtaaattaaaatatagtataacaactgtgtatatagcatttacattgtattaggtattagaagtaacctagaaatgatttaaagcagagctccccaacgtttttggcaccagcttcatccatgtccctgcaaagaacatgatctcattcattttaatggctgcatagtattccatggtgtatatgcactgtatttttccacggatgggatgggggatggtttctgggtgaaactgttccacttcagatcatcaggcattagattctcataaggagcctgcaaccgggatcccttccatgcacagttcacaatagggttcttgctcctatgagaatctaatgctgccactgatctggcaggaggcagagctccagtggtgaagctcgccctcccaatgcttaccccctgctgtgcgccccggttcctaccagttccctggcccaggagttggggacccctcatttaaagtatacaggaggacgtgcatacgttataggcagatactatgccatttcatatcaaggacttgagcatcctcagatttcggtttctgagggggtgggggggtcttgaaaccaaccccccacagataccaagggacaattgtatttctcactcaggtgacctgccatctgaggctctttgcaacaacttgtgtatattgcaatgcaggctgaaggagcagcacccatctggggcattcaggcgggaagagaaagcagaatccatgactgtttcccaaaggttccactcagagaaggcaggtgtcacttcccttcacatctcattggctgaaacaggtcacatggccaggccagcctccagtaggatgggaagtctaatcctccggcaagcatgtgacccacagggcagggtagccaccattttgaacaagcattatgtgaacaaccatctcctgcatccccagtcctcctctctgctgcacaaagggaacaagagatgtcttggtcaccacttggcctcactggggaccctcagaggcccgatgtgtgtggagagagaggggaccagcagaagaggcatgggggcaggggatgtatgggatgaagggccgagactcaagatggaagggaggctagcacagctgctgagctgcagcctgcccgtttatggctgaagtgagccacctggccaggaggacactagctactttttcattgatgggctttgaagatggtgacagtgacagattcaggtgatggcgtctttctgctggctgctctaaaaagaaggccacttggccccatctccagaataggaaccatgagacagtgacaaatgcccatacaggaagtgagctgcccagcactcaccatctgagccatttaccccatgtttcccaggtagcccctcttcatttcctgcctattcccctggcttgctttatttatttatttatttatagagacagagtcttgttctgttgcccaggctacagtgcggtggcgcaatcatagctcactgcaaccgcagctgcaactccctgggctcaagcgatcctcctgccttagccgcccaagtagctgggatgacaggtgtgtgccactgtgcctgggtaatttttttattttttgtagagatggggtctctgtgttgtccgggctggtctcaaactggcctcccaaagtgctggatttacattttgatttaaatccaggtcaaatctctttctaggataatgggtcagctggtgaaagggtcaaacttaagagcagaactcaaaggcattgtgggtgacgctgacacccatgcacatggatctccactgcccaggaggactcatctagcatttctcctttcctgaatttaaaacgtccccatagtccagtggtgataaccaccaatgccagttagcacaagggttcactacatttgcccatgacatgggctcccttcccagggacagatgtgtcagcttcaactacttaacctaaaagcacatgccttagagtgggagacttgtttggtgcaagaagcaatcctacctgagctagtccagcaggtttttttgtttgtttgtttgttgtttgttttcacggtctcactctatcaggctctggagtgcagtagtgtgatcacagctcactgcagcctcaacctcctgggctcaagcgatcctccccaagttgctgggactacaggtacacgccgctgtgcctggctaatttttgtattttctgtagagacagggtttcatcatgttgtgcagtttcagtccataaaaagtaaggagtgattattattaaaagagggattggtgtcgagaaggcagcctcttgatatttcagcagtgaggaagtactgatggcatcgtggtaatcttgcactcttgttaatgcaaacttcttttgagagcttaagctttagaaaggctggcagttctgggttttaattctctgtcaccttgtgacatcagacatgttacttaatttctctgcttcactttcctcatctgcaacatgggaactctgcaacacagctactgggaggaatgatgagcacatcaatcggtgactactcataggggcttgggaccgtgttgcctggcacatgggacgcgctccacaactttgtctcctggatgaaatggggacatttatgggaaaaagcctgtgtgtagtaagcacaccataaatactagcagctataattagctatggagtttgagcagcatgcagttcataccacaaaacccatcgtttcctgcaacactttgctcttggagaactcctgtaagatgttgattcgttcttcttatctcacattggttattactcatagaggttttggctaaaataaccacagtttatttctttctgttttcagcattccccttttcagcctccaacactggagttgggccaggaaaaaaatacatcatgagataatttaactccaagaactttattgtaaaacttcagtggtgaatttcttttaaaaaaaatagatcttgaatcatagtggtgtattcttagcctcctttttttttcacttagacattttattatgagctttctctgtgttattgaacatttcaaagactttgcaaccaattaaatatgtgttggatggcttctgaaggaagacagtatgacaggcttgaagacagggttcttggcattgaaccagtgggagagacaggctcatgcatacataaccagaaatacaagtcgttcgaactgtcctaaatgttagaatgtaagcatgtactctgggtcatcaaaaccaatgacactcagggaaatccacccaggcctactttgggccttggacgatggaaaatatttgtgaaaaagagaaattgaggaacagatgtgttaagctgagtccacagcctgcatcagggctcagaggcaggaaaaagaaaatcaggaaagggtagaactctgttgggggagaggtagattggaagtagaatcaaagttgaggctagaaggtgggattcggccaggtcacgaaagaccttgacaaccacccgagggtgttagagatttggtttgtagtgttatcggaagccacgcaaaggttttgagcaggaagtagccctatgagattggtgcttcagagtagagcttgactgtgtgggagctgaacaagacagttactctgccaggacagaggaagaggaggaaggtgcttgagacacctgtctcaggtaatggccttcctggctgcctaggaactgggactggggagctaagataaggggcaggccctggggcagccattacccacaagaagggaagccctttcagtgggttggggcctgtgaggggctgcagtacagtaatgcccctctaggaaacgggaacatagggacagtggaggagtttgttttgcaaggagagaactggacacaggaagaagttttgacagagatggagaaagatctagaacacatggcctcagaggcaagagaaaagggagagatgagggaaatgggttagtattgtgggtggccaagcctgagtgtacatgggctgccaccttcaggggccttgcagctttagaaagtacatctaagttgggaaagcagcccaactcaactgtctcgggggtccagaaaccactgcacagacacccctcttttggaagtgactgcaagtggggtcaggggtcagagcccaggccacagtgcttcctgggcttcctgtcacaggagagcaccgggtttggataatcttggctcagcatgtcttagtctatttgtgctgctttaacaaaataccaagactgggtaatttataaagaatggaaatttatttctcacaatttgcaagactgggaagtccaagatcaggacaccagcaggttctcttgtctagtgagggctgctgtctgatccaagatggctccttgaagctgtgttctctggagacgagggatgctatgtcctcacttggccaaaggcagaagggcaagagagctgaatactgtgtgaagtctcttttatcagagtcttaatcccatccacgagggaggagctctcatggcctaatcacattttaaaggccccaactcctcataccatcatgttggccattaagtttcaacacgtgaatttcggaggggacccattcaagccatagcactctttttttttttttttttttttttttttgagatggagtttcgctcttgttgcccaggcgggagtgcagtggcgcgatctctgctcactgcaacttccgcctcctgggttcaagcaattctcctgtctcagtctcccaagtagctgggattacaggcatgtgccgccgcccctggcaattttgcatttttagtagggacagtgtttctccatgttgatcaggctggtcttgaattcccaacctcaggtgatccgcctgcctcggcctcccaaagtgctgggattacaggtgtgagccaccatgcccagctgccatagcactcttttataagggcactaatcccattcatgagggtggatccctcatgattccaccctcatgacttaatcagtatcctaaagaccctaccccttaatactcttgcatcaggagttaggtttcatcataggaatttggggggacaccagtattcagatcatagcagcatgaaaggaggcaacatctgggcaatcaccttcctttcaggttgtgtctgcctccctctcccaccctccctgaaaacctctctggaaattctctactcagtaaccatactagtactagcacgtgcaagactaacaccaccataaagcagcactctctgccagggcagtgtgcatcttagcaggaataaaagctctcgtattggtgttatcacggaatgtcagtcattagcccatgaagtgtaggagttagtttgtcctggccatcctgaaatagcagaggagcgggaacctgttctatgtaaggctctttctgactgacagcatcctccccatgcccacattcacccagaccctctgacttccctgcaaggctacttaggtgcacagtgaagtttcttggtttcttgcctgttcttgcctgttcagagtgatttctccaggttgtcacagtgcaaagccccctggaagagtagcagtccctacagcctcctccaggaccaccctacttcatttctctcctctcttttgcatgtattgtgttcactcccacctctgagcctttgcttgtgccatttcctctgcttgggttggtctccccactcctctcagctcatcagatgttccctatccttcattgtctgtttcatattgtcgcatcttctttccccagctgggctggaagctttatgtcgcatacaacatctgtgttccattgtccagcagagggcagagcctgttgcaagtgttcagcaaatactggtcgactggctaataacagctcacacctgtgcagggagacagcctgatctggatggactgagagggtgggctttggaacccagtggatccaaattaaaatcccacccctttgctttcatcagttgtgagatcttaacaatgccactcaaacctctatctcactaagccttggctttctcaactgtgaaatgggctcataatcatagtggtgattaactgaaactttgtgcaataatagtgcctggcacacagtaggtgctcataaaaagttagttgtctctcctccattcctgattgccccccttcccatgtgacgtgggtgttcaggattagaaaacctggcttctgtccggtctggcatgttagaaagttgaagtcatcacttggtcctaataagtaaaaccctgaccaaactgaaaagtcaacaactcttcttggatctgtcataaaggtggggtcacaggtcaagtcactgcccccaaaattggagagactaataggcaaatgcagagaactgcagcttgccagagcagaaacccacaggcaaaactcccatgggaaccagtgctgagctagggaaacccaatgtgtaactgatgaactagtggatgttcactgtggacaggcctgagttaaaactccagggaagccagtcatctaggggcctccacacttttgtgagttttaccaccagtagcttgaccaggttcctgcagtgaatatcaaagatctcatgcatcctgcaggaagaaggcaaaaggaacattttggaaatatgccagagcagtctgttcttctcaataaggtatgctttcagagctgatacagtttggatctgtctctgctcaaattgcatgttgaattgcaatccccaatgctggaggtggggcctggtgggaggtgtttgggtcacaggggtggatccctcatggcttgatgctatcttcccagtaatgagttctggtgagatctggctgtttaaaagtgtatggcaccctcctgctcaacctaacttgctcctgctttacatgtgaagtgcctgctcccacttcaccttccaccataattgaaagctccccaaggtttcaccagaagctgagctgatacgagcaccgtgcttcctgtaaagcctgcagaaccatgagccagttaaacctcttttcattataaattacccagtctcagatatttctttatagcaatgcaagaatggcctaataccagagcctaacctgcctgggaaagggaaatacccaactccagcccattttagccatcctgcccaacttaaaggaggaaaaaactgagacatacttttgaagttaacagtccagaggcacaggctcagtgaaagactgagacttacccataggatttagaactctccccctccccaataccttctcatcatatcactaaaggcctgtttatagcagttccttttatctagtacattacatttggccatcaagagaaacttacaagacatattaaaaggcattaaacactgtttgaagaggtatggcaagcatgagaacagactcacatatggtagagaggttggaatggtcagaccaataatttaaagcaactatgattaaggtgctaaggactctaatggctaaagtagatgacagcatgcaaggacaaatggggaatgtaagcggagagatggaagttccaagaaagaaccaaaaaaatgctagagaccaaaaacactgtaacagaaatgcagaatgccttagataggcttcttaatagactgtacatggctgagaaaggaatctctgagcatgataatatcttgatagaaaccaccaaaactgaaaaagcaaagagaaaaaagactgaacaaaaacacagaacagagtatctaagaactgtgggacaactacaaaaggtgtaacagacatataatgggaattccagaaggagaaaaaagaaaggcacagaaaaaatatttgaaacaataatgactgagaacttcctcaaattaatatcagacacctaaccacaggctaggaaggtcagaaaacactgagcaagatcaatgccaaaacaactaacctaggcataccattttcaaactacagaaattcaaagaaaaagtcttgaaaaaaagccagaggggggagaaaaacaccttgcctatagaggaacaaagataagaattacatctgacttctcagaaatcatgcaagcaagaagatagtggagtgaaatatttagtattgagagaaaaaaaacaccaaccaagatttctgtaccttgtgaaattgttccttcaaaagtgaaggaaaaataaagactttctcgaacaaacaaacagtcaggggatttgttgctattagacctgccttgcaaatgttaaaatttctttagagagaaagaaaatgataaaggtcagaaactcagttccacataaagaaaggaagagcatcagagaaggaataagtgaaggcaaaagaaaaatgtttacttttcttattcttaattgacctaacagataacagtttgttggaaataatggcaatagtatattctattacttatgcttatgtgtgtatgtgtatctatatataagcaaaatgatggcccaacaataatacaaggaatgggaggaagaaattaagattgttttgttattagaaggtacagttgatcaggtgcagtggctcacacctgtaatcccaacactttgggaggccgaggcaggtggatcacctgaggtcaggagtttgagaccagcctggccaacatggtgaaaccacgtttctactaaaaatacaaaaaattagctgggcctggtggtttgcctgtaatcccagctactcgagaggctgagacaagagaattgcttgaacccaggaagcagaggttgcagtgagccgagatcaggccattgcactccagcctgggcgacagagtgagactctgtctcaaaaaaaaaaaaaaaaaggtacagttgttccttggtgtctgtgggggattgattccaggaccaccttcacaattccaaaatcagtaggtacttgagtctctgataaaaaatggtgtagtgttagcatataacctatgcacaccctcctgtatactttaaatcacctccagactgcttgtaatacccaatacaatgtaagtactatgtaaatagttgttatactgtattgcttttaaattttgtattattattattattattattattattattattattgtgagacagagtcttactctgtcgcccaggctggagtgcagtggcctgatcttggctcactgcaacctctgcctcctgggttgaagagattctcctacctcagcttcctgagtagctgagatgacaaggctgcaccaccatgcccagctaattttttgtgtttttagagatggggtttcgccatgttggccaggctggtctcgaactcctgacctcagatgatccacctgcctcggcctcccaaagtgctgggattacaggcatgagccaccatacccagccaaaatttgttttttttttcctgaatattttcaatccatggttggttgaatctacatgtgtgaaagctgcagatatggagggccaactgtcctcacaacgtgtgaagcagtatagcgttatttgaaaatggacttggattggttgtaaatgtatgttgcaaactctaggacaaccactaaaaaaaataatttaaaaagaagtataataaaggagagaaaatagaatcatataaaatgccaattaaaactacaaaaggcagaaaaagagtggaagacaaaagtgggaccaaagaacaaggacaacaaatagaaaacagtaacaaatatggtagatgtcaatccagcaatatcaatatcactttgaattttaatggtccaaatgcactaattaaaagagagaggttgtcagagtagatcaagaaacaagacccactatatgctgtctacaagaaacccactttaaatataaagacacatatagattaacagtaaatggatggagaaaggtataccatgctaacactaaattggacacaggaaggggaacatcacacaccagggcctattgtggggtggggggaagggggaggggttgcattaggagatgtacgtaatgtaaatgatgagttaatgggtgcagcacaccaacatggcacatttatacatatgtaacaaacctgcacgttgtgcacatgtaccctagaacttaaagtataataataataataataaaaagctgaggtaactttattaatttcagtcagggtagacttcagactgagtaaagtaagggataaagagaggcattaaaatggagcagtactccaagaagatctaacagtcctttatgtgtgtgtgcctaacaacagaacatcaaaatacttaaggcaaaagctgatggaactacaaggagaaatagattaatctactatcatagttggagacttcagcacccctccatcagacataggcagatatagcgggtggaaaatcagtaagaacatagttgaattcagcagcaccataatcaactggatatggtggacatctatagactattttatccaacaataacagaatgcacattcttttgaagcccacctggaacattcaccaagatagaccacatcctgggccgtaatacacaccttaaaaaaaatttaaaaggcttgcaatcaggccaggcatggtggctcacacctgtaatcccagcactttgggaggccaaggcgggcagatcacctgaggtcgggagtttgagaccaccctgactaatatggagaaaccccatctctactaaaaatacaaaattagctgggcatggtggcgcatgcctgtaatcccagctactcaggaggctgaggcaggagaatcacctgaacctgggaggcagaggttgcagtgagccaagatcatgccattgcactccagcctgggcaacaagagcgaaactctgtctcaaaaaaaaaaaaaaaaaattgtaatcatacaatgtcttctctcaaaccacaagggaattaaactagaaatcaataacataaagatagctggaaaatccaaaagtacttggagatttaacaacacacttctaaccaacatacaaagaaggaatctcaaaagaaatttaaaaatactttgacgtaaatgaaaatgaaaacacaacttaccgagctttgtaggatgcagtgaaaacagtgcttagaggaaaattcatagcattgaatgcatatattacaaaagaagaaaacctggttttatatttacttctctcacttaactagctctgtgaactaaagcaagttatttgacttctgatcctcattttcaccaaccacatgatggggtctcatgtctgactgcttccataaatagtttaggcagaaagaagttggtgagacaggcataagaatgtggcttcctctggggcaggtgggctgcctggacactgagcaacatgtgttttcctttataatccaggtgcttgggattatattgttgttatgaggaacagacaagaaaatatatgtgaacatacctaaaatctgacagaaatccaagaatgagctgcatactgctgcattcattgataacatattcatgcatataggtaactagcatctactgaaccctggatcatgttaaggcggtgtctgtgtcctcaaggagctcaaatctagtcaaggaggcagagttgtcaattgcaacacagtgtaatcagggctcttgtgatcaaaatgagccaagggagaaggaaaaaagagagggttgcaggaatggcattgcaggcaatgggatgaaggtggaccagcttctgctctcaaaaggatcacttgggtagctgagtggattggggcaagagtggaagaaacaagacaaagagcctttgcaagtgctttattgttctcacagcattctgtgtggacgctcagcttgccctgggcagatcacatcatatagaggacttctaaagagatgtttctaggggaacttggctttgagggggttttcccaaaagagaaagttgattattacctctgagcgcctctgaacccacctcccagatttgctttgctctgggagttcctaggcggcctcatctctaggaagtgtgagcagtgttagagccaaggtgagcttgtgcaaagccatgggagtgtgtcagtaacctgggttctaatcaggcttccccagtaacttgctatgtggccttaagcaagtcactcaacatctctgaggctgacctcacctggcaagagacagatacaaaatgccttggaaagataaagccccacacagacagaaggcgccgttcttcttttgcctaaccccagatgtcccaagcacctggatggtaaaggaaaatacatgttgctcagtgtccaggcagcccacctggtccagaggaagccacattctgatgcctgtctcaccagcttctttctgcctaaactatttaaggaagcagtcagacatgagaccttctggaaagttctatagaaataaactgatgttttctgtgtctctttgtgtccatctccccttatctgcccaggatcaatgagtagtttgcactgcttttgtcatcagtcctgatcctgttacatgttttattgtgcttattgttgtctcagtcttagttttcacattggaaacttttagggaacttgccccagaggaatttcccctgctggaatgttcctttaatgtagttcccagtgcaaggctgccctttatacctacaaaagtaggatcccccaggtgagaccaattccccaataactaggtcatgaaatcttacttttcttcagccttcagccccagttattggggagttgctgtctaccaggtaccatgtgggtattcatagacattggcccgtctgtcttcataacgctatgaaacaggtggtaggatctctagtctgcagctgaagtgtgcccccggatgtaactgggattaaacctgggtctgtagatgccacgtgcaagctctttcacctgagccaggttgtttcctgtcttatctcccatattccttatccaaatgactctccaagacaagggaagtggaggactccagagaggaagtagaggagttaataatcaatcctttatactctttgtgtggttgtatcttatccgttcctcttttagcaggggatttatttaacaaagaacattggaattacccttggagtctgaagcctaagctaagagtatattaacgtgctttatgttcattgcgaagtaccagagttgtgcagaaagggggcaggctgggactagatggcttcagcaaggacagccatggtgaggaagggtcactcaacttccaggtctgactctccctcgtaacaactgagtggaggtgggtttgtgcctgagctgtgtttttggtggcatgctggagccgactcatgtcagctggtgacagctgattgtgtgaatctcttcccaacttggtggtaagtaccttatggaaactggcaaatgctataaatcagggtttgtttgttttttttccctcctggagagctggatttaagcaattaccagcacactactgctcaatttcctcatctagaaaatgcggatggtaatacccatctcacagaaccatggggaggtgtcacgtatgtgagcattttgcgaaaagcatgatgtgtgtgtgggtcaataggatgatgtgtgtttatatatattattttttataattcttacatgaaaagctgtgtctttttttggctgtatctttgtagaaacaggaaataaatttcaatcagggcatgataggacacgtgtagcatagattcccagagaaatcagatgcataatgtgagactattagctgatcatgggatgacctttgaaatcatcaaggctgaggggcttcttctcattggctccagggtcctgaggaccaaaaccctgtcattcattgagaggatcggtcaagtgttttccatggttttctttgaggaacgccagtggcagtggctgtggtgaaagaagccaacagacaggcagacctagatttgaaacctgctttttcacttactagctggttgaacttgggcaaattcctgagcctcttcaatctcagtttcctcatctgtaaaatatggtacctcccaaatagagttttgggagacccttggagtggggtagattctactggatttctgttagttctgttctctctcctgggcttcctcagaattccgttcttatatcatggtcttaggactccagctggatccctagtttgcagaatgtggctcccgattggtacaagaagcccgctctgtgtagcccgacctagaatgttctctatgtgcctcttctcctactgagttatgacgcaaaatatttactgagactttgctgggtgctcaggccttaaggaagtagaatcataatagcagtcacttgttaagcattctatatgaattaatttaatctgcatatcatccctgggatataaacagtacagtgtggcagaataaagatggtcatgcactctttgacaattctcccatcaagattctattgcctctctccttggatctgggctagcctgttacttctttgaccaatcaatacaataaagcagaagtgacactatgccagtcgcagatgtagcttttaagagaactgacagcttctgcctggactctgggagctctgagttgtcatgtaagaaatctgacgactgacaccaccatactggagagaccatgtggagaggcctggacactatataaggagggagagaggcccaagaggaagacaggcctgggtgaatccagccttccagctattcctgctaaggcaccaggcataagcaaaagtgccttggaccctccagatcagaccagcctgcagctgaataccactaagtgccctagtcagtgccaaaaagagcaggagaatcacccagctgagccttgccaaattcctgacccacaaattgtgagctacaataagatagctattattctaagccactaaattttgcaaatgatttgttacaaagcaatagataactggaaccatgctcaccctccttttacagatgaagaaacggaggcacagagagttgaagtggcttaattaagatcacacattaattagcaagtggtgggaacaggatttaaaccccagaaacccggttcccaacatgagttgttaacactgtgttgtactgctcttgagttgaaaacatgtctctgcttgcaaggagacttctgtttactttgggatgcaagaatcactcatgctacagaaatagcagttaaggcagaaatagagaattatagaagacattcatttattcactttaaggacagatttatattaaaatgatgttaggattttactgcagtcagaggaaggacccccaccaccccacaacactgactggtgagtgagaccccagggtaacaactctgaggggtgaggacatttgagttgtgtcctgaaggatgaatagaagtgtcctgtttggaagagcacacgaggtggcaagatagtccacgcaagtgcacagaatggcagaatggtggggtgcatccagggagagtccagtgtggctggtgtgaaagggagggaaagccgagaacaggagcatcagctggagccactcgcagggcaatgtgcatccaggccttgaagctcagcctctgtctaaatggccctggggaaccccagcgaaggacattaagtgtgggggcacgatccgatgtgcctgctaaacagaagccccccgcccttgggggtgtgaaggctggagttcaggggaggttgccgaggatgaagaccagaggaagctccatggcagcagtctggtgacagcatggtggggccagaccaggcagttatggcagacatggaggggaggggacatgccccagacatatttaggaggaggactcttgggcctggttggcagaaatggcatgatgaaggaagaggagccagtggtgcctcaggggtacctggtgtcagggactgtgggacagcatcaccccaggcccagggaagagcagttagagggtaacagcaagggacgcagtgagcgtcggtgcctgggagaaagagagcaaccccctggtgcctgtgatggagtgggagctcagcaaatacttgacaagaaagatcaaatggacccctgggtctggttctctggagggaaggaagagtgcaaggtagagatttgagcgtcaccagcacaagggcagctggagcggtgagatgctaaactacaccacatccttccattgtgttcttgacctttggactgaagagacctgtttccacctctgttcttagagacaaggctactctgttcctatagggctatacaactcccatcttgtcgctaaaatgggatttgagttagatgaccagctagagaaatctatgactctgtggatataattgcctgggagctttgagccctgaccccaggcagtcacaaggaacatccgcatgccaactgagagacttctctttgcagccacagtgatgtcaccatccctgacctggggcatttatagtgattcagagaccctccagttctatgcctgtggtggatttagggataggagcagtgctctaaataacaccccttgcttcaccacctgcgctcagaaccagtgaggaaatagacaaagatgaggaagatgcagatcagtgtcagctttcttagcaatgggctgagctgaaggatgcagtgcaggcacatgataaaaaggaaaatgaataaggaaattgagaggaagcctcacagttagaaggggatgtagttgtgggatgcagttagggcacaatccagtgccctaacacgcaccctctttgactctgctccccggagctgcaggcttccccgtcccaagagctggggctgccccaggatgcctaaggggggtgggaagaaagctgcaccctgaccccagcaggctggctatttacaagcatgaatcagtagcatctcgaagcaagtgaactgtcagttgcactgagactgatcccttgttcttgatttcacaactcatttcctggctcttggtgtctctgcactgctggtgaagaggatggagcgtgattcctctgagactgagtcatgggccgtcttccattgaattcagttctgagcactgatttcgggtacccactgtgtgccaggcagcacactaggtgttggcgtccatggcactcctgggctcctgccggttcactcaaggagcacaaactggttctctctctcgagcagggtgtctgaaacacggcattgttggcatttggagccgggtcattccttgtcgtgtggactgtcttgggcattggagaatgttagcagtatccccgggctctgtccactagatgccagtagcatcaccctctgagttgtaacaatcaaaagtatctttacatatcaccaaatgtccccctgggggatcagtttgctcctggttgagaaccacggctctagggctgtgccacccagtatggtagccaggggccacatgtggctagtgagcacctgagatgtggctcaagtatcttgagatgagctgtgagtgtaatatacacactggactttgagcacttaataggaaaaaaatatgaaatgtcctattagtaatttttaatatatttatggtatcttaaaatgacaatattttggatatattgggttaaataaaatacagtattgggattaattttacccatttctgtttactatttctaatgtggctatgagaaaattgatgttgcacacatggctcacattctctttctcttgggtctagagcctcaccagccccatgtggtaggtgagggcacggactgcagtgtcagaaccgcccaaggccacgtcctagcctcaccgcttcctagctctgtgaccttcagtgagctactgagcttctctgggtctcacagtggcggtcactttctccaagacctcagatcaaagttcccaagcttgcaggggaaatggtgaactttgtaagattctgatgttgaaggtggtattttctggacagtcttggagatccttctgtggcactcagggctgttgtcactaccaaggtgttacccacctcccttccccccgtcccctctgctcccagagagaacaaagtgttttttctcaatgggtccagtcaaagacatctccccggccctgcggcgtgagcaggaagcaggtgggattgctttccccaacatgcacctctttccagggtggcacctttacccagcatctcccctgactccttccacctccccttcccctaaaaatctccccagcctggtttctctttagccttccctgacacttggcaatttgcaaatctgtccaatgtctccccttctgttttggcatctgaacctataaatagctcccagacaaagtcctggctgcattgtgacagtttgtatgcttgcactgtattccttttctcagacttttagaaagcctcatctacgcacttgctcaatacgaagagcagcttccaagaaaaggaatcttttattacagcatgaacagtgtagtggggagtcacctcagggtaacatgctgcttgcagcaacgacgagccctgtgaagcatgcgagatggtccaggcaaggtcctggacccaggatggtgaaaagaaatgaggtctgggccctgctctctggaagcttcgtccagggccagagctgggcctgtaaataaatcatgatgtgctgtaatcagctgtaaagtcagctgtgtgcccagtgcccaggccagtgggaggggccagaagttctgcccaagaaggcctcaccaagggatcacctggggactgcccgatgacaggggagatggtggcccacaggaaaggcatcactgccgacagtgaggcagggacacgccgattgcattcctgtaggaggcactgggacacccttcctccagcctgcacctcctctctcaacaaaaggcacctgctatactggctggcgggccatggtcacaacttggccacagccttgggccagtcacttagccttcctgagcctcagtttcctcacctattaaaggtagataatggagttgtcattttgattagaagtacagagcctggcacagtgagcacttattaaatggaagatgacattattattattattattaaaactttgaaaactgtaaccctccatgactcctcaggaggctcgaatttacgcaaagcccagtgctgggaatttgggagaaggaggcaaacaatgacagttgccattgaatcagaatctggattccagagagctctagaatgtaactctggaaagcactcgggctgatcccctctctcaagctgatgatgtgccacctctggacctcagtttccccatctgtgccatggggagggtgcagagctatcccttagaacccttccattctggctttcagtggttccctgtccagggctgcaacctggggcatttggaagcagccttgcttgaccatggctgctgagtgctccccatcactttcccgttggcctccagcaaaaggccaactcaggcaaactcactatgccctactctgcactgcaagcctgcatcgcactcggcccagggccctggtgggtggagaccagggctaaggagggatgatcttacactgagagctgcggactggacaggtgttggagccttacagagggagactcaggcaggctggaaacatacaaactccagggccagctccagaggcaaaggtgccaccccagatcatcagtaacagccagcaaaagagaaaggatgctttttttcagcacattttcccaatcggcatcctcttccagctccctgaaccctaactcaccctttgccctccccacccttcagccccctgcccaggtcttggagatctctgtgctgtcttttgtggagcagctgctatcttgcagtcagatcctctgtcggggaggccttcagcttttgtgcaacgacccagagggtgtgggaggggctcagttactcttctcctcacctggcacttagagaaagcaagtctcaagagtctcatggtatgtggttggtggacccaggggcctgtgcccggtctgtgctgtccagctttgggctctgcctggagcaaaaacaagagcttgcctgtgccgtgttgcggtccttacatggtagcgaatctcagagaacacaggagccactcaggctggcatggggttgtctgctcttctcacttttggcagctgctaccctctgctggtaccagcagtgctggcagccctggtctggcagcaccttttcctcaggcaggaaagggtggttctccaacatcacctcaaagccagtgggtgccagggctgggcctggaaccagcgggtccctgggactccaaagaaatcgctatcttccccacttctaccccaggaacacaaagcaatttccatctgtttcagaaaatcgtgcctttggatagtaagccctgtgacggtagcaaacattcctttctccacctcagccacaaactggccaagtggtggttcccatggcaactgcggtgttgctgggcagccgtggaccctggccaaaatgtaactatgtccttcaaaatggggaaggagcctgcccctttcaggggcctgtaggatggcccacaggctggccaaggtgggtgggggtccatggaagagtgggcatggccctgaagggcctcacttccccatccccagcccatggggccctgcaggcgccccccctcccactccccagctgggaaccagtccccagccccttgtcactttgactttttatcctcagggtctgcgcccctggcctttcctgtcagggacccagctcaaagatgtagtgccccttttaggaaagaggatcagaatccattaggattgaattctctcacccatctgggtaataggtggattcggaataggttggctcagtagtgttacataaggacctggggtgaaagctacttccagggtccacccaaaggtcccctcctagccaggtgtaagggcatttttttctccaagcattgagccctccgaaaggtcagaaactcctgtctcctgtaggggtggtgtccaagccttccttgtgtccccgataacaatttcctcctggggcaatcctaatctctccattgtaatccatccagtgctcattccataagcatgcatattgaggccttctgcatgcaagattttccttaggtaaaatcaatcaacatctctctcgccctaccaaccaaatgttcaatcatcaaaagagaatgagctgattatttttgaatctctacccacccctccccaccaagaaagaattacaggtaggtcccagggcccatataccggcagattccctgttacccttctgttgaggcttcctgtcaatttccttatccattttcctctttttttttttttttttttttttttttttttttgagatggagggagtctccctctgtcacgcaggctggacctcattgcaacttccacctcctaggctcaaatgatcctcctgccttagcctcccaaggtagctgggactgcagatgtgggccaccatggctggctaatttttgtatttttggtagagatggtgtttcaccatgttgcctaggctggtctcaaatacctgagttcaagggatccacccaccttggcctcccaaagtgctaggattacaggcgcgagccaccactccccgccccatttactctttatttctacatactatgagcacaataagtccttgttgatgagtaaatacataatgaaaaatgccctagtcaaagagaaactctgaccaagcccttcaaatgggggtcagaactggaaattttattaacaacgactattgtcgatcaaaatgtgttagaagtgggatctctggggttaacaaagctgtctgctaaaatgaaagattgggtttgtgtttcacaagtatgtgtatgcttcaaaaataatgatccttggcaaggtacatcctcgttccatgctttcatatcatgatctgttccttctcaaagcaaggatcaggcttggattaacaaacgctcacacttcatatgttagcaaagataaatgagactgtaatgaaggcatgtgtcaatagacattctttccctagagtcagtgtgatgaaggataagtttaagttttcatttgttgaatacattagcctcaatcactgggaacttgcagtaattaaaactgggcatatctgaaatttacctttgcaccatctgtgaagaaagcatctaggaagggaaataatagtgtcaataaaattacagagaggactttggcctagataaggataataactggttaaaggcccacaattcattaatgatatcaatagagagaagaattgaccgttaattaaagcagattgggaatggccctattgaatcatttatgtaacacccattatgtgcctactattttccagacaagcttggatagcactattttattcttaaatattggaaagaccctattaagaggatgaaaagacaaggtcagatgcagtggcatgcacctgtaatataagctacttgggaggctgcagtgagagcatcccttgagccctagagttcagcaccagcctgggaagcagagggaaccccagagccagtctcaaaaaaaaaaaaaaaaaagaggacaaaaagacaaactacagaatgggagaaaacatttgcaaatcacatatctgacaaaaaatgtgcatctagaatatataaagaactctctgccaggtgcagtggcttatacctgtaatcccaacactttgggaagacaaggtggaaggattgcttgagcccaggagttcaagaccagcctgggcaacatattgagaccccatatctacaacaacaataacaacaaaaattagctgggcatggtggtgcatgcctgtagttccagctacttgggaggcttagctgagaggattgcttaaacccaggatgttcaggctacagtgagccatgatcacaccactgcattctagtctgggtaacggagcaggaccctgtctcaaaaaataaataaataaataaagacaagtaacccaatcaaaaatgggcaaaggatctgagaagacatttttgccaagaatatatggaaataaccaataaacacatgaaaagactctcaacagcactaatcatcagacatgcaaatcaaaaaaccaccatgagatacacttcacacccactagggtgactatcataaaaaagatggacaataacaagtgttgacaagggcgtggagaaattagaatcctcacggtgggaatataaaatggtgctgtcactttggaaaacagtttgacagtttcttaaacatacagaattgccatatgactgagcaattccacttctagctatatacccaagagaagtaaaaacatatccacacaaaaacgtgtacacaaatgttcacagcagcattacttgtagtagccaaaatgtggaaactatccaaatgtccatcaactgatgagtggaaaaatacaatgtgatatatccatacagtaaaatattattcagccataaagaaaaatattcaattagaaaatgggcaaaacacatgaacagacatttcaccaaacaggatatacagatggcaaacaatcacatgaaaggatgttcaacatcattaattatttgagaaatgcaaattaaaaccacaatgagatatcactcttcacctattggaatggttaaaataaaaagtagggataacattaaaggctggtgaggatgggaagaaactgaatcacccctgcattggtgggaatgtcaaatggtgtggcctctctggaaaggagtttggcagttcctttgaaaagtagaggctggacatggcagctcatgccggtaattccagcgttttgggagaccaaggtgggaggattgcttaaggctaggagttacccatctctacaaaaaatttaaaaattagctgggtgtggtggtgcatgcctgtggttccaggtactcaggaggctgaggatcacttgagcctgggaggttgaggttgcagtgagccgtgatggcactactgcactccagcctgggcaacagagtgagaccccttccccaaaaaaggatgggaaactacagatggccttaccacatgacccagcaatttcactcttgggcatatatcccagagaaatgaaaacacatttttcacacagaaacttacatgccaatgtttacagcagtttcatgcatagtaactaaaaactggaaaccatccaaatgtccttcagtggatgaatgcctaaacaaacccatggtacatccttactacagaatattactcagcagtaaaaggcaatgaactgttgattcacggaacaacttggatgaacctcaaggaagttacactgaaaaaagccagtcttcaaaagatatatactttgtgattcaacttatatgatgtttgtgaaataatgtgatcatagagactggaacagattagttgtcagggctagtgatggggagggggtagatgtggctatgaagggatagcacaagggagctctgtggtgttggatgagctaaatatcttgattgtggtgactgtgcgaagctacctatgtgataaaattgcctaatactatacaaacacacacacacacaaatgagtgcatataaaactgctgacatctgaatggcatctggggattgcattgaggtcaatttccgggttttgacattgtgctctaattatgaccgatgttaccactggggggaactgggtgaagggtacacaggacttccctattcatttatttgcaacttctcgtgaatctataagcattccaaaataaaccattttatgaatacagttatttattttattaatgcaattaaataaatatttgagaactggcaatgtaccaaccaccatggtatatgctgggggttctgtgcaaaacagaagatgcacacacagtctctgctcttgacagttcgtttgcattgctgaatgataaaactgaatttctctctctcttttttagcattttttttttttgagacagagtctcactctgttgcccaggctggagtgcagtggcacgatcttggctcactacaacctctgtctcctgggttcaaatgatcctcctgcatcagcctcttgagtagctgggattacaggcacctgccacaatgcccagctaatttttgtatttttgatagagacagggtttcaccatgctggccaggctggtctcgaactcctgacctcaactgatctgcttgcctcagcctcccaaagtgctgggattacaggtgtgagccaccgtgcccagcctctctctcttagcatttttaagttgtttattaaattatacaaaaaacttgcatttaaaaaatttatttattttaatttgggggtacaagtgggttttgtttacatggataagctctttagtgatgatttctgagattttggtgcacctatcacctgagcagtgtacactctactcaacatgtagtcttttatccctcaccccacatgcagctttcccacccaactccccaaagtccgttctatcactcttatgcctttgcgatctcatagcttaactcccacttataagtaagaacatatgatatatagtttttccattcctgaaaaactgaacctctttaaaaacaaaaacacctaatcgctttcagttcttcatggatgttccattttgatgttgagattgtgagtgccaggggctgggctggcatgtgtgtacccagcatctctacctgcccctgacccagccttgagggtgagtcactggtgaaaggcttcctttcttctgagccagggcagagtctgttgtcacctgctgtcaccttggagtgcattgggttcggctgcctggtgcctgttctcacacctcacctcttgagacggtttggacagggtctggtatgtttcccctgaggcttttgctgagggatatgggagaatgtactcagcgtgacaagtctcaggaactgctggagctggcaattttgttgggaggagtaggctggccggctccctgcccagggcagaagcgggtgctggacggcctgaggctctatcagagctgtcttggcaggttcatgggtgatgtggtctcctgggcagtaggtggcacgggggcttttcagctgtactagtagggttttgatctgctactgaaagcagagtgaactgagaggacactggaaaccaatgggctttagagaaaaatcttgactgtctccgcttacagaagttgtatatgctcattataaaaaatcgcaggaaaacagaatgcaggaagtgaaattcagtctgtgtgtgtgtgtgtgtgtgtgtgtgtgtgtgtgtgtgtgtgtatgtatgtgtgtttctggttttaataacagctttattcagatgtgtttatttaatgtatcaatatctttctactagataacagctttattcagacgtgtttatttaatgtattcaatatcttccaagatcaaggcgctggcagaaaaaaaaattttaagtattaaatatcatacaattcagcaatttaaagtatacaattcgatggcttttagtgtatcacagagttgtgcaaccatcatcacagtcagttaagaacatttcatcacctcagaaaagacaccttgtgttgtgtagcagcgtgaatgtactcaatgccactgaactgtacacttaaaaatggttaaaatgctaaattgtgtattatttatagtttaccattataaaaagaaagaaaaaaagagaatgaatgaagcccataccatttagctagcatccccctatctccccctacccccagccctaagcaaccgctgatatcctttctgtctctgtttatttggcccattctggatcttaacacctgaaggcccctttcgcccaactgttctttacgggtcctcactgtgtggcaggcatggtgttgggctcagggcaggggacagggaaaagtgagacctgctcctgccccggctgtagtccaacagcccctgcctctcacagtaaaacacatgggcggcatttccctgatgggcattttgggcagtgcaccctgtgtgtggctttctgatgggagagggtggaatccctgggaaacaaagactttggtgtagaaggtggatctagagctggactctggagctgcagggattctctgtgcaggacaaacagcatgagcagaggcaaggaggtgggagtgaggactgtaggaacaggagatagggaagaaaatgcccagccaacagacaggatttctgttgaggagcaataggaaatgagacccagtgggtccacaaaaccctttccctgcacccctgcctcacaccacattgccttgcatgtgtaaaatgacagtttagtaatatccccattgactgaacacacgggcactgttccaagccactcccatggcataatttatttcatgctcacagtgatgtttatgaggtggtgtagtcgcttcttatggctgccactgcaaattacacaaactaggagccttagagcaacataaactcattctctcacagttctggaggccagaaatcggaaatcaaggcgtggacaggcttggttccttctggagactgcggaagcatctgttccatgcctccctcctgtattccggtggttgctgccaatctttggcattccttggctggcattccttgcatcactgcaatctccatctccagcttcccatggcattcccttcgctgggtctgtgtcccatgccctcacatgaccttctttttttttggagacagagtctcgctctatcccccaggctggagtgcagtggcacgatctcacctctgcctcccaggttcaagcgattctcatgcctcagccccccgaggcacctgctaccactcctggctaattttttttatttctagtagagacaggtttgaccatgttggccagtctggtctcagactcaggtgatccacccgcctcggcctcccaaagtgcttggattacacgtgtgagccatcgcagccagcccatcacatggccttcttatgaggacaccaaccgttggatttagggcccactctaatgcagtatgaggtcagcttggttacatctacaaagaatctatttccaaataaggtcatattcacgtgtgttagagattcacacgtattcacatgtatcacattcacatatcttttgcaggaacacaagtcaatcctcaacaggtgggtactttactacccctgttgtgttcgtctgttgttgcattgctataaagaaagagactgggtaatttgtaagaaaagaagtttaattgactgtagttctgcaggctgtacaggaagcatgatgctggtatctgctcagcttctgaggaggcctcaggaaacttacaatcacggtttaaaggaaagggggaacaaggtgtctcacgtggtgggagcagagcaaggtggggggcaggggccacacacttttaaacaagcaaatctcgtgagaactctatcagagaacagcaccgaggggatggtgctaacccattcatgaaggacccacccccatgatcccatcacctcccaccaggccccacctccaacactggggattacaattgcacatgagatttgggtggggacacagatccaaaccatatcacctgttttataggtgaagaaactgaggcacagagagaagcaacaacctcggcacatgctcacgggcaggtggtgtggcctaggaacccacaggcaagacacccggccggtgcagtacaggacagggggcagtctagaagctaagcccaccacccatcagaacaaaggattgtttgtcttgtgccaatctgcactcacctttgttctagaaaggtgcgaggctgtttgttgggacttcctcaagtccaaggtgtccctttggggccctagagggaagggccatcagccacgtggtaagaggtccaagaccctgtccgtgatgcccctgtggcctttacccctctagggtgtctttcccagacagacttttagtaaacattcatcagtctcccatgcactgtgctggatgctaagggagactcaaagatggaccaaaccctgccccagcatgcagggtctccccgtgtgttgccttcgtgtgaagagatgctgtttgcatagtcaggaatggaaaggtggcagaaagggcaggggctggggccaggggagaggtttaattgcaaagaaacaagcatgagccttaagcattacttatgattttacaaatctggggttttaacagtaaaacagtatttgggcctctgcgtctagcgtcgtgttgggccctggctgccaaagcgaataagccctagttcctgcagtagcagctaacccagcaaggggactagataccaaagccttgtaaggatgctgtttcaggaagggagtccagggctttgtgtaaagtgccagggggcacagaagggggtgtgactgacttcgtcttcaaagtttatctgtgttctgcaaagatcaggccgtgcctcaatgggaaggaaagccgctgattgttgagtatgcctggtatgtaggctgggctttttgtgtgcattgccactaacccactccaggcattcctgaggaaggtccttccttcccttcccatcttacagatggaacctctgtctcccctctctgctgccggaagtcttttgaccccagcctcccttggccacacctgtgctgccccttgtggaaggagtcggcaatgcaccagatgcgggcactaggtggcactgggacgctcggggcatcctgtgaattccaacaccaccagctagggtctttcagacttaagtcatttgtaggcatcctccaaatacctcctgtaccaccatctagttaatattttatttaaattctcttttaaaattttgtctctatctccttgccatagacaaatataatttttttaattatgtgaactgttaagaacagtgtttgatatgcagaaagaaggcaaatataaaaatgaagctaattgaacacaacatgttggttcgcgtatcactataagcatctcacagacctctaatgctgtggagtgcagtcctgggctttgaaaacaggtccgcaaactgatgtcacctatgtgcgtgtggctttagggaagagctcctttccctttacaggtggaaggacagaggcactgaggggggaaagggcacgctctaagcctcattgtctgttccaggctcagagccagacctggaagccgggtcctgccttccctctccatcacatggaaactagaacctcgggagaccaggaccacagtgggacatgcacatgtttcctggcccctctggagccagagagcgctcatgtggggctctcacgtgcagggagcatgaccatttgagtgtgaggatgagtcaggagttgtggggcaggtgcctgtggggcactgatgaacagtgggacctccaacaacctgctgagcctctctgggcccttcgccctggctttcccaagcagggcagagcatggtgccgtgttctccactggtcagtctggccccagctgcaggcactgacggtggcatcctggcaccctgcccctccgaggagccccatccaccttggcatggattttgaacaaatgctttgatccctcttccttgccagagctgtaaaacatcagggtagccctcgcccttgggtgagctgtgcagccattcaggttctgagaggccctggagatctgggtgacaggccagtggccccacttcagtgccccagacccatgttcctcctggaggctgaggcagaactgggcaacacccttcctcctggcctctcctgggcctcagaattgccaagttctaagactgttgcttgggatgactgtgatctattaaatgtttaattctgcatttacagtctagaaacttctgtgttattttgtcaaaaatgatgagtgtatattaacaccagctatcctaatagtgatatggtttggctgtgtcctcacccaaatctcaccttgaattatagctcccataattcccacgagttgtgggagggacctggtgggagataattgaatcatgggggcggtttcccccatactgttctcctggtagtgaataaggctcacgagatctgatggctttataaggggaaacccctttcgcttgtctgtcattctctgtctgccatcattaagacgtgcctttcgccttccaccgtaattatgaggcctcaccagccacatagaactgtgagtccattaaacctctttatatatatatatatatatataaattatccagtctctggtatgtcttttttttttttttttttgagacagagtctcactctgttgcccaggcgaaatgctgtggtgcagtctcggctctctgcaacctccgcctcccgggttcaagtgattctcctgcctcagcctcccaagtagctgggattacaggtgcctgccaccacaccggctaattttttgtatttttagtagagacaggtttcaccatgttggccaggctggtcttgaactcctgaccttgtgattcgcccatctcagcctcccaaagtgctgggattacaagcatgagccactgtacccggcccgggtatgtctttatcagcagctcgaaaatggactaatacaaacaggtaatctcctgaaatctcaatggattgacaaggaattccatttctcacttacctaaggtccagctggcagctgatgtgtatgggggccgcatgcagcccagcatgggacccagaatgtgtgcagcagacacgccccccgaccccatccttgccacctccttcccccattttccttggcaggatactcacctcacccagggcccttcttgtgtctccccagtattgtacctggaaggctcggctcttgtgtttgaggacatcttcagattgattgcgttctactgtgtcagtaggtgagtagacccggccctgcaggaggttatctggttgtagcaaacatcacatgcaaccctgggtgggtgcaggggacttcacagggaagccccagagggaggggtgtggcccagaggatgcagagagagggcacaggcccctctgggaaccacagaggatgtgttggctctgaggctttctcacactatctgataagagcccctcccttccacacctgcccctctggctcacggcctgtctctcagcttcctgtatcatcagcttcaaggacagcctggagtcctgcgtggaccaggcctcccattgcaggggttctagaagaaacttcctgtaggggcagcaacaggggctgatcccccttcatgggaggtagcttgtgattactaagcagctgctgggtggagcgggtgtctgctaaccaccctgagaactgcctgtttattcagaactggttttgggtcagtaagaatttaaaaatacactttggtgccataagtcaatgacttaagctacgggaccttgacaagggctggtttaaaatggggtggtatgtgttggggtccagcagtgggctccaggcccacaacccctgctgcctctgaagaaaaccatgctcaacctagagcaccccctccccacctaccaggaccctcctgagtccagatgggcaggaaaaatgaggctgataatgtcaccggtggagggtgtccgggttcttggtgtcttgaacagagaattggacaaaatgcacaaagcaaggaaggaatgaaggggtttattgaaaatgaaagtacactccacacggtgggagcgggcccaagcatagggcctcaagggcaccgttacagaattttgggaatattaaataccctctagaggagtccactggttacttggggtacaccctatgtaaatgaagaggatgacgtaaagttacaaagtcttttacttggcctacactgtatggagaggatatttcctgttataactgaagtgtgaatcagccttatgttccctgcctccagaccctatttttcctgcctcatatcttccctgagagaggtgatccccataaatctttataggaggcagagggaccaatgatctttttttttctgtaactgcttcatgctggcttggggtgtagtccctacctattggggatcaaggaactctcaccctgctctgtatagtggaggcaggatagcttcttgatgggcagggttggtgtattcacctgcaaatggctggaacctttgttgctgttcatctgaagcttgatggtctctatgcgagaggaaatgaaattggttaaaagatttaatgggaacttcagggggtggatacctatgctgtcaagaatgtttgttacagagatttgcaggagaaaagaagaaaacctggtctgttctaaaacctatgtgtttccttaaagtcttagcacaaatgataccattttggtttggtttgttggggcctagtgcatgagcttagtccaaaacaacagcctgccagaattttgtttaacaaattcctggccaggcacggtggcccacacctgtgatcccagcactttgggaggccgaggccggtggatcacttgaggtcaggagttcgagaccagcctggccaacatggtgaaaccccgtctctactaaaaataccaaaaattagctgggcgtagtggcgggcgcctgtaatcctagctactcaggaggctgaaacaggagaattgcttgaacctgggaggcagaggttgcagtgaaccaagatcgtaccattgcaccccagcatgggcaacaagagcaaaactccatctcaaaaaaaaaaccaaaataaataaatttaaaaattcccccctttttggtcacgttctcactttggtcacttaggtgagaacgtgaccaaaacttagggccttagtgccactctctgttaccatcattttgggtttctggtcttacttagcccatcattcataggttacggtgtcctcatggtcacatatttctttcagctcctgttattccagttggagagagaccatatgacattctagagatggctgcatgcaagcatttaaaacctttgagagaatacagcccaacagggaaactatcactatgactattgggaggataatagtaagaaattggagtatgctccttacccaaggtccccacaagccaaacctcctaaaatcaaagagaccaaagaatgacttaactaagcagtttctttgttaatcccctagcactgaatttctataatcttcatttgctgtatttctccataggccacatgtgccagcagctgcacagatatgtctttgttcagccaattctatcataactttcacaagaaaatttaaagtctgttgtgtaactgtagcctttacagtagaatttgctgtagagcctgtcataagggatatattgctaatcattgcttcttttactttaaaccatggaaaaaggacctaataaattatgcccttctagaagagtgaaggcctcctggcaatgatatctttaacctgtgatgtgggttaagagaaatgaaccaatgtttcgtttctgactgattgtgaggcagccataatgaggtaccattaaagttttttttaacctgcattgggcctttatcctttatccatcaaagtataaggttcttcatgtataaggctggctgcaaactcctgcacgaataaaagtacaccccataagtgcacaaaacagaccccttttccacttctattgttcacagaggcataagcaagggaaaatattcaaagataagagtttcatgatagtggaggccttaatctgtgaacttgggaaaagctgttcacatcaaggatgccatcgtcttctggggagaaacacccctggttagccttaccccaagggttccaatgggtatacagttccaagagtatggagggacccttcacagttttgagattatgaacccaaagttccaggtcccgaagttttgttgcaatgtggatggcaaggacagtctttctctgatgttctcagaagatctaaactataaaagcttttttacctggtgaaaatacactatagcataataatctactgttataacatcagccctcttgcatgggaaagcttttatacaaccagaacacatgcactgaaaataccaattgaatgaaatccctttgtaaaatgtttaagtggcctccaggtgaccaattgtacctgaagctttaattgttttcccaggaatatgggatcaaacattggttataaacaatttcagtaatttgtaagccactacatcaatgtattcaatttggatcattttattttttccatgttgagtcatggaatgcagaactcttaataataaaagctttaaggactcaggaaggacaaggtggccatcctggttctccatgaggccatgcttaattaacattagacttatattatcttggatactagttgtttttccaaattaggtacatagcactgagaagaaaatttgttttttgtgtgtggtttataatcacttagcataataatcataattataattgatagcatatacttagacattaacattttagaaatcccatacaattttgtaacacatattagtattattcacaaaaatataacctaaggaagatcgaacatcattttggcaatctcatgtacctaaacatgtcaaataatcctgtttacctcctttctggatgttttcaggggccctctgatccatccaaaaaatcaggcatcaggaaagacaattttgaaactgaagtttgattttggaattccagagtaccataaattatttattttgccaaaatgactcagaaattttaaagaagtagaaaccttttataaccttttacaaaaaaaaacacacacacattctactgttcttatataccttgcatgtaaaactgtttctagtagtctttttttttttttttttttttgggatggagtctcactctgttgcccaggctggagtgcagtggcgcaatctcagctcactgcaatctctgcctcccaggttcacaccattctcctgcctcagcctcccgagcagctgggactacaagcgcctggctaattttttgtatttttagtagagacggggtttcatcatgttagccaggatggtctcaatctcctgacctcgtgatctgcccacctcggcctgccaaagtgctggattacaggcctgagccaccacgcccggcctctagtagtcttaactgcatgttataatggcgaattttaaagtaaaacctggtaagttatgttctgataaagtttgactgtttccagcatagctagaagcgtggccaactccgcatgtccccaggccttacctagctggaaagcaggcaagttaaacaattttcgaaaggcaaagaagcaacttatgaccttcaagcatttagcaagcccaatatttgaacataatttggaccacatgtttacattttgaagacatttgtgttttaccaataaaactgtctttatttcccaaagattactcaagtcacatgaactaaataaaaggcattacatttttcacttttccgacaaaatatttgacttaagcttttattattattaaaccaattaatgtaaaactttacagaggagacaaacagtgacttttcctttatatttaaccagtttgcacagagagaaagaagccagagactgactagtaagaaactcttacccttttgctggcatgccaggtttctgggttctctctctgagtggccctagcgaccctgcctgaccatatgcaaacaaacacattgccatgaattaagaatattcacaaacagtttacaaattgtggagacgttaggcagagagagagaaatatgactcaaattctatttacaagagtatacgcagaacacttaaattatcaggaagcctaaaatccaaaaagtttgtttaaaggtagaaagttggtgtgctccattaattcctctgggcccgacaaaggtagctttggaattccagataaatggaatgaatgatgatttgctagaaatacatgggaaacaaaataactattcacagaaccaaatgaaagccttccactaggaactaaaaaaaatcatagttttatacatatggatacacaagcaaagccagaggagaataaacagcaagtgaatgaaaactagaagtcaaaaacaaataaacaggaaaccaaccctaagttttcctactcaatttaccctggaggctacagtgttacctagggcccccaaaaacccacataatgaatattttaatcctgacacgtaattcagtatccttaagttcgccaatattttcatacagcctgtgcaattaagaaattgactttaggcacatggccaataagtactccagcactatccatgcaaaagagtaaacatagtgtgaagcaatgcaagcatgtatgtgagatttggctttgcactaaatccagcttcatgcttaactatatttaaaaaagaattgctgggccgggcacggttgctcatgcctgtaatcccagcactttgggagaccaaggcaggtggatcaccaggtcaggagatggagaccatcctggttaacatggtgaaaccccgtcccagctactcaggaggctgaggcaggagaatggcgtgaacccggaaggcggagcttgcagtgagccaagattacgccactgcactccagcctgggtgacagagcgagactccgtctcaaaaaaaaaaaaaaaaaaaagaattaccaaacttctgatgcatttttttacaatacttcttgttttactgtcgatgaagagtcaaactctgtaaaatattttaagagatttattctgaaccaaatatgagtgaccatggcccatgacccagccctcaggaggtcctgagaacatgtgcccaaggtggttggggtgcagcttggttttatagattttagggaggcatgagacatcagtcaaatacaattaaggaatacatgaatacattggtttgtttcagaaaggtgggacaacttgaaaactgttgggggtggggagcagtgttccaggctataggtaaatttaaacattttatggttgacaattgattgagtttttgtctaaggacctgggatcaatagaaaggaaatgttcataaaagattgtgaaaaaccaaggttcttttgaagtctcatagtggctgcccttagaaacaatcgaaaacaaatgtttcctattgagaccctttaaaaggtgctagactttctgccagttttggtagacaacatataacagtaagtgtacatacaaataaacacatctagacgtgtatacacacacataaatgaaaatccagtagctcggaaccttagccatgagatagcaatacaagcttactggttttactttaccccaatagataagccaatgaaggctatgaaccaaaatttcgggtaaagcagtttggttgttaaaggccagacctccccagactccaaagagtgctggagccaaacagtaccaaaggagggcatcacacattaaccaggctccttgctcagaacagcagcacaagtgggatccatgcaacaccatcccactttcccagtagacagtaaactccagattctaaacaatatgggggccaagcagccattgcaactgcaagagaaaattctaaggagggcttagtactagacctcataacctctgccaagagcatccactttggggaggttgaggtctacaggatcccccagagcatcctcctgtgggctccaatcttagagtgtcagatgtctctgaccttaggtgggcactggcaccactttgcatgtgttccctccagagcctgctatgagctttcctttggtacctgggtgtaatccctgacttttagcatccttataatttgataaggccatgccttcccatccttcctgttctgttagaaacaaattttcagtgccacaaagtgaacccagcactcaggcaaaagttttctcagcaaggcaatttacttctgtagaagggcgcttcctgcatgcaaggcagaggcaagggggagcatgcaaaacaaaggagaacaggattttcttatccctaacgcagaccctgttcctgtgtcttccccctgtgggctggggtcagaccgcacaatctaggctaattccgattgtctacagttgacatcatcaaaggaggcaagggtgggcctttgacaggaagcacaggtatagtacattttggggtgtttgggcacagcagagagagggagggctgatagatgaatgggtatgattaccttttagaatagaacaaagaaccaggcacagaaactctttgaagaggaactatttgtggtcaacaacaatttcctcctcttgaatttatacatgttctgctttaaacctatctaatatgattcggatttcgtgttcgttcacggggaagaatttgttactataggattgggaagaactagggaaggttttgttactagctgtctctataagtctttggactagtccacgaatgcagggcatgatgcagcatccaacaagaataagcacagctattgcgattgcgagagaggtaacaatagaggccatgagtcctttccatttaccaaaccattgccctaaccatcctgtgaaagggtcagttatcccagaatttgtggctaattcatctgataaggaggtaagaccttgtaaagcttttgtaattgttccatcaggagctgtattgttgggaatgtaggtgcagcattgggttcctatcataacacaaactccacctttttctgctaatatcatatctaaggccattctgttttcccaagccatttggctagtaggccctaattgttcagctattccttggatagcatccctagtgtaattaataaatcgctgctggttataatagatgtaatttatccaagctacatttttattaatagctaccattggaaataatgattcaaatcctgcagctactgggtctcgggctttgaatctatcaggtaccccctgtgggactccaatttcatctacatagacatgagagtcgaaagatccttgaggggcctctcttgttttacggcgttgtggtttctttttttctggttgttgaaatgccagggtgaaagggatggccaattgaattagagcacaagtaccactccagttacttggcagagtgtctagcaggtgaccaccacaataccaccatacatcagctcgggcatgaacaagtgcagactgattggtaagctcttggaaagacttaagctcactgcatccctttaggtccccaagaaactccaaattttttccctgtcgtgagagacaggaagtaaacttggcatctggagatggaggctggatggccctcgggggctcaccctcaaggtgttgagtttcagggaatagcacagagagagttcgacagaattcactatcccaggctgtagggtgttggaaaagagccaccatgcagcccatgcccggttggtcagaagaccatccaagtggaaaggggacgacttgggcctctggcctaccttgcgcacaagcgtaacagtcgcttttgtttagactgcgaacggaatattcaatccattccatccaggcatttgtttctttgtatcctgtttcaattgtcagtgtttgttttaaatttttaacctctacaatagctactttgcttttgtcattagatgaagagacaatggtctggttagcaggtgtagaagaggatagacgtggagatatgagggatggagatgtactgaggtgcaactcgaagaatcctatggggtctttccctcttacatctgctcccataccatagaaacggtttagggtgggggaggaatcttggagagttgggatggtgatggaaatttgcaccgggttacattggttatatcgacaattgggaggggcaattcctttagtaaaatggatatagggctttagaaccgctagcgggaaatcctgtgaggggacccaatcttgacgttgagtggtccaaacgacatattcccaagtatgacaaaacggaaagctaaacaaggtagaagcatctgcttcggaggggcagagatatttctctgctgctgcaagctgtctctggctttggagatccccacaaggtataactaaacaagcatcgaaggtaatggtctggggtgagtctgatctagttacgttaataatgaggtggctagcaagagcacaaggaaagaagaaggagtaacagaatagatgaaagagaattaaactttccttagctttagtttggtaggattttcccctgggactatggcccatgacgctggagggggcggtgctttcttgactcgggtgtgatgggtccatcctttctcggcagttcagactgcagtttcagttgttaggagcactagatatggtccctcccaggacggttcaagtttctcttctttccagctcttattgaggccgtagtctccgggccggtgctgatggactggaaactcaagaggcagcgtttgcgctaagagacctttagtcctaagggaagataaggtagaagacagaccaagtatataattcctaaggaactgatctttggtctcaaaagtgggactgtcactagtggaacttaagtatggtaacctatagagcatttcataaggggataggccaacatctgtttgaggggcagttcggatcctgagtagagcgatggggagacacttagtccagggtaatggactttctgaaattaacttagatgattttttaaagtctgattcatcctttctattcttcctgatgaggatggatgccaggggtcatgatactcccatttgattcctaaagtttgagtaagccctttaatgatatttgcggtaaagtgattcctgttgtctgagtcagtgttttctactggcccgaactgaggtattatcttctctagtaatactttaaccacattattagctgttgcggggaggggaatggcttcaactcaatgggtgaggtggtctactattatgccatgagcaggacagtttctttttccttccccaactcagggcattctcttttgaagtggcctgctcttccacatttgaagcacctatcctgtcctcccactctctcatttccaggattatttgaccttgctcccccatactctttagagggcctggtagctgagggtctgggtccgctagttggaggcttgggtttggaccctttataattcctggtcccctggagtctctgtttagaagcatatggcttgaagccgtctgttggaaggtggatagcataagtttcattttttgtttttgcttttcttaatctctcctcacatatactttttgggcttctcctaggggttcctctctggaccggttttttgtttttctagtttctgcaacttctttgctatatctggccagctatttgtgacaaaatgtagctttaatattccttgcccaagagggtcttctggatccaaatctgcatatttccttatttgttcccttagtctttctagaaatttcatgggcccttcatctttttcctgttgtatgtcaaatgttcgggaaagattctgagcatggggcactgactcccgaattcctttaattatcatttccctaagatctttcatattttcccagcagactgcattgttattatcccattgaggatcttgggctgggaatttctggtctgctgcaggaacattttggccaggagaatgttcacattcccaaattgtcatagcagccctgtgaatcatccccctttcttcccctgagaagaggatacccaggatggacattaattcggcccaggtatataactgggggcctaggaattgatctgctaccccatatgggtcatctagcagtggcttaagttctttctttaaaccttgaacctctgaactagtcaagggagcatttacaaagccagtagctcctcctgcctgggacacctctctcaaagggaagagagttggagctgattccttagaggcagaggggaaaggaagattttgaatatccttcttacatggtagtccctttagggaaggatacttaggctgacaaggaacagactcatggggtggtggtaattcccaagagtcagagtataagggggaggaataataggagtagcagaaggatctgggaccgagtccagggtagcagcagctgcctgtggaggggacaggtcaagttggggggaattaaatggggaaaggtggtttagagggttccaggagttgggatccctctgcctaggggttggttttactacgccttcccctgtattctttaggggaaagaggagaacaggttgttttctccagaagagggcatagtctcttcccgcaagaccagacttttgtcattcacatactgagttaaaagttaacagacccaatcctcatctgatccatattttggcaagaagatggcaggtttgcggatgggttccttggcccaaatgaaacaacaatattttatcatctgttgctttttcttgtgcctattcctctcattctccttccaatatttcagcatgagacctagaggactatcagaggggatctgactatccccgtccttacctttccctgttgtactaggagtgtttcccatcttggaagttttggatgcccccttgactgtgtgtgtggcccaatctctcttactagagttctcttgccttcccttttctctagaggctcaacccccattaatggaggtttcttgcactcctttccattcacttcatcctatctggccacttccttcacaggaaattaggtccctcttagcattggcatgcaggtataagccccatggcaggatctgccctaagccatatgaagatgaggtgaccacagaaccacagaaccacagacaggacccactcaccccggacagcagtaatgcctatcaccattcacacaagcagcaccgcaagcagtggtgcctatgatcattcacacacactttcaacctccaggatatcccgaccaccaatgaaatacttcaccgcccccacagcttttcttactttggtcttgtgcgcaaagttacctggtcgccacggtatttgtaggcaagtctttccttccaacgttgccgagagtccaggtttattcgtcacagtgggtggggtcccaatctctagcccttgaggccacgtcagcaaggcagtgggtcacgtctccccctgggagatgaccagagaccccttccccagaggagaatgggaatcctgggcaaggccccagattgttagaaacaaattgtcagtgctgtgaagtgaaacccagcattcaggcaaaagttttctcagcaaggcaatttacttctatagaagggcgcttcctgcatgcaaagcagaggcaagggagagcttgcaaaacaaaggagaccaggagtttttatccctgaagcagaccctgttcctgtgtcctccccctgtgggctggggtcggaccacacaatctaggctaattccgattggctactgttgacatcatcaaaggaggcgagggtgggcgtttgacagggagaacaggtacagtatatcttgggtgtgtttaggcacagtggagatagggagggctaatagatgaatgggtaagattaccttttagaatagaacaaagaaccaggaaccaaaaccctttgaagaggaactatttgttcttaacaacggcagcacaagtgggatccatgcaatgccatcccactttcccagtagagagtaaactccagattctaaacaatttgggggtcaagcagcattgcaactgcaagagaaaattctaaggagggcttagtactagacctcataacctctgccaagagcatcccctttggggaggttgaggtctgcaggatcccccagagcatcctcctgtgggctccaatcttagagtgtcagatgtctctgaccttaggtgggcactggcgccactttccatgtgttccctccagagcctgctatgagctttcctttggtacctgggtgtaatccctgacttttagcatccttataatttgataaggccacgctttcccatgcttcctgttccgtgaactttaatgataggaactggaggctgggtgggtttcttttgcccttagccagttgaataggagaagggaagaatttagcataagaaaagaaggtttaagtcctgaaacatgcgagtttgctctgagctgtgccacatgtagggatcagggaccacactcagaaaatattttttttaaaaaaaagaatcccttcccattctggacagggcaattattcccattcattcctaggccttcaggcaacactggggagtgaccccagccaattatcctcaacttccaaggagctactgggaaacagccactgaaagacagaaaaagaaagagagagaaaaaaaaatgaaaaagaccctggtcccttaagtgaaccaggcagtggcatttaggcttctccacatggaaacgccttagtttcactggccacggccagaaacctgcagttgctttcgtatttaggcgctgcccaccaagggtcctgagtcggaaaggaaaagagagagagagagagagagagagagagagagagagattgattgattgattgattgattcccctgtatggagcagaaaggaaaaagagaaaggagaaaaaggaatcccaaactttggacttacctcttcctccccgctggctcgccaaaatatgtcaccagtggagggtgtccaggttcttggcatcttgaacaaagaattagacaaaacgcacgagcaaaacaaggaaggaatgaaggggtttactgaaaatgaaagtacactccacagtgtgggagcaggcccaagcatagggcctcaagggcaccgttacagaatctgggggagtttaaataccctctagaggattccattggttacttggggtacaccctatgtaaatgaagagtatgaagtaaagatacaaagtcatttacttggcctgcgccctatggagaggatatttcctgtcatagctgaagtgcgaactggccttacgttccctgcctccagaccctattttcctgccccagtaatagttgatgctaacagctgctgcctcttaaggacacaccaggtacctggcactgtgctaagggcttttatagccattctctttttaaattttgcgaacaatttcaggaggtaaatgctcttgttatccccattctacagatgaggaaacggagactgagagaagtcacttgcccagctgataaatggcagggcagggtttcaaaccagacgcatctccaaagtccacactgtctgctccagaggcctcactgtgtgcatcctgcagtaattctgatgcctgtaggcccacaaggcaaaacatcagaggcctcctggcccttggtatgttatgacacgttaggctctcagagaggcaggttccaagctcctaaccatagtggaagaagcctaacagtgtttggcacatgttaggtgctgtgaatgaacaaatgatggcatagttgcaaagcccagaacttgagcttgttatttaatctctctgagcctcaacttcctcttctgttaaatgggaatgataatatcgttatattggtgctgaaggagggaataagaaacacatgtaaagagacagcaccgacccagcgcagtggctcacacctgtaatcccagcactttaggaggccgaggcgggtggatcacttgacgtcaggagttctcaagaccagcctgggcaacttggtaaaaccgcactctactaaaaatggaaaaattagccgggtgtcgtggcacatgcctgtaatcccagctactcaggaggctgaggcaggagaacggcttgaacccaggaggcagaggttgcagtgaattgagactgtgccactgcactccagcctgagcaacaaagcaggaccctgtctaaaaaagaaacagcaccctgcccccacacccagtcagtgcccttgttctacttccatgaattgggccataggggtttgctggagcagcgacttcctctatgtccagggagctctggagccatggtcaccaagctcactgctgtcactgttcaacctttcctccatgttccagaaaagcaggtgcccctgggcctaccctcaaactcccagggtacccttaaggaggccacagggcacagagcctggcatcactgtattttgagggatgtcagctcccaggcctgagtttgtgagtagctcagaagtgagatgctgtgggagggatagtcccaggctgggagttggagacccatcacttagaagcttgtgaccctgggcaagtcacctgacctctcctggcccccagttgcctcccccatcaaggggatgttagccaagatggaacatcaaagatctagagctctgtggttgtgcaattctaagatcctgccctacagactcctccagagcctaagtcctggaggcagcaggtgatgtcccagaggcatatcatgtgccttgtgtcacctccaggacatggcacagaggggtgttacagtggatgcttgtcagccctggcgtttagttagacatgtgtccccagcaccatgctgaaccacaggcctggtcctgagcaagcctacccaggccccttccccttcccagagcctcttgtcagtgagcacttggggcccggggggctgggctgggagcctgttcctggagcttattccccatgacagcatggcagcccccagagggccaagctgcacagtgaagattccccagagcaggacgcccccatccctctcaatccagcactcaggaagcacattctgtgctctgtctgcagcctctgcccccagaaataaaaaaaagacaggttctgcttcaagatgctcactccaaactaatgcaaagcctaggtggactggcgtaagggctctagagagggtttccagacctggctgggtcccacagtcaccgaatagctggttaaaactacagactcctcccaggagatcctgactcagtgggtctggggtgggacacaggaatctgcatttttttttggcggcggcgggagggggggttggagtctcactctgtcaccaggctggagtgcagtggtgtgatctgggctcactgcatcctccacctcccgagttcaagcgattctcccgcctcagcctcccgagtagctgagactacaggcacacaccactacccccagctaattttttttgtatttttagtagagtcagggtttcaccatgttggtcaggctggtcttgaactcctgacctcaaatgttctgcccacctcagcctcccaaagtaggaatctgcgtttataataagcctgtctcagaccggggtttgagaacttcttccaggtgaatgataccagttgcttacctgggggtctcctaggggcagactttgggacaagattcatatacaaggggtgattcaggacttgccctcgaggagaaagcaggagggagtagggaagcaggactgggagtgggagaagcccagtgagggtgcgactgcagggtgaccccaacctcagtctggtcctgtcggcagctctggagcataaagtaaacctggggccactcctaggcatgtgtgaggctccagcaccaggacaatccctgatggtcccaagggccagcacttaaggcaaaccccactgaggctaggggacgggtgtgtagagctggtaaagccatcagggtgggtggggtgtcagcagtgatttcgtgactggctcctgctgatggggcatctgtgtggagtgagcctttgggctgcgactgcccacagagctccctctaaccgctacagcaataacagctttagggaaggtattaccgcttcagtgatgccagcccccagggctgtgctgaggatcagactccctgatccttggaaggggtttagcagagcgcctggcatgaagtaagggctcaaaaaacgatcaagcatgttcttattgctgttatagataaagaaactgaggctgggggtgtgacctgccttggtgtcacagccaagttctgagccaattggaacccaagtgtgtgtgacccgcaagccccagctgcttctgcccaggagactgactaccaggcccgtggctgggaggatgccctgtgctgcccccactccagccgctccctccacatatgggagacttgtggctctctttgtggaagagtgatgttgcgagccaggcaaggaagggcgggaagggaacttaaggcagaggagacagcatgggcaaacgcctggcagtgggaaagctatgggcagcctcaggagtggcttcatgggcagaaccgcataatgggtgggaggtaaaaatgcttggaaagccttgaacgccgtgcctagggattgcagggacttccttccgcaggtgctgtgagcctgttgctgatatcagactgctcttcagcgagcaacctggccatagcaggtggtgggattggaggaaggggagagcagagaccagcaaggggctgctgcagccatcctggccctatgcggaggtgactgccccaggcaatggctaggggaaccagaggggtgagggcagcccctgagggagggagcagggggagactgtggagatgccggggtttccatccttgacgacaggaagacgaacatgcatgatggtttcctgagtatttacttggtgccaaggtgctgtgctcagcaccttgcaaggatcatggggcctgatccctggcacagccctgggcactgcagtcattagcctcaagaagtgggcaccattacccaaaatgaggaaggaagagaagagcctctcaggcctgccccaccctaggatgtgcccagtgttgtgactaagccgccaccctcctgtcccagaggaggagatggcaagaggaggggacggctggctgggcatccttgccctaggagaaatctcgtcactgtgcctggaaagctctgatatatagccggccagtcagaagccggctggtggcctgagacaactgcatctgaagtgggggcagtcttgggggactgaagccttaagtctgcagagtctaactctacatccaggtaattagtgtcagaattgagctgaattgttgtatacccagttggtgtctggagaattggagaattgattgctagtgttggaaaacacttcagagggggttatcaaatcagtttagtgggtcatgacttttttctttttaatgaaaaagtaaactggactagaaactatcagaatctcatgtagctggaataagtctcattttgctaaacttttgttttagtggtgtgtgtgtgtgtgtgtgtgtgtttgtatgtgtgtgtgcatgcacatatgctgtgtcatgatgtcaaaagtatttctctctggttacagaggtttggaaagcaccagctaaaacagagacctccagagagaggtgctggctccctgggaagttcacaagctgaccctccagagtgtgggggaaatgtcagaatatttattctaaaaatccctttttttttttttttttttttttgagatgaagtttcactattgttgcccaggctggagtgcaatggtatgatcttggctcactgcaacctccgcctcctgggttcaagcaattctcctgcctcagcctcccacatagctgggattacaggcacctgccaccatgccctgctaattttttttatatttttagtaaagactgaggtttcaccatgttggccaggctggtctcaaactcctgaccttcaggtgatccacccacctcagcctcccaaagtgctgagattacaggcatgagccactgcacccagccagctaaaaatccaattttaaaaattcccatttttgtgaatgctttttagtggatttcatagtttataaggaaacacacacacatcaggaaggttgcttaatcttaatatttttttaatagccctgaccttgggggcctgtgattctcaccgaaggctgcatgcaccaggatcccctcaggagctgtttaaaaatgtggattctcagctgggcgtggtggctcacgcctgtaatcccagcactttgggaggccgaatcactgaaggtcaggagttcaagaccagcctggacaacatggtgaaaccccagtctctactaaaaatacaaactttagctgggggtggttgcagtcacctgtaattccagctgcttgggaggttgaagcaggagaattgcttgaacccaggaggcagaggttgcagtgagccgagatcacaccactgcactccagcctgggtgccagaacgagactctatctaaaaaaaaaaaaaaaaggtggattctcagcctaccccagacctgatgctagggactcttggttggaaacctagcagtctgcatttctagcagctccctagaggattctgatccaggcagtctgcagagtataaatgggtatggtggccccagtggagtccctcacaagtgtctagttccctttggttttttgttgtcagtgagtgttcaggcggaggccccaccactccagcaccctatctggaggtttttcttggcattttccaagaactaaggactcggcatttggagatgaataagccgtgcatggcagcaccagtttcagacacctgccttccccatcttcacaccctgctaatgtttactgaggcatgaaactgatttgccctccagaccccaaactgggcaatttgcccaggctccacctttgtcacagagcaggagggcaccatgaggacataatgaagctgaggttggaggactggggtgtttactgtcttttattacggaattgggaggaaccagtacaggctgctccattagcttgggaccatttacttctcagcccatcataggcattgatggagtgtaaataggagcaagctgcggaaaaggggatcagtttggtaaattctgtcatttctccaaatatatctaccttgtggcccggcagactcacatctaggaatgtattcaatagaaatactagcttgaggctgggcgtggcggctcacacctgtaatcccagcacttcgggaggctgaggcaggcagatcacttgaggttaggagtttgagaccagcctggccaacatagagaaagcccgtctctactaaaaaatacaaaaatcagccgggcatggtggtgcacacctgtagtcccagctactcgggagactgaggcaggagaatcgcttgaacccaggaggcggaggttgcagtgagctgagatcacaccactgcactccagcctgggcaatagagggagagtctgtctcaaaaaagaaaaaaggaatactagtttgagggcagaaagatgatgtgctcaattcgttctttgcagcacaattggatccagtggcaattaggaaataattttttgctaaaaacaagtagtctaggagttacaagcctgaaccctccattcagatgcaggcattgtcacttacaagctgtgggatggggcaagccatttagtccctctgtgccccagtcttcggagctgcgagatgagtgtaaggaaagtacctgctttgtggagctggtaagaggatttaaagagctaatatacgtaaagtgcttaaaactgctcctggacacttagtaagctctgtaatggttagcattgatgaaagaggagagagaggaagacagaaagaaagagagagggagggaaagagagagagaaagaaagaaagcttggatgaccatcaaaagaagaaaaatagtagctgggcacagcggctcacgcctgtaatcccaacactttgggaggccactgtgtggatcacctgaagtcaggagtttaagaccagcctggtcaacatggtgaaaacccatctctactaaaaatacaaaaattagccaggcgtggtggcacacgcctgtaatcccagctacttgggtggctgaggcaggagaactgcttggacctgggaggtggaggttgcagtgagcccagatcatgtcattgtactccagcctgggtgacagagcaagactccatctcaaaaaaataaaataaaataaatgacagttatcccatggaatactctgcagcacagaaaaggaagccagtatacatgtatggacttgctcactatatagatcactttactgttcagtagagaaagcaagctgcagagcaattgatggaacataatgccattttcacttttaaaatacatgatgtgggccaggcatggtggctcatgcctgtaatcccagcactttgggagaaggaggcaggaggatcacttgaggctgggagttcaagacaggcctggacaatttaatgtgaccctgtctcttcaaaaaaattaaaaatatataaaaaatagtaaaataaatggtgtgtgtgcgtgtgtgcttgggcacgcgtatgtgtacattaaagaagggccagcaagtttactctccagagtgtagaccagcagtccccaacctttttggcaccagggaccactttcgtggaagacaatttttccacgggccaggggtggggtggggatggtttcgggatgattcaagcgcattacgtttattgtgcaccttatttctttcactattacattgaaatatataatgaaataattatgcaactcaccatcatgtagtaccaatgggagccctgagcttgttttcctgcaactagatggtcccatctgggggtgatgggagacagtgacagatcatcaggcattagagtctcagaagaagcacaaaacctagacccctcactcacatagttcacagcagggttcatgcttctatgagaatggaacgctgctgctgatctgacaggaggcggagctcaggctgtatgcgagcgatggggagcagctgtcaagacagatgaagctttgctcactcgcccgctgctcacctcctgctgtgcagctcggttcctgacaggccatggcctaataccagtttgtagcccaggggttggggacccctggggtagacagcaggaccctctggagaagggaggacctgcacattttaagcacttttgtattgtatgactttggctacagtaaatctgtttcttttctaattaaaaaaaatccaacattttaacaaatgttgacaatagcacttagatcacaggattgcttcaagggttaagtgggataacagggaaagctcttggtgagtgactgataaagcttaacaagtgatagctccttttccttaaaaaaaatgtagtaagtggtttgtgatactgattgaaagttttgccttgtagagaatcaaattttatattggtatagatttttaaatgtttcagtgtttctgtcagaaacttactactggctgggggtcttgggtgagtcccttaacctccctgagcctctgtgtcctctgtaaaacagaggtactgatgcctgccctcaaggtgcctgtgatttagtaagaatatcacttaaagcctccaaaacacctagccccacacctgacacatagtagatgctcagcaaacacccacgtcctgtgtgtgctttcctctggacggaagaggtgcagtggtgaattggatgggatgtggagaagcagagacgcatgagacccttgcaccccaggtcatggaggaagaagagtccatggtgtggcctcgaaggatgtatagaatctaagtagatgtaggtgctggggatgaggggctattccctctatgcgtaaactcagaggtgggaaatgagtggggcacacccactagaggaagataagcgtgatcatttgggagccagcaggagtcccccgagtgtggggaagggactgtggagggcggatgttgggggggcaagccggaaaggcagagcaaggccagaccaggggaggccctggatgctggggttcgagtctggggtgtgactgcagctgcaactgcagcagactgagtaaagtgacaaggtggcaggaggctgtcctggcagtcagggggtgggcacagatgagctgagcagcctctgctggctattgtgatacacacggcgacggaggaaccattggaaaccccactgacaggccaccacgtaactgaagtaaactgaggcaacttgggatgaatgttgccacccttcaaaattagagctggggttagtggtggtggggcagggcctgagatgggagtgcagcactgagggcccatccagtccggccatcagaagacctcaggatgcagcagaatcacacaacaatgacagaagatgccaacgtcagctggccggtccccagaccatttgacagtggagaagcccaaggccactcccgagacctgagaaagggcccagaacctgtgccacagcctgccctgtccaactcttccataaacacaagtgtcccagctccatcgaagcacttcccaaggggccatgggggcacctgggaggccacagaagccaacatcgctgagcagaggttccctggcaggggccagccccatcccaggcggtctctgctctgctatgcctccagttcagctcctgagtttggcagggtccattcagcaaatagccttggagcctcgtggtgagtgctaagcactgcggggctttggagacctggaaggcagcccagacccgttccaggagcacccagggctcccagcctcatgtcaccaggaagatgaggtgcagacagcaaagccatgaagaccccagggaggaggtagctctggccgaggccatggtgagaggctcagcagatgatggatgatgggatttcagtgactggcatcaggatttggggagaaggtggacgaagtgtgagcaagggagggtagaacaggttgtgaagaaaatagtggtggctgccaggtcttgataaccactgctgggcaccctctcatccattcctgtcttcacagaggaggaaatggcttcagagaacagggcaggtgggataatgaggaaggagcgggagacatggctggaaagggggtccccaggccttaaacactaggaagaaacacagaatcgggaccacccatcctggggccctggcagtgccacattccccttcctgagcgtgtgaaacagccctaggccaaaagtcaggagccctggcctcagcacacagtgtcttcaactaccatgtgggctggccaccccttttcctttccgggcccctgtttccccattagtccgaactccttctgggagatctctggagggaaccctgaacagttgcctgttgtgaccaaagtcatcagatggacctgcctgactgtgcgtttgctgggagatgcctgactgtgtgctcgtcagaggctgcctgactgtgcgtttgctgggagatgcctgactgtgtgctcgtcagaggctgcctgactgtgcgttcgtcgggggctgcctgactgtgcgtttgctgggagatgcctgactgtgtgttcgtcgggggctgcctgactgtgcgtttgctgggagatgcctgactgtgtgttcgtcgagggctgcctgactgtgtgttcgtcgggggctgcctgactgcgtttgctgggagatgcctgactgtgtgttcgtcgagggctgcctgactgcgtttgctgggagatgcctgactgtgtgttcatcgggggctgcctgtgtgtttgctgggagatgcctgactgtgtgttcatcgggggctgcctgactgtgcgtttgctgggagatgcctgactgtgtgttcgtcgggggctgcctgactgtgtgtttgctgggagatgcctgactgtgtgttcatcgggggctgcctgtgtgtttgctgggagatgcctgactgtgtgttcatcgggggctgcctgactgtgcgtttgctgggagatgcctgactgtgtgttcatcgggggctgcctgactgtgcatttgctgggagatgcctgactgtgtgttcatcgggggctgcctgactgtgcgtttgctgggagatgcctgactgtgtgttcatcgggggctgcctgactgtgcgtttgctgggagatgcctgactgtgtgttcatcgggggctgcctgactgtgcgtttgctgggagatgcctgactgtgtgttcatcgggggctgcctgactgtgcgtttgctgggagatgcctgactgtgtgttcatcgggggctgcctgactgtgcgtttgctgggagatgcctgactgtgtgctcgtcagaggctgcctgactgtgcgtttgctgggagatgcctgactgtgtgttcatcgggggctgcctgactgcatttgctgggagatgcctgactgtgtgttcgtcgggggctgcctgactgcatttgctgggagatgcctgactgtgtgctcactgcacatctcagtgtgcaccagcaagggtcagagggcagggaggggtgggccactcactttaccctaaagaatgcctttagaggagctggcctgggctcagcagtccaggaaaaccaaggagaagcagtgaccccgccccgccactcctgagtaggatctccacctctctgggtccctggtgctggctcaggacctagagttgacttgatgctccttctgcctcagagtctgcccctcagctccagggaagcttccaggctgtatggagaccctggcagccagcagagattgccagggctcttcctttgtggaggctgggaatggacacggtggacccagacatgacttctgcccctcgtgtcttcacagagacttactgcccttcacactgcggctaccccaggccatccttgaggccagcagcttcacggaccttgagaccatcgccaacctgggtctgggtgagtcttctccgaggggttaggggagctggtggggcgttaggaactggggccctaggactgccccaggggccgcctgtgcagagggacagcctgagtcccagctcccatgggaccacccacacccctgcctcaggctgctgagccacgtgatagagagattgtccagtttctaaagagtcgcctctatcagctgcccaggacgccctgaggcccagccacgtttggtctaagggagcagggcctggtcaggaccagagaggctggtgtggtcctgggagaagccgagctttaccccagggcccttctgagtgggagccagagagctgggcctggcagccaccacagccctggcccctcatcggatggaaaagcagcatgaatgtgaccatgaacttgagtgtggcccttgcgggtcctgtcctgtgcccaaacaactgaccctaagcacaccctaccccacccttccgagttcctgaggggtaaagaggggagaggaaaagaagaaggggagggagggcagggtgtgtctgaccccagcactttcacataattatagaaagaactcacgtttagtgggctcttcccatgtatgggcgatgccaagtgccctacaaggaggcaatcagcaggtgcctacctagaattagggcctcaccttgctggccctcaggaagcccaagcatgccaagtctgtagctgctgagaggccaggccacctgcctctttcagtgtgtgttgggagcagagaattttttttttctttttcttttctttctttcttttttttttgaaacagggtctcactctgttgcccaggttggagtgcagggcatgatcatggcttaccccagccccaacttcccaggctcaggtgatcctcccacctccacctcctgagtagctgggactataggcgcacaccaccatgcctggttaatttcgtatattttaacatggtctctccatgttgcccaggctggtctcaaactcctggcctcaagcgatcctcccaccttggcttcccaaagtgctggaattacaggtgtgagccactgcgcccggccctgagaatttcttacagggaaagggagagtgtttcacgcagctgctcaggagccgttgtaggccccagagcctcataacctggggccgccaggtcacatttatgaacaaagcagttcatcaacaagtctttagtaaaactcagccatacataggacactgtgctccatggggctgagcacagtgcccagaacattggtgccttgttcaccagtgttgatggaatggaagaaacagtgacccagagggcagaaccagatcacagaggaagtgaggggcagacctgggatcaaagaagacaccccttggttcccaagccaggccactgttcaccactcagaggggcccatcaggggcagcaatgcaagagacaccaccaggcagccatggtcaggggccaggaagtaggaggagttctggtccttgggtgttagcgctccatgagcactgactgcgttctaacctctttagctgccattggctcgtcgcagcttcaaacaatcctataaagcaagtactattattataattccccttctatggcagaggaaactgaggcacaagaggttaagtcatgtccagtttcacacagcacatggcagagcttggatgaacccaggccgtttagctcccacacctgccatcgtctcatggtgcctcttaactcttttttttttgagatggagtctcactctgtcacccaggctggagtgcagtggtgcgatcttggctcactgcaacctccacctcccaggttcaagcgattcttctgcctcagcctcccgagtagctgggactacaggcgcatgccaccacacctggctaatttttgtatttttagtagagacagggtttcaccatattggtcaggctggtcttgaactcctgacctcatgatccacccacctcggcctcccaaagtgctgggattacaggcgtgagccaccacacccggccgcctcttagctctttatccaaattcttctaggtctaatttacccagttataaccctaagggcaagttttcagttgcttttgggaatcaacttgctattaaactttgcttcccagaatgttagttgttgggctccaaccctcccaggatcttggatgtgggacaggtgacagttttgtaatttgcacttttgtaaggtgcagatgacctccccctaggggttcgatgacaccgaccattgcagagcacttggcattgtcttatgtcatttttgtgcattttaaagatagaacactggctggacacagtggctcatgcctataatctcagcactttgggaggccgaggcgggcagataacctgaagtcaggagttcaagaccagcctggccaatatggtgaaatctcgtctctactaaaaatataaaaattaagtgggcataatggcatgtgcctgtaatcccagctactccggaggctgaggcaggagaattgcttgaacctgggaggcggagattgcagtgagctgagattgccccactgcactccagcgtgggcaacagactgagactctgcctcaaaaaaaaaaaaaattagaagatcaagttttagctccgctgggaaccttgtgtaaagtgccccagacaagatttgcaccaaaggctttctgtcctcagcggttcttgagcagctatgtgaaacatgctctccttttccctgaagaaatcctcagggctgggcctggtggctcacacctgtaaagtgccccagacaagatttgcactgagggctttctgcctctgaggacagcctttctactgctcctcagctgcacctccccaccttctctgttgtttttgcaacgagcagtcaatggccagtttgcaggccatgttggtagagtaagtgagatgcatggcctcagtctatgacacattgctgcacctcttgaccccgctatggggtttagtcatccctaggactaactgccgggagactccctacagattcctctcacctgcaagagcacagcttctcctaagacctaggaacatgctttttttttttttttaaaggcgatgttcctcctggaagaactgcattcctttctggcacagacaagaccttctctcctgggagagtttgatctcaggcacgaggaggaagtggagaagggaggtttccatttgggaagccaacagcagttcagattcatctatcagcacttacttcctagagaacaggatttaaatggaagctgagtgtgttgcagcttaggagctgaagggatctgtgcagacctggtgtccccgagtgctgaaagacataaagccaggctcaccacaatcattttcccctggagccaaggaaaggttcactttacagtcatctgaatggctggagacccagggcgcaaggagcacatcctatcaaaggccagagaccttggccctggcatgggcaggcttgggccctgccaaccttcatgtgaaatagtgataataaatatggaaagagcagcgtttgtcaagggccctgacacaccaggcattgtgcctggcatgtcacacattgttctaggaagggactttggtggcaaagaagtgaaactcactcaaactagcatcaaaaagagacttagagaaaggacgccagggaccctctgagaaatggagacggagggttagctgggctttgtgggccattgcagctgctcggtcacacgtgccagccccttgctccctgcacatggcctccttgctgactcaggttcctactcccctgctcccccgactagcggggctctgactcagctcgcagccccacctgaccactgttcttcattcagattgtccaaggagaaccagatgatccctggccagcctagtgatgaggccctgtgagccaggggttaccttgtatagtcagcatttcagggaagaccaaaaggacaatgggaggcaaattcattgccacatgcccacacatacattatctcatttatttatgtaaaagcccgttttacagataaggaaatggaaagttaaagagtctaaagggtttattcagctataaaaaggaatgaagtgcagggactgacacgtggtgcagcatggaataacctggaaaacatgctaagtgaagggagctgatacaaaagaccacatatgctacagttccatttgaataaaatgtctagaataggcaaatccatagagacagaaagcagattggcgattgccaggggctgcatagaaagggggatggagagtgactgctaaataggcacgggctttcttttggggtgataaaaaatgccctaaaggccgggcgcagtggctcacgcctgtaatcccagaactgtgggaggccaaggcgggcggatcatgaggtcaggagttcaagattggcctggacaacatggtgaaaccccatctttactgaaaattcaaaaattagccaggcgtgatgtcacatgcctataatcccaacctcaggaggttgaggcaggagaatcacttgaactcgggaagtggagattgcagtgagccaagatcgtgccattgcactccagcctgggtgacagaacgagactctctctcaaaaaaaaaaaaaagctctaaaattgattgcggtgagagttgcacaactcagtgaatacactgaaaaacatgagcatgttttttaaatgagtgaactctgtggtatgggagtggtatctcaataaagctattatccagagagagaaagagagatcgactaaagggctttcctcattttgggatgtaaacaaaagctgaattcatactcagggcttgctgagtttgaaccccgtgctctgcctgcgctatgccctgattctcagccttgctcaccacttcccgcccctcggccctttcctccgcttgccgtgcctgcagtggaaaacagcatggcgcccttttgccaaggaagcctggatttggcattgggataggcagggtagtgggccccaccctctgcaccatgccctccacatgcccgccatgtgctgctttttcttatgacactttttcatcttataataaaagtcaagcatgttgtgtttgtttgtttgttgtttgagatggagtctcactctttttgcccaggctggagtgcagtggcacgatctcagctcactgctacctctgcctcccaggtttaagcgattctcctgcctcagcctctggagtagagtagctgggattgcaggcacctgccaccacgcctgactaatttttgtatttttagtagagatggagtttcaccatgttgaccaggctggtcttgaactcctgacctcaggtgatccggcccgcctcggcctcccaaagtgctgggattacaggcgtgagccacagctcccggccatgtgtgtttgtttttaactgacaagaccagaaaaggctgaggatgaaaaccacatataatctcacccctgctgcaagttcagggtgtgtttccttccagtttcttttccttaatacacctagacgcaactgaaaatacagttttggtttcttgccttctgattttgtgcgaatatatttgtgactttcagttttttccctagagcccagagccaaggaatgtctagttaaggctaaagatttactgggtttccagtccgctggatgatcttgtagttacaggaagttcatgaggcatatatgtttcttatcattagtgtcatcagttttatttgtttggcatgccactcattttcctatgagaagaatgcaacaaatgtccaaagagttgcaccaggcctgcttttgagatagggatgatgttgctgaaactcagctattgacttgcaggctgagtgccatgtgatggctcacagtgtgccttcatgagccgacgtaagaaagtccaaattcggacttggaaaagccagcgttcgaaagtgcaggctatataaggtgtaatcttggactttaagagcttaccagttagtcaaggccagaaaactaacataaggaggagcaattcagccctcaactatattcagcagttgattacaagcgtccaaggaatttagagaatagggattactcgcagtggttttcaaacatgttacagtgtgtatgtgtttaatacttcaaaaatatgtttaggaaaggcatctgttctgtggctcttccaagtttgcttgtaacttgctttttcctttacatcagatgatgagcattttcctagttattaataattcattgaaaacttgactttgactgactgtgtaacagcctctgtctttgggatgccacatgaatatttattcactggccttgttggattttttagtgtttccgtggcatctggaacactttgcctttactcatccccttcctgtcctgccaccagccccaagctccccaggggtagagtctgagtttgccctcaggacctacagcccagcctgtgatgtggcccaggttctctgagggtagaaagagtgggcatctggcaagaggtgtccccagccaacgctcaacaggccttggggccagcaaaatcgtggcctcagtctgaggccagggcaaggatgggcccttctttaggggaactctcgcagcagagccaaggctcagtatggtgcctttggggactggaccccacagctttgccaaccaaaccactaggattgcatgacacagggttctgtttctcccctggccttggcgttctcaggctgcagagaaagttactcatttcccttttttttttttttttggagcataaagccctgcaatgccactgtggttccctaacaggtcccaagaccccaggatgcagcccattagctcctggcttcccccactccttggagtcacattggctttgagaactttgccctgccagggtttgccagggtgcaaaccccaggcctgtcttggggcagggaagctgtgtcccaggtacccaggccgagagcctatttgcctgaacccgtgtctgctctgttcctgccaaaatccacacctgagcaatgggaaatgttgtcttctgttctgtgcctaatggagccatcctgtcccgtggcaggctgcccggctggtggcccatccgtttacggggctcctgtgccctccttcctgcctcctctcactgtcttgtatttacacatcctcccatggttcaggttgtccccatcttgcccttgaaactaaccttgcctgtgtccccttcctcagaggcctgactctccactccggctaagctaatccactcatgggtgccaaggggctgacactgggcccctgctctgggccaagcactgtctcaggtgctgggaatactcagacagctgaaagatttgactgccttctggaaactctgagtctggtgggaaagtcaggcaaaaaacagagaattacagtcccagtgatggtcactgctgtcacaggcatatcagagctgcaggaacacaggcggggtgggcaaggcctgagcacatcagggaggcgctaccagacaggtcgcatttgacctgagccctgaaggatgagtaagcatttgccaggtggagagggtgggaaaaggattccacactgagggaatagcattagccaagacctgctggtggggcagcgcatggcacgtggaggaaggagtgaacggcagatagagtggagtgaagactcggtagatgatgccagagaagatgtgcaggggccagttcctgcagactcgaatgccaggctaaagggttgaaagcgattctctacagagaaccaccaagggcctgccgtatgcccagccgaggaccccaggaggagaatggagtagagggggcggctacagccgtgatctgggtgagcagtcatggggtgtcccggcaccagtgggcagttctatatgttatctacccccatgacaccaccttcacccacaggaagagtctggaggtgggcaccgggggtctcagctcacatgtggggctgctgcccagttaccctgggatcagtctggctgcctgcttctccttgctaggaaaactcccaaggaggcaactttgttgggcctgtgtagacatgggcacagtgcttcaaacactcactccaggggcctgtgtagacatgggcacagtgcttcaaacactcactccagggtcctgtgtagacatgggcacagtgcttcactcactcactccaggggcctgtgtagacatgggcacagtgcttcaaacactcactgcaggggccagaacatgtatgtactcgaggcaaggtgcctgggagagtgaggcatacatggaggagccatgcgctgcccaagaaagcaaagggccccggcagtcacaaagagcagctcgtccaggccctgggagaggccgctctggataccatgtcctcggtgactgtgatgggcacagagctttgcacattggaaagagtcacaggaaaggttgtcatgcttgttagtgtgatgagacctggtctctctccactggctgtgatattcaggcagccagacacagggtatctgcccaggacagggctggggggtgcacctcagaggggtgcacacagctggtgggtcgcagttcacttccggtctgtttcttcagtccctttgtcctggaaaggcacctgcttaccctgattgcgttggtgaccccagccagcaagatggcaaatgcctacatccctgatagtgcccacctcttagagcgagcacacgcttggctgctccaggccatcttgtgaggtctcctttcaacatcaagagcctgttgtgttgttgccacatcctgagttctgggctgcaagccaccctgctactcaccgatgccgggagagcaaccaaaatatgggaagtgtcgcaagttcctatgaaggaaggccgcctaacacggaggctaaacacacaggctgtagaaccagcccgacctggtcaaatcccagcgtctcactccccaatccggtgacacagggcgagtgctttcatgtttctgagcctcttaccctcatctgtgaactgggggcaaggcctatgatcaggggtcggcaagataacccaggtaaagcaaggagcccgtgggctcacgcgcagcaagaacgccatggatgtttgctcctctgattatccttgatgttattttccatagttttcttaagggtgaattcctcccaggagtgaagagccctgggtgaaaggctggctgcaccaattcacaaggaactctgcatctgcctgggtcatcctctgtccagctccaaacctagcaggctgaacaagacctgggacccttgtttctctccaggaggaagcttgagtgaacgcagggtggcctatgcactgactgcaattgttcccaagatgtagcatccctgtgtgctctttggagggtcctgagcctccgtcagatgcttggcagagtgtggtccccacagatcaagattgcctgtccctagcctgctttggtggccacagccatgactgagcccctggggactgggtcggtagagaggcacgcactggaactcagctccacggtgcaggagccttggcttcccctgactggggcagacgaccagcttcttattttaagctcgaggttgactggagtcagaatcactttgtggtgggtggctgctccccgcttggacagccgggtctgatctcgctggccacaatccataggttcgtccttcccacatataataaccatggaggccaaaacaggcccaatgttccttcctcctcgtgtgcctgtgatgtgtgtactgttgtgaccccattttagggatgactagactgaggcctaggaaggtcaaaccacctgccccagagcacccagctggttggccgcaggaattccaggccttccgtcccctgtgctctcaccatgccttccccacggctccagagcacagtgttgtcaccccccaccctgtgtcatcaatgccctccaatgtgggctctcacaccaaggaagagaactgaagctgagcttatcacatcacccccggcctcaccctacactgctggggaggactgagtggggcttcccctctcgaggcaggaagtggtgggagaggtttgaaagcgtccaagaggggaaaacaacctcggagtagtgaagcaaatgccttgaacagccctcccacccgtggaccccgcccacagaccccgcccagcacagcaacacctagtccctggcacagactgaccccctgcccctctcttgcttccacaggtttctgggactcctcgctgaatcctccacaagaaagagggaagccagcagagcccccaagagaccgggcccccggattccccctagtctccagcctcaggcccacagcccatgacgcaaactgtgcctgtgaaatcgagctgtcggtaggaaatgaccgcctgtggtttgtgaatcctattttcatcgaggactgcagcagcgccctgcccaccgaccagccacctcttggaaattgccctgcacgccctttgccgcccacctctgatgccacctcacccacctccaggtgggccccacgccgcccaccaccccctcccccagtgctgcccctgcagccctgcagcccagcccagccccctgtgctccctgctcttgcccccgcccctgcctgtcctttgcccacctctcccccagtgcctgccccccacgtcacaccccatgccccaggtcccccagaccatccgaaccagccgcccatgatgacctgcgagagactcccatgccccactgcaggcctgggccccctcagggaggaagcgatgaagccaggggcagcctccagtcccttgcagcaggtccccgccccgccactgcctgcgaagaagaaccttcccactgcccctcccagacgccgcgtttccgagagggtgtccttagaagaccaaagtccggggatggcggcagagggggaccagctcagcctgcctccccaagggacctcagacggccctgaggacacaccccgggagagcacggagcaaggccaggacacagaggtgaaagccagcgatcctcacagcatgccagagctgcccaggacagccaaacaacccccagtcccgccccccaggaaaaaacggatctctcgacaactggcctcgaccctcccagctcccttagagaacgctgagctctgcacacaggcgatggccttggagacacccacgccgggtccacccagagagggccaaagccctgcttctcaggctgggactcagcaccctcctgcccaggccactgcccattcccagagctctccagagttcaagggctccctggcctccctctcagacagcttgggggtgtctgtcatggccaccgaccaggactcctactccaccagcagcacggaggaggagctggagcagttcagcagccccagcgtgaagaagaagccctccatgatcctgggcaaggctcggcaccggctgagctttgccagtttcagcagcatgttccacgctttcctctccaacaaccgcaagctgtacaagaaggtggtggagctggcgcaggacaagggctcgtactttggcagcctggtgcaggactacaaggtgtacagcctggagatgatggcgcgccagacctccagcacggagatgctgcaggagattcgcaccatgatgacccagctcaagagctacctgctgcagagcaccgagctcaaggccctggtggaccccgccctgcactccgaggaggagctcggtcagtgccctgggaggaggtggcagggaggagagggcggtggggctcacagactcaggaaccccttaggacaaaagaggcctatgcagtggacgctgttggtgcccaccccctatcccttcctgggcaccaggaactttctctggctgctgcaaggtaggctgctaatggtgcccggctcccccccttccctagagaattgaccttgactgtataggatctgtattatctgcaccctctcttccaccatcaggggcccactgccaattactccctgccatgggggacaaagactggccccttcgcctcaagcaggaccactgtgtggtgcagtttatgctccagggcccggcgagatctggctgaggctgagttcatccttgctcaagctcgctctgcggcttcccactgcgctcactctctgtcttctgagagtctccgcagtgaaatcatatgcacccagatccctctttcacgctctgctttcagggaaccagccccaaacagctcactcctctgaccaccccttctaaagtagcccctagccttccccaccctcaccagcctcgaatccaataattatcaaagcttttccgattgtggttcacggtgaaaagtacttgtgaacaaccacacgcctacgtatattaaaaatattcaggccaggcgcactggctcaagcctataatcccagcactctgggaggccaaggcaggaggatcgcttgagcccaggagttcaagaccagcctgggcaacatggcaaaaccccgtctctacaaaaaatacaaaaattagccaggcatggaggcacgcacctgtagtctcatctatttgggaggctgaggcaggaggattgcttgagccctgaaggccaaggctgcaaagaaccaacatcctgccactgtactccagtctgggtgacagagcgaaaccctgtctcaaaaagaaaaaaatagctgggcgtggtggctcatgcctgtaatctcagcactttgggaggctgaggtggggggatcacttgaggtcaagagttcgagaccagcctggccaacatggtgaaaccccatctctactaaaaatacaaaaattagccaggtgtggtggcgcatgcctataatcccagctactcgggaggctgaggcagaagaattgcttgaacctgggaggcagaggttgcagtgagccgagattgtgccactgcactccagcctgggcgacaagagcaaaactctgtctaaaaaaaaaaaagaaaagaaaagaaaaaaaatacattctgtcagttcgcactgccgtagccaaaaagtggttgctaaacattgagctgcttctgagctagtttgtaaatagttactgccccagccgtcccctggcgtccctaagcctctccttccccacccaataatgaaagagtcagtgctgggtacggtaaaggacacgtgggcctctgaacacagtagcttcgtagcgaatgtttcttagaaaaggagcttcaggtgttcctttcccagggctactggattttgctagcagactcctgaaaacgaataggtttgccaggccacaggattcatgatggcgtttcaggtgtggtgaggggtgatgggattgagatctgaggccagtgctgtgtgtgcgtctgcacagggccctgtaagcagatagtcgacaaagagttattgggcacccaactccgcatcaggtgctggctcagatatagagacagaggtgagcaaagcactcaaaagtttctgcctgcggggagcttacggtctatcagaggtgacaggcaatcagcaagaaggatgagtagggccgggtgcagtggctcatgcctgtaatcccagcacgttggggggcaggtggatcacctaaggtcaggagtttgagaccagcctggccaacatggtgaaaccccatctctactaaaaatacaaaaattagccaggtgtggtggcgcgcacctgtaatcccagctactcgggaggctgaggcaggagaattgcttgaaccagggaggcagaggttgcagtgagcccagattgtgccactgcactccagcctgggcaacagagtgagactttgtctcaaaaaaataaaagttaaaaaaaaaaatagaaaaattaactgggcatggtggcatgtgcctgtagtcccagttactcaggtggctgaggcacaagaattgcttgaatccaggaggcggagattgcagtgagccgagattgtgccactgcactccagcctgggcaacagagcgagactctgtctcaagaaggaaagagacagagagacagagagacaaagggagagagagagagagtaaagtatagtgtaaggagacacattagtgagtgcatgtggatggaagtgaggtcaggaggctgttggggggcaggaccccaaggaccttgtgagcctctctatcaacctgacttttcctgtatgtgagatggggtcgtgcagggttcacgtccaagggtgagtgacctcactcacatgtgaacaacgtcactctggccgtcacacctagtgggagcagagagactcagactcagtgtgaggctactgtcagagccaaggtgagcagtgaaggtggctgagaccaggacggaggcagcacagatggggagacatgattggattctgcctgttgtgaagctggagccacaggactggctggaggccagatgcaggagtggtagaggggaggtaggatgtggacgagcattggcgtccctgggaggacacagcgtccatcctggggcaggcactggggaggagttgaggagttcagtttgggacatgacactggagatgcttattagataccaggtggggaggtcgagcgggccatggagggctgagtctgcagttctggggctaaagagagatgtctgggaactgtcagcacaaaaggagccatgagactggatgagatcatccgggtctgaggactgagccacaggcaccgtgcagaccaggaggacacagaagggcatgggaggacgtggaaggacatggaaaactccaagtggcccagaggaaactgtggtcagccctgccttccagagttgggggagtgtaagagctgaggcccaaaggaggagtcagggatgctaagccgtggaaagggtagtggaaggactttccttctggaaagggatgacagcgtggacaaaggccgagaggtggggaacgaggctggaggatcacgggccattcacacaggcagtgaaagtcagcctgaggatttagcccagaggtgatggagcccctgaagggtgtgtgtggagggcagaggagaggggacaagacagggggacggctcaggaggctgcggcggggcaaggccagtacccggtggccttcagcagagcaaaggaggtggagcacaagctggacctctgctggaaacagcaggaatgacttcagccttggggcagctggctggcaggatgcagacacaccatgggtcctgttaaggccaaatctgcttcgggcaccaagatgtcaagaggtgctagacttggagtttgtcctggcaggtgatatggcaaagtgtcaccagagcctgccgtgggcacgaatgtgtggggcagagaggtttccaggcagtgagaggtggcagctgagctgagccaccaaggatgggaagggctggagctacagagatggagagaagggcccttcagcctttgggaacagggtcagcatccacagcaatggtgccattccagacactgcatgtgtcagcctcatgactacaaaccagaccagatgggcttggctattgtcatgcccaagaagccacagctcagagaggtttggtgacctggccatgaggacagagctggtagtagagctgggcttcagacccaggcagcccagccctttccatgagctgagtctctgcctctgcctctcccttccaagctctgcccatgtgtgtggccagtcagatggtgaaggaacttaaaccacataaaaaggccagacagggcggggtgtggtggctcacacctgtaatcccagcactttgggaggccgaggagggcagatcacttgagatcaggagttcaagaccagcctggccaacatggtgaaacccccctctctacaaacaatgcaaaaattagccaggcatggtggtgggtacctgtaatcccagctactcaggaggctgaggcaggagaattgcttgaaacccgggaagtggaggttgcagtgagccaagatcacactactgcactccagcctgggcaacagaacaagattctgtctcaaaaaacaaaaaagaaaaaaaaaaaggccaacagaactccatgcttagggtgcttctggtttgattagggagacaagtcacaaggagcaactggatacaaaacagtcctgacgtgaggctgctgagggccccagaccagagaggaggtgccaggaagagatcctgcggctcttagatgtgaaggggccgggagggcgtgggcacagccctctcattttgcagttcaggaaacaggccctgggaggggaagagacgtggccgaggtcatgcagaagcccaggacagtggggaagttcaagtccctgctcccaggtcaacccccatctgcgcccatctctgcctgcggaggctccaatgaggtcgggaggtgggcgtggaaggagggtcaggaacggggtgagggaagtgagggcagccctgtgttctgctgaaggggaagagggaggcagcagcaagggacccaggatggccatgggccagctccaggcctgagtggcagggaagggctgtccgggcctctgttgagacccagccccgtgggagcatgagtccctccctcctctctcagggctagggcagcacaggtgtctccttacaggaacagggcttgggacctccccttactcagcccgtaaccaagacccatcccctggagacagaggagggccaaaacaacttcctaagaatatgtttctacagtcacccaaagcaactggacatccccttggtatcaagtagacatgagttcaagtccttgttcaacccccaacccactccatgagagcctaagctggtccatcctcagagtgggcatcagagcacatatgcctcagagcagttacaagatcagagcgccaactcctgctccaagagctgatcgggaatgcctctcagataggacgacattcgaacagtgaaggaaccagccatgtggacgactgcgaggcgactgcaccacacaaagggaaccgcaggagcaaaggccctggggcaggagcaggcctggcagttggcagagcagcctgagcatggggagcaagcaaagcaatgagtgagaggtcacagggcccgatcacagcggggcctcttaggccatgaggagtctttggctttgatttgattgcatgggagatgggggccgttggaggtttccaaacagaagcatgttacgatcaaagatgtcataacaggacaacaccagctgctgtgttgacaagagactataagggccagggcaaaagctgactgacataacctgggcaagagatgatggtggtagcctgaccaacccaggtcaaggtagtagccacagaagtgataaaaaagtaaggttctggatgtactgtatttttgagactagagtcaagtgggtgtgggaattggaagggagatatcaagaataattccaccagtcatttactgggcattcaggccatcagcatacagctgcccaggttgtacactgtacaactccagtgtgagtaacaccctctgaagttatgtactcataggcagccttgtgaaagtttgctctctgccaggccctgtgaaaagcatcaggatacaatgaccagttagcattagttcccaggggctcctgtgccagtgcctttccagtgtggctttctcttgaataaactgtgctctctcatgtgtcagaaccacagggtataactgctggggctgtgagtgtccttccaggggccaggggatggggatggctgtgctgttgggcaacagaaccaggtggcaggatccctgcatctggtttcctcaccctcgctctcttgtttacctgcagaagcaattgtagagtctgccttgtacaaatgtgtcctgaagcccctgaaggaagccatcaactcatgcctgcatcagatccacagcaaggatggttcgctgcagcagctcaaggagaaccagttagtgatcctggccaccaccaccactgacctaggtgtgaccaccagcgtgccggaggtgcccatgatggagaagatcctgcagaagttcaccagcatgcacaaggcctactcacctgagaagaagatctccatcctgctcaagacctgcaaactcatctacgactccatggccctcggcaacccaggtcagtgggcagccgggaggggtctgggtgaggagctctctttgtatgggtccatgaccccaccctgaccaggactccagagcccttggaaggccccagactttccagattcagagcccccttggggaggaactgagtgtgggtggggtgtaattcctgggccctcttggagttacctggggactgggaggagagccatgatcggctgttgccctggaggcaagcaaggaagccagcccacaccttaactttgtgtgaatgaggaaaagcactgtgttagtttgctagggctgctgaaacgataccacaagctgagtggcttagccagcagaaacatattgtctcacagttttggaggctggaaggttcaagatgaaggtgtgggcatggctgtgctccctctaaagacaccagggaaggttctgttccttccgagcttctggtagctccttggcttgtggccacagaactctgatcttcacatggtgtgcttcctgtgtgcatgtctgtgtcccaatttcctctttttgtaagaacgccagtcagactggattaggggcccaccccactccagtgtgacttcatctcagctaatcacaactgcaacaaccctatttccaaataaggttaagggttaagacttcaacatacaaattttgaggggacaaaattcaacccctaacaggtgccttaaacaattagcattgatttgacgtgtaagtccatggggcatggacaagtatctgatctggatcaggcgtgcctgagcttgcgtgggcttattcatggatctgtggtcagaggtgggccagttggaggccagatagtctgggatggccttgctcacatgctgggtgggtggttggctgttggctgctctgggacggccttgcccacatgctgggtggttggttggctgttggctgctctgggatggccttgcccacttgctgagtggttggttggctgttggctggtctaggatggccttgctcacgtgctgagtggttgatgagccgttggctggtctgggatggggatgactgagccacgagtttctcatcctccagcaggttagcacaggcatgtgtccatggcagtagctggggcccaagagaagaagcaaagcctgcaaggcccatcgaggcctggccctgaactggcatgatgtcactctgatgcctttcattgacttgtttaggcacaagagaccatcccagactcaaggagtgaggaacatttcccctcttgatggaaagagtacaaaggcacattgtaaagggtgtggatgtgggaggggaatcagtgggactatttgtaatcatttgactgcagtcctccaggcagacaagaacaggcatcactgcacaatggagcacagctcaatgaagagaatgctggcaggattcatcccttcagctggtgcccttgtgcagtgagcagactgtgtacctggacacggctgccatggcaacagagagtggatggatagccacctctgtagactcacagacgtgggttcgaactcctggtctgtcacttactacctatttaaccttgaatgatttacttaactccttagagcccaatttcctcacctgaggaagctgctttacagagaggataaaagaccctaagaccgctaatggttcagaagccatactcagtcacttgtgagtattagaaacaatgtatgtaaaatggtggcctccatgcacagcacctggcaggctcaacaaatgtggctgtgttaaaagagggattctcttcatctcccctggagaagggcaggccagtttggccatagaccaacagaaagcaattgtgggtatgattggggtatggtgccagatcccctcacccaagaaacctttcctctcagatctggtacaggacacaattccaggttggagtcacatttttgtggtaaactgatttgtgtcctgcgaccatgtgttagaattgtgctccccaggccaggtgcggtggctcatgcctgcaatcccagcactttgggaggctgaggtgggcggatcacgaggtcaggagtttgagaccagcctggccaacatggtgaaaccccatctctactaaaaatacaaaaattagccgagtgtgttggcgggcgcctgtgatcccagctactcaggaggctggagcaggagaatcacttgaacccgggaggcagacgttgcagtgagccaagatcatgccacagcattccagcctgggtggtgacagagtgagactctgtcacacacacacacacacacacacacacacacacacacacaaaaaaaatagaattgtgctccccaaaaggagacaccacgccaaggcgaactccatattaacactttatcctgatgttggagatatgatgggaagagagagggttgtagtagaagcaggatgtagtgaagggtttgttttcacagagtggacattaggctcggaggtcgggtgtcttgtgcagcctagaacccagagaacaggcccaggatgtaaactctgcaactgagtaacctccaggaaaaatccccaaagaagtacatgggggacagcggacagcctgcagagcccagagct[450 bp omitted]ggcacagccacaaccaccttgcaggcctgtcttgaagcttcgaggagtctgaagtttgcatgtggcccagcagttggcacttagtcacaatagctgttgattggtttcagtgctgaatttctaattagggaaatcgtttcccctgggtttgctaggcttggtggcaaagtcagagccaagggttttacagacgctgagacatgatgagggagacagctttgcgctggaaggggcaattccattctcaatgagtcccagtttatccagaaacccctagcttcctggaattctttttaaaaccccatgactgagcagcaacattcaaacagcatgattttttttttttttaacacggggtctctttctgtcactcaggcttaagtacagtggcaccaccccccaggctcaggcaattctcccacctcagcctcctgagtagctgggactacaggtatgtgccaccacacccagctaatttttgtattttttgtaaagacggggtttcaccatgttgcccaggctggtctcgaactcctgagctcaagcaatttgcccgccttggcctcccaaagtgctgagattacaggtgtgagccaccacacccagcctgacttttgtaaattgacagataaaattgtatgtatttattgtgtacaacatgatgctttcaagtatatctacattgtggaatgactaaagctagcgtcatctcacatagttatcgtccttgtggtgaaagtcaaacaccgtgatttttgctaacaatgaattcgcttcctaaaaacttaccagagagcagggattcgaggaaggaatggctcattttgagtagggaggaggagcaagaaaggcagctgctggaaagggcatggctggtgccgcatgtggttgaatggaacagaaccaggtgcttgctgctttctatcctcagcaggcaagagggagggaggccggaatctctgcagatccagaagccagacccagtcggggagactctgagacgtgaaggtcaggccagggtctcccccagaaaccagtgggtttcttatcaaggaacagaaagaatgtttccctcccaccactggttgagcactggactgggagcaccgtgactcccaatttcatctctgaaccgggcaggccagggctgctccagtcagagcctcagcatcttcacctgggcggaattaggttctgctcaaatcggtttgggatttgtcaaccccaaatccaaagagcagaggatttggggttcatccacggtcctggttttgaatcccagcttcggtgctatagccttggacattaatctccctggacctttgtttgtgtacaaaatgagggtgatacacttgtcatgttgcgatgcaggggctgggacagcacatgggacagcctaagtgctcaaggagttacttcctgagcctcggttttcccactctttaaatggggctaggaacgcctctctctgggctattgtgagggtcaaagtttatgaatgagcgtctagatgttaggatacaggaacagctgcctcccagccacgttcccaacaatacagaagctgaactcagtggttttcaagatggattccccaaggcaccccaggggccaccaaagggtcaaaagacaagctggtccccaagccagctccaccccagacaacgctgcttgtacctgttttacacatggggttctgcatgggattttgtttcaaataaagagttctatttttttaacatttcatttggaaataatttcaaacttcaaaaactctaagaatggaaacaggacacctgcagaccctttgtgaattgttaacattcaaccccctccgcttcatcattttctttctttcttttttttttttttttttttttgagatggagtctcactctgtcgcccaggctggagtgcagtggcgcgaactcggctcactgcaaactccgcctcccgggttcacgccattctcctgccccagcctcccaagtagctgggactacaggtggctgccaccatgcccagctattttttttttgtatttttagtagaaacggggtttcaccgtgttgcccaggatggtctcgatctcctgacctcgtgttctgcccgcctcggcctcccaaagtgctgggattacagcagtgagccactgcgcccggccattcatcattttctttctctctctgcatacataatgttttgtctgaatagcgtaagggtaacttacatacacctgtgtcctttaccccaaacgctttcctaggtattttgtggcatgtatgtatgtaacattacataactcttacatagccacggtggagttgtccgttgcataaatttatgttaatacagcatttttgtctaaactttcaggttgtcacttgacctaataaggtcctttttagaatttccccctcatgttcaggatctgatgaagggttagatattccgtgtgcttgtcatatgtttttaacctcctttaatttggaatatctcatatctgtggctgaatgatggaaatagaatctgaggagtgcgtcattagacaatttcattgttgtgcaaacattttagagtgtactcacacaaacctagatggcacagcctactatacacctgagctgtatggtatggtccattgcccccaggctaccaccctgtacagcatgtgactatactgaaaactgtaggcagttgtagctcagtggcaactatttgtgtatctgaacatatctaaatgtagaaaaggtgcagtaaaagtctggcattatgatctcatggaaccaccgtcatatacgtggtccatcattgaccaaaagttcattatgcgttgcgtgactgtatttccacagcctttgtctcttttttttttttttttttttttttttgagacagagtctcgctctatcgcccaggctggagtgcagtggcgcaatctcggctcactgcaagctcctcctcccggggtcacgttattctcttgcctcagcctcctcattagctgggactacaggtgcccaccaccatgcccggctaattttttttcgtatttttagtagagatggggtttcaccatgttagccaggatggtcttgatctcctgacctcatgatccacccgcctcggcctctcaaagtgctgggattacaagcgtgagccaccgcgcctggactctttgtctttaatgatattgatgtttctgaaggatactgtttttttcccccacccccaccttttcttaatgaaagttcctcattttgtgtttgtcagatgtttcctgatgattagattgaggttatgcagtcttagccagatcccaactgacttcaattctgactttgacgttcagcaattttagaacgaggtcccagcattcaatcataccttcccctggcaggtgatccgggcagctgtgtagtctatggccttgctacccgaggtgtgctatgcagcccagcagctctttgttgagccctgggagctgtgagtgaccccacagagaggcagactccagcccgagtcccgcctacctccaccactgacctacttcctccaccactgactgctttaaacagaaaacagccctccctgtccaccactcctgacttccatcctgcctagccctgcctctagtcttcccagccccctcacctccagggaagatgcctcacccacctgcctcattgctatgatgcaggcaacagtagcttgatgtggtaccttcatggcccgcttgaaaggggaataaaatagggcgggccgctagcaagacctgttggaacagcgaggaaaggggtaaacatggagacacaagatctgggttaactggccatgctatcttctccagaaagatagggccaggattaaacctagtatcagctcactctaaagcctgtgcttctatcacggtgccagtggccggcctgggaatggaccccaagcttcagaatcctggtcgagtgtgtcttctcctgtcacaagtttagggccctgggttcggcaaattggggagttcacggaagcaaatggctttggataaactggccctccatcctggaatcaggagcagaccgggattcttcatggacttcatgaggcttggtgagagcagccagaacttctagattcatctcttctattactttgacaaagaagtcattcccacctccttgatgtctaagactagtcattcggagctggtcctctgctggggagaaacagactcaagcccaagaaacctcttcaagatgggagggggagaaagacggtaggggtgcagtttgggaaccttctaatgtgaatgccgagcaggaggcatcccagagggtactgatggccagaggctgccttttcagctccttgagtagtctatgtaaacaccctgataccacccacgtgagcttctggaaacagggcctggctcctaaccccagggggatggagcacactaatgaccaggtggtgggacgtgggggccaaccgggtggtgatagattcccaggtcccctgccatccacttccctggcagagaccacagagtcaagagtccacagctggttcaggcaggggcagccgcagaggaattggatgggaggggggctcttgatggggaccccaggggtatggaataatgggccttgtgacattgacggggtagagaggacagggagggaggtcaggctgttgatttttttaaatctgtgtttaaaaaaattaaactgggctaggcacggtggctcacgcctgtaatcccagcattttgggaggccaaggcgggcggatcatgaggtcaggagttcaagaccaagaccagcctgaccaacatggtgaaactccgtctctaccaaaaatacaaaaattatctgggcatggtggcgcacacctgtaatcccagctactcaggaggctgaggcaggagaatcgcttgaacccaggaggcggaggttgcagtgagccaagatcacaccattgcactccagcctgggtgacagagcaagactccgtctcaaaaaaaaaaaaaattaaactgatttttgatgatcaaagtcgctcatgtttattgttgcaaattgatcaatagtctgttggtgaatttctttctagtctttttgaaataactacagataggtaaatagataattggttaaggaaacatttgctgctataaacatttgctgctatttgatgctggataagccctctcatctctaactcaatagaagtgtacttctcactcatgtaagtccaattgcatagaggaggtttggaggtggagggccatgctccatatggtcattcagggatccatgcataggaagacttcctaggtctccctagggattgacatccaggtgacaggaatgggggggcatctgaaagagagctaaagagagctttccttctccaaaaggttgtaactcacaacctcgcttttttaccccacaacacaaatggagtgcaggccccctaagatgtcatgttctgaggcttataggacaaaatcccctcctgtctttcataataattgtgtctagcatttactagtccatgctaatcaccttccatctgtcttgtcatgtcatcctcacaaccactccaggggatgtggacactgtgattatccccattttacagctgaggaaactaaggctcagtgaagttaagtagcacgcttagggtcacacctgatgagcaggtgagtggttgacctgagacttgaacccgggtcctttgctgaaacccagggccctctggcctctccagcctgcctccccagggcatcctgaggtcagagatgacctcagaaaagacagacacaagtcatggctgagttttgcagtgcctccaacctcatgccttttcaagccagagtgggacttcatggcttcagacctcagagcccacagcctgtgtagctgactggcttgtgggctgagctctctgaagagaaacccagggagctggagtgttttcctcagggacacagtgtagctcagagcagaactgagacttaaccagcatctgtgcaaagtgcaagcaaccaaacagggtagcttcaaggagctcagtgggagagagggggctgggttctaatctcatgacagccacagacttgacaagtgacctccagccaagcatttctctgccgaggcttcagttctttcatctgtgcagcggacagttcagactagatcagtagttttcaaactatttccaggaaactctctaggggccacagacatagctgggggccgccatgggaacagtggagggacatagttgaaaggagatgagcaggccagctctgctgccccaccctgagtcaaccagagaagctgaactgtgcataaggtacccattactaaaggtttccattgcaaacacagatttgaagtctactgttctaaatggcctctacttcctgctgtcatacgtttttatcaaataaattcattcattcaaccgttcaacaaactttttttgacaatgcagatgttaagaacaaaacccagaagacccagcccatgtttttaggatgttcacaattcaagctaaaaacaagcattaaataagcaagcatcttgcagtgtgataactgatattcattcatgcttttagcaaatatttttattaaacacctactatagaccaggtaccgctgagatgtcagatataaacagtgaagaagataaggtacctgcccgagtaaaactttcattcaaggaggggagataggcaataacaagtaaacagaaatgcaaaatatatcctccaaggtgaaacgtgcaactggggtcgataaagcagggtagggggtctgaggagtgttggaggagtttgctgtcctgggactgggtggtcagggaaggcctctctgagttaacgtgtgatattgactttcccattctgcaatgccaggactggggagagccattacaagggcattggccttagctgaggaggtcttcaaggaagacttctgggaggaaaaaagtggctctaaatgggaatcatggtggaaagcgagggccagggcagggcacagtcatgagcctcctgctgccccagtgttgcagcatcagccactggctttcagtaagagcccagtcaacaaatgggtgccctgggtgggggtgaggtggggggtagttttgataagatgctcagtcctttcctctccatcagcgtctgcaaactgtggccctcccagccaactctggcctaccacctgattttgcaaatagttttattggaacacaacccatatccatactcagcatctagggctgcttatgttctaagggctgagttgaatagttaggccagagaccctgtggcccctgaaactaaaaatatttactttctggccttttacagaaaaaaatttgctagcccctcttttagacaatgcttcctcaccctgtcactcaggctggagtgcagtggcacaatcatagctcactgcagcctcaacctcctgagctcaagcagtcctcctacctcagcctccagagtagcagggactacagatgcatgccaccagacccagctgatttttttttttttttaagtagagacaaagtctcactatgttgcccaggctggaattagggcctttctaatcttcactgtctgggtgacccagctgagcacctcttcagctcattttgatcttaaagagagctttccttctccaaaatctcccagtggatgaaatatgcataaaaccccagccagctttttgaaatgtgatcagctacctacagatggcaaacagatgtgacttggcaaaaaagaaagcagaaatcaccaggaagtggaggctgccgccagcagggcatttgaatgcacagccaaatgggcgtgatctctggtccacccaagacagatgttcagctcacaggagaagtattttgcagctaacatcccagtggcacttcctgaggctccgatgtgctcagggcttagccctgagcctggggttccaggctgctcaggaaggagagggcagccctaactgccaaaatgttgggctgggacccagtgcgtttaaacaatgcttgaagcttgtgttggtccatgaggagctatcatgcctgtgtggatactttctcaccaacgtcaacagccagagacccagattctagtcccagctctgctattgaccagctgcagggctttgagcaaatttctcccatctctgagcctcaatttcctcacagtgtggttgggcgtgataaactaaagccaatggtgtgctggagtcagctcgcaccagctcgtgggagctggctgtgggcatctatctcttcccagctctgtgttcttgttggtagcttgacgttggaaattgtggaaatatttagatcatggaaattggcaaatgctacaaatcaaggttgatttttttccttcagagagccagttgttaagcatttcccagcacatcactttctaaggcccacaggacatcccagtgtctatgaccatgaccctacccctggcaggacagagtggcacccagtaagaacacacatgggacatagttcagtccattgtcagcagcctacgtcccaagcctgtgctgggggctggaaaggcagtgatgcgagagaggctcagagagggttagtgactcactctggctcacacagcctccatccatgccctcagcacactcacgatgtgaagaagggggcaggctctgaatcagtcaaggcatatgggagccagagcaggaactgtccagctgtgctggaggatgtgggagagcacaagaagttgataacgggaaggtagggagggggtcccaggagggggggaactgcgtgtgcaaaggcctggagaggggagagtgcactcagagttcagggaatgggccgtggtgcagcccagtgggatgttatgtgggagggtgatggaggcagaatgtcatctcaagttggaagatggaaagtagagtaagcaccagtaaccctggggcagcccaggagggcttcttggagttggaggaggcagatcttgaaggatgagtgaaattagtaggaacgtgggattgtcggtcaagattcctcaaggaaaacatggggagaagagcaggtgaaggaccttccatagccaggggatacaaagccacagtcctgggccccctcccttcctgccccctcatacccacatggccggccccgaagtcctcagacctagggccccatctgggccatcctttggccaaaagtcattactccctcaagcagggtttctcacccgtggccctgtggacatttggggtgtcctctgcatcccaggatgtcatcagcaccagtgttgctggcccattttgcagatgtagaaactgagtgtggccagaaaggcaggtcacaaggggccgcattgtctaaaaaattaaacaaggacgggccataagcagaatccacattcactggacaaaagtgactggaggcatccatggtgccagtgttatactgcaggagccaggacttagagacaaggccgcccaggctatgaggcaagatgggaaatggagtctttatttggggtggccctatcctggctaaaagtcaggagtgctgttactttgaaaatagagactggggccgggcgtgcggcggcttacgcttgtaaatccagcactttaggaggctgaggcgagcggatcacttgaggtcaggagtttgagactagcctgtccgacatggcaaaatcccatctctactaaaaaaaaaaatacaaaaattagccaggcgtggtggcaagcacctataatgccagctactcaggaggctgagacaggagaatcgcctgaacctgggaggtgaaggttgcggtgagccgagatcgtgccactgcactccagcctgggcgacaagagcaagactccttctacaaaaaagaaaaagaaaatagagactggagaatgcaagaggaaggaaagcaaccactagtctctgttactcacaccaggctagaacagactgcgcaggcaaggaacacaagacctcctggtcggctgaatgtgaccctgaaatcacaagccctggcagggaggggagacacttgccttaggggcaaaatgtagggggatgcccaagaaactcaaccacaaagataaattatatatatatgtgtgtgcatgtgtgtgtgtgtgtgtgtgtgtgtgtgtatacacataatttttaaaatgattcagtggttttcagtatatttgcaaggtcatacaactaaaactactccaattccaaatcatttttatcaccccaaaaagaaactcggtacccattagcaatcactccccattctcttttctgcccagctccaggcaaccactcatctgctttctgtttgtgggtttgcttattctggacgttgcatatagatggaatcctatgtcctatcatacgtacaatatgtggtcttccatggctggcttctttcacttagcataatatcatcacggtctatcaatatcacagcagccaggcatggtggctcacgtctttaatccagcgctttgggaggctgaggcaggtggatcattgagcctaggacttcgagaccagcctgggcaacacggcaaaaccctgtctctaccaaaaatacaaaaaggaaaaaaaaaatagccagtctcataacccggtctcaaaaaaatgaacaaatatcaatatcacagcatgtatgagtagcttgttcctttttattcccaaagacttttccatggtgtgcatgcaccacattttgcctgtgtatccacaagtgatggacaagtggagccatctccacttcttagctattatgaccaatactgccatgaacatttgtgtgcaggtctctgtgtggaaatatattgttgtttctctcaggtgtatatataactaagagtggaactttgggctcatgtgacaagataagtactattttaatgcagtattttttaaaaaataaaaattaatgcaaagaaaagccatgatgaacaaaatatccacttttttttttttttgagacagagtttcactttgtcgcccaggctggagtgcagtggcacaatcttggctcactgcaacctctgcctcccaggttcaagtgattctcgtgcctaagcctcccaagtagctgggattacaggcttacgccaccactcctggctaatttttgtatttttagcagagatggggcttccccacattggccaggtcgatctcgaactcctgacctcaggtgatccgcatgcgtcggcctcccagagtgctgggattacagacatgagccaccgcgcccggccgccacatcttcagtgaagtcaggctgttgtctgttttatgatcctgcactactgtgcaacaggagcagtcatttccaatcagcctgcagtttccaggcccacatacgtttgtgacggctgacagtagaaagcaaacagattggcaaccagattttagatacagtcgttgtttcttgagtgtagtgcgtttgttaactttttccacctggttcaaaatatgagaggctattttgataaacacatatggggcacgcagttttccttttgcctcaggctttgctatggctctgaccacctgtgccgtttcaattaatcctcaaacatcctcgggcacctcgttctccaacctccctgccgaggtgagaggagggaaggagcttgctacggtccacagctggtgagtagtagagctgggatttgaacccaggtctggggttggagactcggccttcacaccgcgcctctcagcagtgtagcgtgcagttgcccaggagggtcactttagctctctgaagtcttttattcaggcaggaagcagcctcattgttacaaggacagatgtgaatgtgcagagctcactatgaaatttgacaacctgggcaacatggcgaaaccccatctctaccaaataatatacacatacaaaaattagctgagtgtggtggtatgtgcctgtagtcccagctactcaggaggctgaggtggaaagattgcttgagcccaggaagtcaagattgcaagtgagctgagattaaaccaccatactccagcctgggcgacagagtgaaaccctgtctcaaaggccgggcgctgtggctcacacctgtaatcccagcactttaggaggctgagacgggcggatcacttgaggtcaggagttcaagaccagcctggccaacatggtgaaaccccatctctactaaaaatacaaaaatcagctgggtatggcagcgcacgcctgtaatcccagctactcaggaggctgaggcaggagaatcacttgaacccgtgaggcggaggttgcagtgagccgagatggcaccactgcactccagccttggcaacaagagcaaaactctgtctcaaaaaaaaaaaaaaaagggaaaagaaagttgcctcctccctcccctggaagtgcttgccatgagctgcacctgacacaatggtaggaccatcatgagtcaaacatccatgtgtgtgataggaacttgccaggcatgtctctctatgtccccaaatgaagccacatgtgaaaattttcttttagagctaagagttagaaaaataatttgattcccccaagaaataggtatattttttcttcatggacagtgagaatgtaactgttttcctttttgctttggccagcaggaaactcaaagccaaatttgctgctgtaaaagagtagttgtgtaggttcctgcttatttgcatttttatgtttcctatagtatcatccctctagtaatttatattggtactgatggttttcaaatttttatttagatgttactgttttatcaggtgtatttcctgatggtccctaaatcctttgtaaacatgtcaagtagaaacacactttttgcaagagctatacattgcttggcatgtgcttggatggattattaatctcacccaaaacacaaaggtagcagcactggcatgggttattctgcggtccacatccagacctggtaacccccggctgagtctggagacctttgcctgagccttggactccctttggttagaggaagtgagaaggtgggctggggaccaggcgtggccattcccaccatgcacagctgctcaccgaagcttcatttctccagtgcacttgcagagtctggctagaagaccagccaagggcctgcaggaagattctattctggtcagaattctccacccacagttccagccttgggctttgcgttgccaaatgggcaatcttcagggccagccaagagccacactggggaggtatctttcggacccaccttccaccctccttcctgccactgttcctttatagagcgccctccatctgccacgcaaagtgtctgttgctgtcaggatgctctgagccctgtgaacatctccctcaaaggcagtagtgatgagatgatacttcgaggggtctttacgttttaaaagaaggccttaggaaagggcactgtttacgccaaaaaaaggaagaaggctgaatggtgacatttcaggtctcgtagtgtctgggtgaggaagaggtttctgtttcgcaggtgggagggagatgtatgattcgtggggatagggaaccttgccaggagccatgaatgcttctgggtgggtccacgaataaatatgatgtgaatttgtctgtcaagcaagcagcagggggcggtcatggagagggaggactaggaaaggggaaggggtcagggtcttgctccacccagccgagggcactttctcagttccttcttcctaaacttggactgtttctcgggcctcctgaggaggctgctccctgggtcctctctgtcctgagagtcatgagagagcaggaacattcctcttccagggatcgccatccacactcagcaaaccactgtcccctaccctgggcagagagcatctcacaaggagagcctggaactcatctccctctgcctccttcttcttcccagggaagccctatggggcggatgacttcctgcctgtgctcatgtatgtgctggcccgcagcaacctcacggagatgcttctcaatgtggagtacatgatggagctcatggaccccgccctgcagctgggggagggtgagtcaccaccccctgcccatcaggtgcattgcacacccccaactcagccacgccacgggcactctaggtggcccaacaagcacctcctggataccagactctggctgagctctggacccatggatgcaaatgtgaatcctacacaggtcctgtcctgcaggagctcacagattagggggagagatgagccagtcaagagactgtgccacctccacgtaacaagtgctggaatagttggaatcccagaaggcataggagcatgttacccagactgtgcagtcagggaaggcttcctggaggaggtgacatctgagctgagcaatgaaggataaataggagccagctgattaaaaaaaaaagggaaaaggcagtctttgtagcgggaacagcaggaggtagtagtataaaagaaggggctgaagtggcaggcagtgctcacagtaagagtctgagagacagtgacaatcagttcttagacaggggtgacccccagggactctcggccccttgctcataagccctgggtcaggacctccatcagtgggaagttaatgatatgagtaagaagccctgtgctccccaataggatgaaggcagaggtgtggtttggtccaccccatgctcagtttcccttcccctttcctccttcccaccacatcctcccacccacttagcctcagccacccatccaccaagaatttcctgaggggcagccagtccagatatcagctctgagggagccctgacttcccctctgagacatcagcttcaaaggagggaaccatcctcccaggccctgagggttccccttgggctttgtggttcttgagatgagcagaccctctttgtatctgttcgcattttttttgcatgttccagtctctggggtgatagtttgatgagatagttccatgagttgttgacagctcaggggagcgtgttaaagccatgacgtttgctgtcatatataactttggctagtggcactgggacctctgtatctaccttttttttttctctgtagttaaaaatgtcctgtaatgggaacaagttgtcttctaggaagtccaggaattcaagagaagccaaggtttcttcagcaatggttatctgctgcccagtgtagccatatatccatccatctattcatctgtccatccatatagccatccatccacccattcacctacccatccatccatgcatccactcatccacctacccacccatctacccatccacccacccatctacccatccacccacctatccatctatccatctatacgtccacccacccatccgtcatccatccatgcatccatctactcatccaaccacctacccacccacgtattcacccacccacccatccacatattcagctacccatccacatttccatctacctatccacctatccatccatctacccaccaatccatcattcatccatccattaacccatccacccatccattcacccatccatctatgcactcatccacccatccacatattcacccagccatccacataaccatctacccatccatccatccacccacccattcacccatccatccatccatccacccacccattcacccacccatccatccatgcatccactcatccacctaaccacccacccatccatccgtccactcatctgtccacccacctgcccatccacatattcacccacacacccacatattcatccacccatccacatatccatctacccatccccctacccatccacttattcactcacccaccaatccacatattcgcccaccctccacatattcattcacccatccacatatccatatacccacccacctacccatccacccacccacccacccacatattcaccacccacccatccacatattcgcccatccacccacccacatattcactcatgcacccatccacatatttgcccaccctccacatattcatctacccatccacatatccatctacccatccacccacctacgcaatcacacacccattcatctaccatccatccatccacccgtccacccatccactcatccactcgcccatctacccttccactcatccacccacccatttatccatgccaaacacatgggctgtggtgtaggacaagacaagtaaggctgatagccttgtgtgaatgaatgaatgcctcattctgcatcccacattttgggacttctacctcatcaggcctttgtgggccttcttccttggtttccccaaggaagggaagctctcagcatgcacacagaagaaccacaggcacggtggctgagcaggaaaagggcagggacatccttgggccagcagccctctcctatggacttgcgtcccccaccccaatcctgccatggcctcctgggatccttcttcctgttcccagaagcctaggggatttgggtgagaaagagagaagttctcgaggccagagagcatgtcaattctgggctacttcaagtatttggaggacaagccaaagtacaaaaaaagttcataacggtgctaaacagttcctagattctgaccaaggctgcctgcatccagcccttttgtcagacttgagtaggcagagccccccaccccacctctggccccatagagagggcagagggcacactgtccctcctggcagccctgtctgaccacggcagtgtcacaccttgcccatggcagctccaggagccagaggacaaacccacaccacgctgtgcacaccagcaaggggggtgggtggcacgggcacatccctgcacctctccctgccctacttcaatagtcagggtgtgggaggtcacagcacctaggacagccagccttgcaggtgtttgcctctggcatctagatgaccttggggctctccagcgagggcaggggtttccacctttcaacagcctggacacttcatctcaatggatctgggtcccagggcagaggggcaagggtgaggtggtgtttctgagtttctctggcttagccctcctggcttagtggggtggtggtgcagaggtacctgatcacctcaacctctgtggtgcaggtggggagggagactgagccctgacagagctcagagatgcttagggtgggaggtgggggttcccagaatccccagactcttgggaacttaagttgctagaatctaagaaaactaacacaaagtggagtaaaaagagcagtttggaggctggatttggggcccagttctgcctctgactggctggaaaccctgggcaagtcacctaacctctctggcttgcagaagtgaagacatcaagttagattggcagttttcaaactgtctggatgctctcgtattctgcagtggtggcttggtgttagtttgtttgggatgcttaataaaataccataaactggataactttggaaccatggaaatgtatgtctctcagttctggaggctgggaagtccaagatcaaggcaccagcagactcagtgtctggtgagaaccccactttctggttcatagatggtgggttcttgttgtatcttcacatggcagaagggacaggacagctctctggcactttttttttttttttttgagacagagtctctgtctgtcacccggactggagtgcagtgctatgatcttggcccactgcaacctccgcctcccaggttcaagcaattcacctgcctcaggctcccaagtagctgggattacaggcctgcgccaccacacctggctaatttttgtatttttagtacagacagggtttcaccatgttggccaggctggtctcgaactcctgatctcaagtgatctgcctgcctcagcctcccaaagtgctgggattacaggtgtgagccaccatgtccagctggcacttcttctataagggcactaatcccatttatgagggctccaccctcatgacctaatgacctcccaaaggccccacctcctaacaccatcacattggaggttaggatttcaacataggatttgggggtagggggacccgaacattcagaccttagcacatggggcaggatgagagatggagctgggccctgccttccagtgttttgtagttcaggtgagcaagccattctgtgttcgacagaaagcctgcaagttggattctgtgcaccttgggaccttcaaattctctcagcctgttccacgtgctgcagtttagcaaaggatgggccatggggtcttactttccttgcagcaggcgtgtggggcaggagacatcagggacttgtgcaaggaagggcctgagtgccagcttgctgggacccccgccccctttctagcctctctcttgtgttcccactccccccaccccctgcccctgtgaagtcatgggacagacaggtgacccaggcagctgctgggcaccttgctggagccagcccagaatcttaacctctgctaaaatcctggctaggctggtcccaaaagtgccctcttggacccctttgcccatgtcccttccctagtctgcctgacagctggccatgccgggctggtgtctttccaggggcagtgggtttttccaatcaacgcattcgccccagagagaaaagcctgctccagaactcacggtagggccgcctgccacctagtggccctggcaggcatttcatggccccaagtcaaagaggaaggctggcagagagagaggcctcacgaagaagtcagactccagcaccaagagtgcagcagtagggcgtggctgctcccctttcacctgcgagggtgagacacccccagagcacctccctgaggcctcatagccaccatgcgttattcacacattccgaagccctgtactttacacatactcatttccttttcacaactttatgatgtttgcagataaggaaactgaggcatagagaggccattagctcacctgaattacagggctggctgctatggagcaaagacctagatcctgttctctgactccaaaactgaaggtttgcagtcagcacactgcactcacctcttccattcccagccaggaagacataagccagacaggaaacaggacgactgagggatgccaggtagaggacgtggacttggggcagcaagggctgggggcaccagagccgacttcctggcctggggctttaaacctaacttaaaatggagatacgtaagtgatttagtggttcttctcttattagggacaccaaggcaacctctgtggtagctttaatttagttttttcaaaaaatgtctcttatttatttttatttttttttaatttgagatgaagtctcactctgtcacccaggctgcagtgcagtggcctgatctcagctcactgcaacctccgcctctcaggttcaagcgattctcctgtctcagcctccagagtagctgggattacaggcacgtgccaccatgcccagctaatgtttgtatttttggtagagacaggatttcgtcatgttggccaggctggtcttgaactcctgacctcaagtgatccacccgtctcagcctcccaaagtgctgagattacaggcgtgagccaccacacccagccatctcttttctatactgctatgaaagggtgggtgatcctgtggccataaacccttttatcttacccacccccgcctcaccacctactggaccagggtgtgaacttgtcccatattggttgtagaactggtggagatgtgtgggccagcttcacccaatgtaacagctaggaatgctttgggctgcacgtaactcacaaaagtaactaatagtggtttaagtcagagcaaggaattggtttgtctcttgcatcaagaagtccaggcgaagcacctagtaaggatggcattttgcatccagggaactatgggcccagctctttccatcttttcttagcatgtggggcctttggctttgtgtctgtcacctgtgatcagaagacagctgcagtgcccccagtaatgcgtctgggttccaggcagaaggaagggtgacaggcagaaacccaaagggatacatccactgagtctgtctctttcaaaggctttcctggaagccccacccagccttccacttatatctaaggggccacagcagagtctcctgcctctacccaagctgcaagggagtcagggaagtgagcatttcagttgatgttacttccccaaataaaagcacagttcaattaggtagaaggggcagacgcgatttgagtggggcactagcagaatctgcctcatgtcaaaaatcatcatcctggccaggcatggtggctcacacccgtaatcccagctctttgggaggccaaggcgggtggatcgcttgagctcaggagttcgagaccagcctggccaacatggtgaaaccgcgtttctactaaaaatacaaaaagttagccaggcgtggtggtgcgtgcctataatcccagctactcaggaggctgaggcaggagaatagcttgaacctgggaggcggaggttgcaatgtgccaagatcacgccattgcactgcagcctgggcaacaagagcgaaactccatctaaaaaaaaaaagaagaaaaaaatcgtcatcctggcactggaagggctgggcagaaaggcctttgcagtggtgggaaagcccaaggaagcaccatggaggtgggcggcgctggggacccgagagaccagggtttccagggtctccttgccctcctctgggcccttgatctctctatgaccttggccaagccaccttccctctctgggactcggttttctctctctaaaatgaggagcttaccaaagttagtatttctcaaaccttttaaccaaagtcccaaacaagctcaggagaatgaatttgtaagcatcgtgtaaaatattgccttttatcttaaaagttcatgaaaattttgcagtctgaagtatctcaaagcttaaattactttaggaaacattgtgtattaagaatatgtgtgaggccaaggcaggaggatcacctgaggccagaagttcaaaccaacatgggcaacatagctagaccccgtctctatagaaaatgtaaaaatcagcctacaatcgcttgagcccaggagttggaggctccagtgagctatgtgtgaattaacttaagaaatggatacataaatgattcaaattttatacttatttaaaatctttaaaaattgcatgtaatagtataaccataattaaaatttcctctcttcttaaaaattatttttagaatagataatgcattcacatggctcaaaattctaaagcatatcaaagttccttaatttatgagggtgtgtcctaataaacccatcataaattgaaaatatcttaagttgaaatgcatttaatccacctaacctactgaacatcatagcctagtctaccttaaatgttctcagaacacttacattagcctacagttgggcaaaggcatcaaaaagcctattgtgtgtgtgtcaaaaatcaatcacacagtccagccatggtggttcatgtcagtaatcccagcactttgggaggctgaggcgggcggatcacctgaggtcaggcattcaagaccagcatggccagcatggcgacaccccatctctactgaaaatacaaaaattagccaggcgtggtggcatgcgcctctaatcccagctactcaggaggctgaggtaggagaatcgcttgaacgtgggaggtgcaggttgcagtgagccgagatcacgccactgcactccagcctgggcaacacagcaacagagccagacttagacaaaaaaaaaaaaaaaaaaacctcacacaaagcatgttttataataaagtgttgaatatctcatgtaatgtatcgaatactttactgaaagtaaaaaacaggttggttatatgggtcctggaagcatggtttctactgaatgtgtatcactttcacaccatcatgaagtcaaaaaatcataaatggaaccatagtaactcagagaccgtgtatatgtgatacacacacagtgagaagtctcctgcccaccctgtctcctggccacccctttccccacactgaggtttctgtttcttgtgtatcctttaaattttttattgttttaaaaatcattttttaaataagcaagagtttcgtccccaaggggagccagtgaaaagttttgagcagggcccagacagctcagggctggactctaggaaactttctgaggctggagggtgggcgtggggttgagctcagctgttgaagcaggtgtttgcagatgtgcctcaagcagaggtggtgggcggggcttggaggaggtgggtggggcaggccaagctccttgcctctggtgggcggaggcggtcctggctcagattccacacccttgtccacgcaggttcctactatctgaccaccacctacggggccctggagcacatcaagagctacgacaagatcacggtgacccggcagctgagtgtggaggtgcaggactccatccaccgctgggagcgccggcgtactctcaacaaggcccgggcctcccgctcctccgtacaggtgaggcctgagagcgggaggggcccggtggggccatgtcccagacaccatccctgctgcctgctggctaaggagccgtgacatcacctggctgctccagccgcccagccctgccttaggggagcagtgagactccccacaccagaggaagggcccccagcccctgctgccagtgtgtgtccaggacttgggtgcgtctagaaacatatcagcaggcattggtgttctccctgggcaagcaggaagggtgcaggaggaatgagacacacccatcattccttagcccctcctaggacccagcaccctgcaggggctggagatggggacttgtcatcccagtccctgctttaaggagcccacaggctcatctacagccttgctccttagtccctggacaaatgcagcagctgccaagggtctgcgtaacccccaccaacccagtggcccacccctccccatacctctctctatacagactcagtattcaaaccagtcccgcccctccccaactccatcaccccacccacccccaggctgcatcaaatccagctgcccccagttccccaaacatgcccagcccagttcactggctgctcaaccgctgccctcactggtcaatctccccttcttcactggctgtcactgcccatcctttaagacgactcagtttctccaacagcccctcctctgagaagccttccctgatacacacacacaccgtttcacacaggctgggtggggtgccctcctctgggcttcctgcggcctccccttttacagtgcatatcacatcctatcatcctctgcatatgaagctgtcacctctgggagggcacagcccatggttcacatgcctcaggggcgccaagcccagggcctgggacagagcaggactgggtgtgtaaaaaagggtgagagttggactagtgagccaggcacatccagagctgtgagcagctatgcagactcactcctctgacacccagagcagaccagtcctgagccacactcctggctttcaagatggtgcatctataataagcagagcccaggcctgggagacaggaggcttgagttctggccccagccctgtactagcttgctgtgtgaccctcagcaatccctgccccactctgggactcagttttcctgcccacacaggctgactatggctaatcaatttaataactgactctctggggagaaaacaaaagctctgattttagcttctgtccatttccatggtgtgagtcctccatggccaacttcaacttggcatcactgaatgtggagttggaaagaagtgtatgcagtcggctctccctggcgggtgtgagccagctccagcacacctctgttcccatcccctcccaacaccccggactcccacagactgtagggacatggacactcttggtccaagcctggcccaggcatcccgtacttcctgcttctaccttaggggttcctgatgctgagccaggcagagtatggatgaaacggaccacccactgtttgggagacggaagcttcggaggggggtcccctcagcaccacatctgggatctggggagggcaccaccctctgccccctcccagtgcctcctccgcacaccatgccttggggggtgggcacccttccctggggaggggaagcccagagctggacagtcactagcaggtggatagtgccctgggaggcctaatggaggacaaggagccctgaggcagccactaagacggagggagtgggccgggcttttcccctcctggaagaaatgggcggtccccgtgaagctcttgacaggagcccggcctcgcctaagccctagccaccagttgccatcacggtctccgccgagccgggatcctcagccgcttcccgcgcaggcctgctgttcccaatccggccacaagggggcagccccgcgcgcagcctctctgcctgcagccctgagccccggggaaggcgaggccgctccgggccggagcttccagcgcctgctcgcccatttatgggaggcgggcgctatccccactttacagccggggctcgacgaatcaaggccacacaggcagtgggagcaaaggcaaagcccggcaggtgtggggctgggtccctaggggtggaggacggcgggcgggcgccctgctcgtgctgcgagtgcccagccccagcccgcaggcgtcgcctcgccttgcccgccctgctcatgccgggccttccccacccgactgcgcccagcctccttcacccggtcccctcccgctttaccaatccctgccccacgcagctcctcagagccccagggctcttgcagccctaaggggctggactgtgttgcccgcccgcactatgggatgcccgggcgggctcgcacctcccttcttatctgtgctgccctccgtgcccagcattgcgcctggggtgcagggaactcacctggagggagggagggagggaatgaatgaatgaatgaatgatggggagcctgtggaccagcagccaggggacgcgccggctcctctttgcagggactccgagacgcgccttaattcatctcccagaactgtcggcccagctgggaagccaggcagggagggggacgggccccccgcaggctcgcggcagagacgggaaaggcgcaggtgccggactcgcagacagcttggcgcccgccacccgctatccatccagggaggggcctgggccgggagagggcgcctgaggagacagggccccgccgtgaccacaggcccctcgcgtctccgcaggacttcatctgcgtgtcgtacctggagcccgagcagcaggcgcggacgctggcgtcgcgggcggacacccaggcccaggcgctgtgcgcgcagtgcgcggagaagttcgcggtggagcggccgcaggcgcaccggctgttcgtgctggtggacgggcgctgcttccagctggcggacgacgcgctgccgcactgcatcaagggctacctgctgcgcagcgagcccaagcgcgacttccactttgtctaccggcccctggacggtggtggcggcggcggcgggagcccgccctgcctggtggtgcgggagcccaacttcctgtgaggccctcccggggcgcctcccctcacccccaggcgcacgtctggccccgcctctggctgcgcactcccgaccgcgacgtccacgcagcagagggacatgggccattccatgacgtgcccaggccaacgtcgcaggacagttgtgaaaataacatgacgctcgtccaaggccacttcctgagggcaagtcctaatagccctgagacaccgagacggcatgttcttcattagacggaaagggaaactgaggctcaggagagaggcgctccaggccgctgcagccaacaaaccggcgccctcttcacacgtagctcctcaggccattccccatgagtcccccacacccaccccatcctcggtctttgcaaagaagggcccgagcttagtttccccaggactggcctaggaaggagcaccggccacagctgctccccgtgccactcagggtggacccagcatctcaggagcacctcagggtgtcggttaagagacaggcctccacccctgcaccagagcctgctcttagctcccggtgcccccagaccccgcagctctgtgcccggcaagaagcagctagacacacgccagggcgccaagcacggccagctccgcggacccatggacaagcccagccccgcctcagggaaaacagggcctttccctacaggacacgccccagagctgtggcagattgcaggagccatcgtgtggggagaatttaataaaagcccttttgaaaatgacatcttttctgaaggggctggagctctgcacagccagccccgcattcacagcctcacctccttcccgggtggcttcagaagaccccctctttgccatggggatcctgtcctctgccagaacctgtggcatactctcagccaccctcagcaccctcagcccttgggaccctggcccctgtcggcccgtcagcctcccaccatccttggctcccgtcatccccagcttaggatcagaaccatctgtcacctctcccagggataccattgcctgtagtatttgcctggtcaactcctatccaacctcctccaggaagctttttttttttttttttttttttttttttttaagacggggtctcgtcttgttctgctgccctggagggagtacagttgtgtgatcagggctcactgcagcctccatctcctgggctcaggaagtcctcccacctcagccccccaagtagctgggactacaggctggtgccaccacacctggctaatttttggtattttctgtagagatggggtttcaccatgttgcccaggctggtaggaagcctttcctaattccccaggttgggccagacagtcctcccatggtctgtctggcccaaccatgctcccacagccccctggacttgtctgtctcacaagagagagaccatcaaattgtaactatctaccgatgcctctgctttcccttttttttttttttttttttttttttttttttttttgagacagagtcttgctctatcacccaggctggagtgcagtggctcaatctcagctcactgtgcaacctctgcctcccgggttcaagcaattctcctgcctctgcttctcgagtagctgggattacaggcgcccgccaccacgcctggctaatttttgtattttcagtagagacggggttttgccatattggccaggctggtctcaaactcctgacctcaagtaatccagctgccttggcctcccaaagtgctgggattacaggtgtgagccactgcacccagctgaggcctctgttttctccaccagagttgcaccatttgtgtctgtgtcctcagcattgattggaagtaggtactcatgagtgcttcccacaggtcagcgctttgcgaggccctgagaaccagcgcagagctcatgtggagcaccagcatgagtggccctgagctgggcatccaggtaatggcagctggaatgggctgagttaaattcctgggcaccaaccagctcactcagccagtcaacaaacacctgttagactctggacctgggccagcacgatgggagctgcaaggtgtggtgccagatgcatcctggtcctggaggttggcgtcaccaatgttgaataaaaggcaaatacccagatggtgaggacacccagccatgatcccagattgccccccaccaccctcaccccaatccctgccaatgcagacagcactcttcctctgcttccaagctcccgtcggtcctgggctggcctgggcaacacagcctcattccccagctctcaggccagcagcaccctgccacctgctgggcctatgcagtctcacaggtgctggcagatgtccatacattcttcaaaacccatcttcaggctcataagcctggtgggaaaggttaggggattttgtttccccaaccaccctgtgggccaggtatggcccaggcttggggtggagctggggttcagagggtaaatgaggcacctgccctgctctgggttctgatgcctgcttcccaggaaggggacagagcttgccagtgggccggactgagggagccgctgtaagaacgtttatatgtgtgcatgcatgtgtgaatgtgtgtttgcgcgtgtgtgccaggccctccatcctgaggccaatgctggaattcacctgtcaggagaggccggcgagccctcgtgagcccccagagagcaggagaggggttatctggagcacttgtcatctggatgcctctgcccccagggagctgcgactgggaaaattggggggcctgacccaaggccaggagacaacataatgtgagcttcaggagtacctggccctggttagcgattactctgcatcattttatttaatccacaaaacagcctcttggagggaggtatttatggatgaagtcataaaggcccaaagaaagatgtattggtctgttagggctgccatagcaaagtgccacagaatggggagcttaacagacactcattttctcacagttctgaaggctggaatttcaagaccaaggtgtcgcagggttggtttttccggagacctctctcctgggctggcagaggccaccttctctcagggccctcactcagcctcctccctgttcacacatccctggtgtctcttcttataaggacatcagttgtattggattagggcccacccgaatggccttatttaactttatttatttatttttattttattttattttaagacagagtctcgctctgttgccaggctggagtgcagtggcacgatctcggctcactgtaacctttgcctcccgggttcaagctattctcctgcctcagcctcccgagtagctgggattataggtgcccaccaccatgcccagctaatttttgtgtttttagtagagacagagtttcaccatgttggccaggctggtctcggactcctgacctcaagtgatccattgcctcggcctcccaaagtgctgggattatgggcatgagccaccgcgcccagcctaactttaatcatctcttcaaaagctctatctccaaacgcagtcatcttcccattttctcagtcacagctccctgggggcagaggcatccagatgaaaagtgctccaggtaacccctctcttgctctctgggggctcacgagggctccctggcctctcctggcaggtggaccccagcattagcctcagggcagagggcctggcacacacacacacacacacacacacacacacacacacgtacgcgcacacacacatgcacgccctggggtgctgggggttagggctgcgacatacacatttttggagggacactatttagtccatagcaggggggacttgtcctacccatttcatgcgaacaaaatgagtctgaccctaaacctgcggctctctagcctgcccccatgccgcatcccaagtgatatatctgtagaaagccaaagtcggacaagccttggctgtcaaatcccagttcttggggaccctgcctgaggcagtggccattgtgacctgactgatgggcccaggatgcaactaatgagcccgggcatccccacagccccaaacaagggctgaggagtccacagctgggcgtgtgtgtgtccaagggtgacctggccacaggccatcatgcatggcggggtctgtctgtggctcctccctggcatttgtccctctccccatggccggctggctccctccttcctgcacttttagagtgcacagcctctgggtgagactgggccagcggtgctgggagaagccacccagggttttcagagagagaccaggcgtgcctggccctgtgcctccccatccccttggccctcccaggtggctgggcacaatgtcctgcctgccatgaaatgtcccaaactgacactgaagaggcctggcctgggatggccccacaatcctttaatggggtgtattgccttcgccccaggaatgagcaagtttcttctgtcagggtcagacccacaggtgaggtgggtagagaggaacagagacccaggggcagggggcagccagagaagcagtggggggggtcccctgggtgctgcatagacaccccttcccccaccccacatacactcacagatgagcctgccctccccactcatcagggcaaagctgggcacacatttgcgagtctggttgccaggtacccgctcagctggctgggatccagggctcagagggctcattggtggaggagaggaagcagctgtggctggcagcaggccttaccttcacaggaaggtcacatggagaagggctttggagagaaaagtgccacctcccagtggtagcttttctcctccccagtttgctgggaaatgctggcttccaggaaagctgtaccagaacctcctctttgcagcccacacagccctaagccagcaggaaactgaaatgtttgtcttcagggtcagaaaacctactcagcagtacagtgggaagaactgaactagagccagaagacctgggctccagcccagctgcaaaccctgtgcacgtccttaatagcttcatgcctctgtttccccattcttaaaatgagaatgcatattctatcctaaccttccaggtttgttgcagggatcctccaagttcctgggtgggggcaggtacgggaagtctcggatcttcttgaaaaggtaaatcaattcaaggctagcccatatgggcacagagggtgttcactgccaaagttgcatggctgaggggacaagtggagctgaaattcagtctatgtgccacttgtcagagcctacaccctgtcttgggcccacgtccactcagaggaagggacatcttttccaaatctgtaggaaggaatttttatggtctagagtgagaacaagactcaaacctgggggttgctgagccgtggggctacttccagttcaatgtgaccagcagaaggcacagtactttacaggtcctgcagaatggagggcgtgtaaccagcctggagcaaggaaagagggcgtcctgcagacaggggtgcctgcgctaggttttgaaggataacaggttggccagagcagacaggaacagaagaaccccttctagactatttgaagacaattctccatgggtcgcttgcatttctgcatgtatagtgaaaagtctttgacagcttttattccagactgtctttttaagagtacttgagtatctcagatgatccagatagtttctccctcctggaaagagagcagatttttcctcctgaccaggataataaaatcatacctctcactttggagaatagtgtctccctccagggcaaaacgcgggcaggagtgctagcagccttctctaaacgattgtttcccaagcttgagatttctgagccgtgacgggtgctcagcatccacccgggtccacctctgtgtaacattcagcggacctgacaggtaggagtcgtcaaagcaaacatgaggctcatgcaccctgctgcgccgtgagtcatagagtcctttgcctttgacactggagtctcatatctgccagcacctatgagactgcacaggctgccttgctagcctgcaagtgggtaaaaccccagactcctgacagttcttgacaatgaagaaggaagacagtgaaaaatcatggaaaaattaataagactatgcagtatgcaggggaaccagccgcttcaagatggcttaaacataaagcctgagacgagaagtgggagatgggcctgagtgagcaggctggaccgggccctgaatggtcttgattggcagcagacggagtctggaaatcctccacccgcatggaaccggattggaggggcgggttgaggcaggagaggctctgctgaatcctgccctggcactctggccaggaggggaggtctgaacagggaaaggggtgtgggatgggaggcagagttaagtttgggaaatgctgaacatggaaaatcagcagaatgtggtggccgactggaatgtgtgaaaggagagaaaggatcctagagaaaacttccagatttctggcttggatgctgtgatgaggggcggtgctatcagctcagcgagcggggaacgcaggctggagggcaaacaaaatgcatcagctttgggtgtgtggagtgtgaggggcacgcaggacaccaccatgtggggtcaacaggggcctctgtccctgttaagggtcaaatattctgcagaggggagggcgctcctgcctccaggaagtcctttcctgtctcatagcaagcacccgggccccacttccagtcctcctagctggcctggtgactgtctcccatgaaaggctgcagccaccgcagctgacttcatgacttgtcctgggtgaaatgcagtgaccagttctcctggggacaatgaaaacatactacaaagatgcccctaaacagctaaaaaaaaatgcaatctgctatgtccaaaagagctaagaaacatgaaaaaaattgatacaagatgtgtggtgcagtggtgcgtgtctgtaatcctagctacttgggagtctgaggcaggaggatcgcctgagcccagttcaagaccagcctgggccacataacaagaccctatctcaataactaataaataaataacgttaaagacatgaacaaataacctaaattggaattaggaaaacttagaacttagataatagaactgaggaaaaaattagaaagaaaagaatcatttcagaaataaaaactgagaaggaacacaatattataaaaacacaactaaaaacgcattatttggaaaagatgattttttttcttagtttcttatttttgtttatttatatttttagagacaggatcttgctctgttgcccactgcagcctccaactcctgggctcaagtgatcttcctgccttagcctcccaagtagctcagactacaggtgtgcaccaccatgccaagcgaattcctttctttgcttccttccttccttccttctttcctttctttcttctttttctttcttctctttgtctctccctccctccctctctctttctctttttccctttctttttcttttctttctctttctttctctgtctttcttctttctttcttctttttttctctgtctctgcctccctccctctctctccctgtttctctttctttctttctctctttctttcttttccttccttccttccttctttccttccttcaaagctccctgcctctctccctccctccctccctcccttccttccctctcttcctttctttctctttctcgttctctttcttctttctttcttctttcttctttcttctctctctctctttttcttttcttttctttttttctttctttggcaggtctcactatgttgcccagacaggtctcgaactcctggcctcaagtaatacacctaataggaggtgagtagctgggatcatagacgtgagtcaccaggatggctgataaaatatttttcaatacaaaagaaatagggccaggcaccatggctcacacctgtaatccttgcactttgggaggctgaggcagacaaatcacctgaggtcaggagtttgagaccagcctggccaacatgacaaaaccccatctctactaaaaatacaaaaattagccgggcatggtggcacatgcctgtaatcccgtctactcaggaggctgaggcagtagaatcacttgagcctgggtggtggaggttacagtgagctgagatcgcaccactgcactccagcctgggctgcagagtgagactctgtctcaaaaaaaaaaaaagaagaagaagaagaagaggaaatggaagccaagtgtgatggcatttgcttgtaatcctaactactagaaaggctgaggggggaggatcccttgagcccaggagttcgaggttgcggtgagctgtgatggtgccactgcactccaggcctgggtgacagagtgagagcctgtctctttaataaaaaaagaagaaaagaaaagaaagaagaggagaggagaggagaagaaagaaagagaaagagggaaggagggaaggaaggaaggaaggaaagaaggggctggacgtggtggctcatgcctttaatcccagcactttgggaggcagaggtgagcagatcagctgaggtcaggagttcaagtccagcctggccaacatggtgaaaccccatctctactaaaatacaaaaattagccgggtgtggtggcacgtgcctgtaatcctagctattcgggaggctgaggcaggagaatcgcttgaaccctggaggcggaggctgcagtgagccgagatcatgccactgcactccagcctggcaacagagtgagatcctgtctcaaaaaaaaaaaaaaaaaaaaaaaaaggaagggagggagggagaaagggaaggaaaagaaaagaaaagaaatcaaagataccaaaaacatgatccatgaaggaaaaggtaaattgggctttattaaaattaaaaacttctgatctgcaaaagacacagttaaggaaacgaagagacaagccacaaactgaaagaacacatttgcaaaacacatgtctgataaaggacttgcatccaaagaatacaaagaactcttcaacctcaacagtaagaaaacaaacacccaactaaaaaatgggcaaatgaatctggaattagacaccagaaaacagacaacccaactaaaaaattggtaaatgaatctggaattaggcaccagaaaacaacccaactaaaaagtgggcaaattaatctggaattaggcaccagaaaaaaaattggcataagatcacccaagaaaatgcagagagcagataagtatatgaaaagatgctcaatgtgacttgtcattaaggaattaatgagatattactacacacttattagaatggccaaaatccaaaacactgacaaatgctggtgaggaggcagggcatgaggaactcacattcgttgctgctaggaatacagaacagtgcatccactttggaaggcactttggcaatttctcacagcgctgaacagtcttaccatacgatccatacaactaaattgaaaacctaagtccacacaatggttgaatcaaacacagaggatttttagggtagtgaaactatgaaaacataaggaatattggacattatgcatttgccaaaatagatagaactttatagttcgaagagtgaaccttgatgtatgcagattttaaaatatcacttaggaagttagcggatcccaaggtggaacgcagactactacaatacaatctaactatattataagtgtgtgaaacatccccactgaagggaataggggaaagaaactgcccaagtaattttgggaatgaggctgttagcgtaaaggcaaacagaactgcatataagcattgtactctaactgacaaagttgttccccagtggggaacaattctgatgttgccatgcatgtatactagaatcaaacaactaattaaatagatggtggatggttggtgtcacatttatctctgatggagtgggagtttacagatacgaaagggcaggaggctagaatgatccatgtagtaatgaattagagttggagacattagtatgaactcacatatggttttaaatagaaatatttataggtatgtgtacgtatacacatgggttagtaaacacatatatattttcttgctctgtcagctgacagggactagaaacaacaataccccaggaccaacaaacacatctagtacccagatcttgctttataacataaatcttccaacaaaaggaactagggcttcttggagaaatggctgatgctaggactgtggcaggaaatatacaagataagcctgaagcattctgtactgcacacaattaaggacatcctcaaacaaaaacaagaatagctgtcttgaagtggggtgcagggaaaatgtcaaatggacacagcagccaattgaaagagctcccattagccaaagatggaataatttgagcaataaagtattggattacaactcaaagtgtaaaataaatatccatgactccatacagaatggtggcttgattttggacttctcagcttccagaactgtgaaaagtagatttctgttgtttacaggctgcctggcttaaaggaattttattataacagcctgagcagaccaatacagaaattgttttcttttttctttctttctttcttttttttttttttttgagaaggagttttgctctgtcgcccaggctggagggcaatggagcgatctcagctca

SEQ ID NO: 643 - DNA, 3168 bp, Homo sapiens
gtttctgggactcctcgctgaatcctccacaagaaagagggaagccagcagagcccccaagagaccgggcccccggattccccctagtctccagcctcaggcccacagcccatgacgcaaactgtgcctgtgaaatcgagctgtcggtaggaaatgaccgcctgtggtttgtgaatcctattttcatcgaggactgcagcagcgccctgcccaccgaccagccacctcttggaaattgccctgcacgccctttgccgcccacctctgatgccacctcacccacctccaggtgggccccacgccgcccaccaccccctcccccagtgctgcccctgcagccctgcagcccagcccagccccctgtgctccctgctcttgcccccgcccctgcctgtcctttgcccacctctcccccagtgcctgccccccacgtcacaccccatgccccaggtcccccagaccatccgaaccagccgcccatgatgacctgcgagagactcccatgccccactgcaggcctgggccccctcagggaggaagcgatgaagccaggggcagcctccagtcccttgcagcaggtccccgccccgccactgcctgcgaagaagaaccttcccactgcccctcccagacgccgcgtttccgagagggtgtccttagaagaccaaagtccggggatggcggcagagggggaccagctcagcctgcctccccaagggacctcagacggccctgaggacacaccccgggagagcacggagcaaggccaggacacagaggtgaaagccagcgatcctcacagcatgccagagctgcccaggacagccaaacaacccccagtcccgccccccaggaaaaaacggatctctcgacaactggcctcgaccctcccagctcccttagagaacgctgagctctgcacacaggcgatggccttggagacacccacgccgggtccacccagagagggccaaagccctgcttctcaggctgggactcagcaccctcctgcccaggccactgcccattcccagagctctccagagttcaagggctccctggcctccctctcagacagcttgggggtgtctgtcatggccaccgaccaggactcctactccaccagcagcacggaggaggagctggagcagttcagcagccccagcgtgaagaagaagccctccatgatcctgggcaaggctcggcaccggctgagctttgccagtttcagcagcatgttccacgctttcctctccaacaaccgcaagctgtacaagaaggtggtggagctggcgcaggacaagggctcgtactttggcagcctggtgcaggactacaaggtgtacagcctggagatgatggcgcgccagacctccagcacggagatgctgcaggagattcgcaccatgatgacccagctcaagagctacctgctgcagagcaccgagctcaaggccctggtggaccccgccctgcactccgaggaggagctcgaagcaattgtagagtctgccttgtacaaatgtgtcctgaagcccctgaaggaagccatcaactcatgcctgcatcagatccacagcaaggatggttcgctgcagcagctcaaggagaaccagttagtgatcctggccaccaccaccactgacctaggtgtgaccaccagcgtgccggaggtgcccatgatggagaagatcctgcagaagttcaccagcatgcacaaggcctactcacctgagaagaagatctccatcctgctcaagacctgcaaactcatctacgactccatggccctcggcaacccagggaagccctatggggcggatgacttcctgcctgtgctcatgtatgtgctggcccgcagcaacctcacggagatgcttctcaatgtggagtacatgatggagctcatggaccccgccctgcagctgggggagggttcctactatctgaccaccacctacggggccctggagcacatcaagagctacgacaagatcacggtgacccggcagctgagtgtggaggtgcaggactccatccaccgctgggagcgccggcgtactctcaacaaggcccgggcctcccgctcctccgtacaggacttcatctgcgtgtcgtacctggagcccgagcagcaggcgcggacgctggcgtcgcgggcggacacccaggcccaggcgctgtgcgcgcagtgcgcggagaagttcgcggtggagcggccgcaggcgcaccggctgttcgtgctggtggacgggcgctgcttccagctggcggacgacgcgctgccgcactgcatcaagggctacctgctgcgcagcgagcccaagcgcgacttccactttgtctaccggcccctggacggtggtggcggcggcggcgggagcccgccctgcctggtggtgcgggagcccaacttcctgtgaggccctcccggggcgcctcccctcacccccaggcgcacgtctggccccgcctctggctgcgcactcccgaccgcgacgtccacgcagcagagggacatgggccattccatgacgtgcccaggccaacgtcgcaggacagttgtgaaaataacatgacgctcgtccaaggccacttcctgagggcaagtcctaatagccctgagacaccgagacggcatgttcttcattagacggaaagggaaactgaggctcaggagagaggcgctccaggccgctgcagccaacaaaccggcgccctcttcacacgtagctcctcaggccattccccatgagtcccccacacccaccccatcctcggtctttgcaaagaagggcccgagcttagtttccccaggactggcctaggaaggagcaccggccacagctgctccccgtgccactcagggtggacccagcatctcaggagcacctcagggtgtcggttaagagacaggcctccacccctgcaccagagcctgctcttagctcccggtgcccccagaccccgcagctctgtgcccggcaagaagcagctagacacacgccagggcgccaagcacggccagctccgcggacccatggacaagcccagccccgcctcagggaaaacagggcctttccctacaggacacgccccagagctgtggcagattgcaggagccatcgtgtggggagaatttaataaaagcccttttgaaaatgacat

SEQ ID NO: 644 - protein, 645 aa, Homo sapiens
MMTCERLPCPTAGLGPLREEAMKPGAASSPLQQVPAPPLPAKKNLPTAPPRRRVSVSLEDQSPGMAAEGDQLSLPPQGTSDGPEDTPRESTEQGQDTEVKASDPHSMPELPRTAKQPPVPPPRKKRISRQLASTLPAPLENAELCTQAMALETPTPGPPREGQSPASQAGTQHPPAQATAHSQSSPEFKGSLASLSDSLGVSVMATDQDSYSTSSTEEELEQFSSPSVKKKPSMILGKARHRLSFASFSSMFHAFLSNNRKLYKKVVELAQDKGSYFGSLVQDYKVYSLEMMARQTSSTEMLQEIRTMMTQLKSYLLQSTELKALVDPALHSEEELEAIVESALYKCVLKPLKEAINSCLHQIHSKDGSLQQLKENQLVILATTTTDLGVTTSVPEVPMMEKILQKFTSMHKAYSPEKKISILLKTCKLIYDSMALGNPGKPYGADDFLPVLMYVLARSNLTEMLLNVEYMMELMDPALQLGEGSYYLTTTYGALEHIKSYDKITVTRQLSVEVQDSIHRWERRRTLNKARASRSSVQDFICVSYLEPEQQARTLASRADTQAQALCAQCAEKFAVERPQAHRLFVLVDGRCFQLADDALPHCIKGYLLRSEPKRDFHFVYRPLDGGGGGGGSPPCLVVREPNFL

SEQ ID NO: 645 - DNA, 3015 bp, Homo sapiens
cccgggcctccgtgtgccccagggggctccgggccgcgagccgctgccgaatggcttttgacaaaaaaacccttgaccaccaaggccagcctcttcctgaaagccccgctcgctccgatacaggaagtagaagggagcgagagccccagagcgcggcggcagcggcggcctggcccttccagagggccagagccagggacatgcgggcgcccgggactccgcgttccgcgcggcccggcgcctgagcgcctccgttccccgtcccggagctgccggcggcatgatccgacacgccggggcgcccgcgcgcggggaccccacgggtccggttccagttgttggcaaaggagaggaagaggaagaggaagatggcatgcggctttgtctgccagccaacccgaaaaactgccttcctcaccgccggggcatcagcatcctggagaagctcatcaaaacatgcccggtgtggctgcagctgagtctgggccaggcagaggtggccaggatcctgcaccgggtggtggctgggatgttcctggttcgccgggacagcagctcgaagcagctggtgctctgtgtccactttccttctctgaacgaaagctcggccgaggtgctcgaatacaccattaaggaagaaaagtcgatattgtacctggaaggctcggctcttgtgtttgaggacatcttcagattgattgcgttctactgtgtcagtagagacttactgcccttcacactgcggctaccccaggccatccttgaggccagcagcttcacggaccttgagaccatcgccaacctgggtctgggtttctgggactcctcgctgaatcctccacaagaaagagggaagccagcagagcccccaagagaccgggcccccggattccccctagtctccagcctcaggcccacagcccatgacgcaaactgtgcctgtgaaatcgagctgtcggtaggaaatgaccgcctgtggtttgtgaatcctattttcatcgaggactgcagcagcgccctgcccaccgaccagccacctcttggaaattgccctgcacgccctttgccgcccacctctgatgccacctcacccacctccagaagcaattgtagagtctgccttgtacaaatgtgtcctgaagcccctgaaggaagccatcaactcatgcctgcatcagatccacagcaaggatggttcgctgcagcagctcaaggagaaccagttagtgatcctggccaccaccaccactgacctaggtgtgaccaccagcgtgccggaggtgcccatgatggagaagatcctgcagaagttcaccagcatgcacaaggcctactcacctgagaagaagatctccatcctgctcaagacctgcaaactcatctacgactccatggccctcggcaacccagggaagccctatggggcggatgacttcctgcctgtgctcatgtatgtgctggcccgcagcaacctcacggagatgcttctcaatgtggagtacatgatggagctcatggaccccgccctgcagctgggggagggttcctactatctgaccaccacctacggggccctggagcacatcaagagctacgacaagatcacggtgacccggcagctgagtgtggaggtgcaggactccatccaccgctgggagcgccggcgtactctcaacaaggcccgggcctcccgctcctccgtacagggactccgagacgcgccttaattcatctcccagaactgtcggcccagctgggaagccaggcagggagggggacgggccccccgcaggctcgcggcagagacgggaaaggcgcaggtgccggactcgcagacagcttggcgcccgccacccgctatccatccagggaggggcctgggccgggagagggcgcctgaggagacagggccccgccgtgaccacaggcccctcgcgtctccgcaggacttcatctgcgtgtcgtacctggagcccgagcagcaggcgcggacgctggcgtcgcgggcggacacccaggcccaggcgctgtgcgcgcagtgcgcggagaagttcgcggtggagcggccgcaggcgcaccggctgttcgtgctggtggacgggcgctgcttccagctggcggacgacgcgctgccgcactgcatcaagggctacctgctgcgcagcgagcccaagcgcgacttccactttgtctaccggcccctggacggtggtggcggcggcggcgggagcccgccctgcctggtggtgcgggagcccaacttcctgtgaggccctcccggggcgcctcccctcacccccaggcgcacgtctggccccgcctctggctgcgcactcccgaccgcgacgtccacgcagcagagggacatgggccattccatgacgtgcccaggccaacgtcgcaggacagttgtgaaaataacatgacgctcgtccaaggccacttcctgagggcaagtcctaatagccctgagacaccgagacggcatgttcttcattagacggaaagggaaactgaggctcaggagagaggcgctccaggccgctgcagccaacaaaccggcgccctcttcacacgtagctcctcaggccattccccatgagtcccccacacccaccccatcctcggtctttgcaaagaagggcccgagcttagtttccccaggactggcctaggaaggagcaccggccacagctgctccccgtgccactcagggtggacccagcatctcaggagcacctcagggtgtcggttaagagacaggcctccacccctgcaccagagcctgctcttagctcccggtgcccccagaccccgcagctctgtgcccggcaagaagcagctagacacacgccagggcgccaagcacggccagctccgcggacccatggacaagcccagccccgcctcagggaaaacagggcctttccctacaggacacgccccagagctgtggcagattgcaggagccatcgtgtggggagaatttaataaaagcccttttgaaaatgacat

SEQ ID NO: 646 - protein, 317 aa, Homo sapiens
MIRHAGAPRDPTGPVPVVGKGEEEEEEDGMRLCLPANPKNCLPHRRGISIKLIKTCPVWLQLSLGQAEVARILHRVVAGMFLVRRDSSSKQLVLCVHFPSLNESSAEVLEYTIKEEKSILYLEGSALVFEDIFRLIAFYCVSRDLLPFTLRLPQAIASSFTDLETIANLGLGFWDSSLNPPQERGKPAEPPRDRAPGFPLVSSLRPTAHDANCACEIELSVGNDRLWFVNPIFIEDCSSALPTDQPPLGNCPARPLPPTSDATSPTSRSNCRVCLVQMCPEAPEGSHQLMPASDPQQGWFAAAAQGEPVSDPGHHHH

SEQ ID NO: 647 - DNA, 1855 bp, Homo sapiens
cccgggcctccgtgtgccccagggggctccgggccgcgagccgctgccgaatggcttttgacaaaaaaacccttgaccaccaaggccagcctcttcctgaaagccccgctcgctccgatacaggaagtagaagggagcgagagccccagagcgcggcggcagcggcggcctggcccttccagagggccagagccagggacatgcgggcgcccgggactccgcgttccgcgcggcccggcgcctgagcgcctccgttccccgtcccggagctgccggcggcatgatccgacacgccggggcgcccgcgcgcggggaccccacgggtccggttccagttgttggcaaaggagaggaagaggaagaggaagatggcatgcggctttgtctgccagccaacccgaaaaactgccttcctcaccgccggggcatcagcatcctggagaagctcatcaaaacatgcccggtgtggctgcagctgagtctgggccaggcagaggtggccaggatcctgcaccgggtggtggctgggatgttcctggttcgccgggacagcagctcgaagcagctggtgctctgtgtccactttccttctctgaacgaaagctcggccgaggtgctcgaatacaccattaaggaagaaaagtcgatattgtacctggaaggctcggctcttgtgtttgaggacatcttcagattgattgcgttctactgtgtcagtagagacttactgcccttcacactgcggctaccccaggccatccttgaggccagcagatcacgggccattcacacaggcagtgaaagtcagcctgaggatttagcccagaggtgatggagcccctgaagggtgtgtgtggagggcagaggagaggggacaagacagggggacggctcaggaggctgcggcggggcaaggccagtacccggtggccttcagcagagcaaaggaggtggagcacaagctggacctctgctggaaacagcaggaatgacttcagccttggggcagctggctggcaggatgcagacacaccatgggtcctgttaaggccaaatctgcttcgggcaccaagatgtcaagaggtgctagacttggagtttgtcctggcaggtgatatggcaaagtgtcaccagagcctgccgtgggcacgaatgtgtggggcagagaggtttccaggcagtgagaggtggcagctgagctgagccaccaaggatgggaagggctggagctacagagatggagagaagggcccttcagcctttgggaacagggtcagcatccacagcaatggtgccattccagacactgcatgtgtcagcctcatgactacaaaccagaccagatgggcttggctattgtcatgcccaagaagccacagctcagagaggtttggtgacctggccatgaggacagagctggtagtagagctgggcttcagacccaggcagcccagccctttccatgagctgagtctctgcctctgcctctcccttccaagctctgcccatgtgtgtggccagtcagatggtgaaggaacttaaaccacataaaaaggccagacagggcggggtgtggtggctcacacctgtaatcccagcactttgggaggccgaggagggcagatcacttgagatcaggagttcaagaccagcctggccaacatggtgaaacccccctctctacaaacaatgcaaaaattagccaggcatggtggtgggtacctgtaatcccagctactcaggaggctgaggcaggagaattgcttgaaacccgggaagtggaggttgcagtgagccaagatcacactactgcactccagcctgggcaacagaacaagattctgtctcaaaaaac

SEQ ID NO: 648 - protein, 177 aa, Homo sapiens
MIRHAGAPRDPTGPVPVVGKGEEEEEEDGMRLCLPANPKNCLPHRRGISIKLIKTCPVWLQLSLGQAEVARILHRVVAGMFLVRRDSSSKQLVLCVHFPSLNESSAEVLEYTIKEEKSILYLEGSALVFEDIFRLIAFYCVSRDLLPFTLRLPQAIASRSRAIHTGSESQPEDLAQR

SEQ ID NO: 649 - DNA, 1857 bp, Homo sapiens
cccgggcctccgtgtgccccagggggctccgggccgcgagccgctgccgaatggcttttgacaaaaaaacccttgaccaccaaggccagcctcttcctgaaagccccgctcgctccgatacaggaagtagaagggagcgagagccccagagcgcggcggcagcggcggcctggcccttccagagggccagagccagggacatgcgggcgcccgggactccgcgttccgcgcggcccggcgcctgagcgcctccgttccccgtcccggagctgccggcggcatgatccgacacgccggggcgcccgcgcgcggggaccccacgggtccggttccagttgttggcaaaggagaggaagaggaagaggaagatggcatgcggctttgtctgccagccaacccgaaaaactgccttcctcaccgccggggcatcagcatcctggagaagctcatcaaaacatgcccggtgtggctgcagctgagtctgggccaggcagaggtggccaggatcctgcaccgggtggtggctgggatgttcctggttcgccgggacagcagctcgaagcagctggtgctctgtgtccactttccttctctgaacgaaagctcggccgaggtgctcgaatacaccattaaggaagaaaagtcgatattgtacctggaaggctcggctcttgtgtttgaggacatcttcagattgattgcgttctactgtgtcagtagagacttactgcccttcacactgcggctaccccaggccatccttgaggccagcagcgatcacgggccattcacacaggcagtgaaagtcagcctgaggatttagcccagaggtgatggagcccctgaagggtgtgtgtggagggcagaggagaggggacaagacagggggacggctcaggaggctgcggcggggcaaggccagtacccggtggccttcagcagagcaaaggaggtggagcacaagctggacctctgctggaaacagcaggaatgacttcagccttggggcagctggctggcaggatgcagacacaccatgggtcctgttaaggccaaatctgcttcgggcaccaagatgtcaagaggtgctagacttggagtttgtcctggcaggtgatatggcaaagtgtcaccagagcctgccgtgggcacgaatgtgtggggcagagaggtttccaggcagtgagaggtggcagctgagctgagccaccaaggatgggaagggctggagctacagagatggagagaagggcccttcagcctttgggaacagggtcagcatccacagcaatggtgccattccagacactgcatgtgtcagcctcatgactacaaaccagaccagatgggcttggctattgtcatgcccaagaagccacagctcagagaggtttggtgacctggccatgaggacagagctggtagtagagctgggcttcagacccaggcagcccagccctttccatgagctgagtctctgcctctgcctctcccttccaagctctgcccatgtgtgtggccagtcagatggtgaaggaacttaaaccacataaaaaggccagacagggcggggtgtggtggctcacacctgtaatcccagcactttgggaggccgaggagggcagatcacttgagatcaggagttcaagaccagcctggccaacatggtgaaacccccctctctacaaacaatgcaaaaattagccaggcatggtggtgggtacctgtaatcccagctactcaggaggctgaggcaggagaattgcttgaaacccgggaagtggaggttgcagtgagccaagatcacactactgcactccagcctgggcaacagaacaagattctgtctcaaaaaac

SEQ ID NO: 650 - protein, 174 aa, Homo sapiens
MIRHAGAPRDPTGPVPVVGKGEEEEEEDGMRLCLPANPKNCLPHRRGISIKLIKTCPVWLQLSLGQAEVARILHRVVAGMFLVRRDSSSKQLVLCVHFPSLNESSAEVLEYTIKEEKSILYLEGSALVFEDIFRLIAFYCVSRDLLPFTLRLPQAIASSDHGPFTQAVKVSLRI

SEQ ID NO: 651 - DNA, 780 bp, Homo sapiens
cccgggcctccgtgtgccccagggggctccgggccgcgagccgctgccgaatggcttttgacaaaaaaacccttgaccaccaaggccagcctcttcctgaaagccccgctcgctccgatacaggaagtagaagggagcgagagccccagagcgcggcggcagcggcggcctggcccttccagagggccagagccagggacatgcgggcgcccgggactccgcgttccgcgcggcccggcgcctgagcgcctccgttccccgtcccggagctgccggcggcatgatccgacacgccggggcgcccgcgcgcggggaccccacgggtccggttccagttgttggcaaaggagaggaagaggaagaggaagatggcatgcggctttgtctgccagccaacccgaaaaactgccttcctcaccgccggggcatcagcatcctggagaagctcatcaaaacatgcccggtgtggctgcagctgagtctgggccaggcagaggtggccaggatcctgcaccgggtggtggctgggatgttcctggttcgccgggacagcagctcgaagcagctggtgctctgtgtccactttccttctctgaacgaaagctcggccgaggtgctcgaatacaccattaaggaagaaaagtcgacattccccttttcagcctccaacactggagttgggccaggaaaaaaatacatcatgagataatttaactccaagaactttattgtaaaacttcagtggtgaatttcttttaaaaaaaatagatcttgaatcat

SEQ ID NO: 652 - protein, 206 aa, Homo sapiens
PGPPCAPGGSGPRAAAEWLLTKKPLTTKASLFLKAPLAPIQEVEGSESPRARRQRRPGPSRGPEPGTCGRPGLRVPRGPAPERLRSPSRSCRRHDPTRRGARRPHGSGSSCWQRRGRGRGRWHAALSASQPEKLPSSPPGHQHPGEAHQNMPGVAAAESGPGRGGQDPAPGGGWDVPGSPGQQLEAAGALCPLSFSKLGRGARIHH

SEQ ID NO: 653 - DNA, 3980 bp, Homo sapiens
cccgggcctccgtgtgccccagggggctccgggccgcgagccgctgccgaatggcttttgacaaaaaaacccttgaccaccaaggccagcctcttcctgaaagccccgctcgctccgatacaggaagtagaagggagcgagagccccagagcgcggcggcagcggcggcctggcccttccagagggccagagccagggacatgcgggcgcccgggactccgcgttccgcgcggcccggcgcctgagcgcctccgttccccgtcccggagctgccggcggcatgatccgacacgccggggcgcccgcgcgcggggaccccacgggtccggttccagttgttggcaaaggagaggaagaggaagaggaagatggcatgcggctttgtctgccagccaacccgaaaaactgccttcctcaccgccggggcatcagcatcctggagaagctcatcaaaacatgcccggtgtggctgcagctgagtctgggccaggcagaggtggccaggatcctgcaccgggtggtggctgggatgttcctggttcgccgggacagcagctcgaagcagctggtgctctgtgtccactttccttctctgaacgaaagctcggccgaggtgctcgaatacaccattaaggaagaaaagtcgatattgtacctggaaggctcggctcttgtgtttgaggacatcttcagattgattgcgttctactgtgtcagtagagacttactgcccttcacactgcggctaccccaggccatccttgaggccagcagcttcacggaccttgagaccatcgccaacctgggtctgggtttctgggactcctcgctgaatcctccacaagaaagagggaagccagcagagcccccaagagaccgggcccccggattccccctagtctccagcctcaggcccacagcccatgacgcaaactgtgcctgtgaaatcgagctgtcggtaggaaatgaccgcctgtggtttgtgaatcctattttcatcgaggactgcagcagcgccctgcccaccgaccagccacctcttggaaattgccctgcacgccctttgccgcccacctctgatgccacctcacccacctccaggtgggccccacgccgcccaccaccccctcccccagtgctgcccctgcagccctgcagcccagcccagccccctgtgctccctgctcttgcccccgcccctgcctgtcctttgcccacctctcccccagtgcctgccccccacgtcacaccccatgccccaggtcccccagaccatccgaaccagccgcccatgatgacctgcgagagactcccatgccccactgcaggcctgggccccctcagggaggaagcgatgaagccaggggcagcctccagtcccttgcagcaggtccccgccccgccactgcctgcgaagaagaaccttcccactgcccctcccagacgccgcgtttccgagagggtgtccttagaagaccaaagtccggggatggcggcagagggggaccagctcagcctgcctccccaagggacctcagacggccctgaggacacaccccgggagagcacggagcaaggccaggacacagaggtgaaagccagcgatcctcacagcatgccagagctgcccaggacagccaaacaacccccagtcccgccccccaggaaaaaacggatctctcgacaactggcctcgaccctcccagctcccttagagaacgctgagctctgcacacaggcgatggccttggagacacccacgccgggtccacccagagagggccaaagccctgcttctcaggctgggactcagcaccctcctgcccaggccactgcccattcccagagctctccagagttcaagggctccctggcctccctctcagacagcttgggggtgtctgtcatggccaccgaccaggactcctactccaccagcagcacggaggaggagctggagcagttcagcagccccagcgtgaagaagaagccctccatgatcctgggcaaggctcggcaccggctgagctttgccagtttcagcagcatgttccacgctttcctctccaacaaccgcaagctgtacaagaaggtggtggagctggcgcaggacaagggctcgtactttggcagcctggtgcaggactacaaggtgtacagcctggagatgatggcgcgccagacctccagcacggagatgctgcaggagattcgcaccatgatgacccagctcaagagctacctgctgcagagcaccgagctcaaggccctggtggaccccgccctgcactccgaggaggagctcgaagcaattgtagagtctgccttgtacaaatgtgtcctgaagcccctgaaggaagccatcaactcatgcctgcatcagatccacagcaaggatggttcgctgcagcagctcaaggagaaccagttagtgatcctggccaccaccaccactgacctaggtgtgaccaccagcgtgccggaggtgcccatgatggagaagatcctgcagaagttcaccagcatgcacaaggcctactcacctgagaagaagatctccatcctgctcaagacctgcaaactcatctacgactccatggccctcggcaacccagggaagccctatggggcggatgacttcctgcctgtgctcatgtatgtgctggcccgcagcaacctcacggagatgcttctcaatgtggagtacatgatggagctcatggaccccgccctgcagctgggggagggttcctactatctgaccaccacctacggggccctggagcacatcaagagctacgacaagatcacggtgacccggcagctgagtgtggaggtgcaggactccatccaccgctgggagcgccggcgtactctcaacaaggcccgggcctcccgctcctccgtacaggacttcatctgcgtgtcgtacctggagcccgagcagcaggcgcggacgctggcgtcgcgggcggacacccaggcccaggcgctgtgcgcgcagtgcgcggagaagttcgcggtggagcggccgcaggcgcaccggctgttcgtgctggtggacgggcgctgcttccagctggcggacgacgcgctgccgcactgcatcaagggctacctgctgcgcagcgagcccaagcgcgacttccactttgtctaccggcccctggacggtggtggcggcggcggcgggagcccgccctgcctggtggtgcgggagcccaacttcctgtgaggccctcccggggcgcctcccctcacccccaggcgcacgtctggccccgcctctggctgcgcactcccgaccgcgacgtccacgcagcagagggacatgggccattccatgacgtgcccaggccaacgtcgcaggacagttgtgaaaataacatgacgctcgtccaaggccacttcctgagggcaagtcctaatagccctgagacaccgagacggcatgttcttcattagacggaaagggaaactgaggctcaggagagaggcgctccaggccgctgcagccaacaaaccggcgccctcttcacacgtagctcctcaggccattccccatgagtcccccacacccaccccatcctcggtctttgcaaagaagggcccgagcttagtttccccaggactggcctaggaaggagcaccggccacagctgctccccgtgccactcagggtggacccagcatctcaggagcacctcagggtgtcggttaagagacaggcctccacccctgcaccagagcctgctcttagctcccggtgcccccagaccccgcagctctgtgcccggcaagaagcagctagacacacgccagggcgccaagcacggccagctccgcggacccatggacaagcccagccccgcctcagggaaaacagggcctttccctacaggacacgccccagagctgtggcagattgcaggagccatcgtgtggggagaatttaataaaagcccttttgaaaatgacat

SEQ ID NO: 654 - protein, 974 aa, Homo sapiens
MIRHAGAPRDPTGPVPVVGKGEEEEEEDGMRLCLPANPKNCLPHRRGISIKLIKTCPVWLQLSLGQAEVARILHRVVAGMFLVRRDSSSKQLVLCVHFPSLNESSAEVLEYTIKEEKSILYLEGSALVFEDIFRLIAFYCVSRDLLPFTLRLPQAIASSFTDLETIANLGLGFWDSSLNPPQERGKPAEPPRDRAPGFPLVSSLRPTAHDANCACEIELSVGNDRLWFVNPIFIEDCSSALPTDQPPLGNCPARPLPPTSDATSPTSRWAPRRPPPPPPVLPLQPCSPAQPPVLPAPAPACPLPTSPPVPAPHVTPHAPGPPDHPNQPPMMTCERLPCPTAGLGPLREEAMKPGAASSPLQQVPAPPLPAKKNLPTAPPRRRVSVSLEDQSPGMAAEGDQLSLPPQGTSDGPEDTPRESTEQGQDTEVKASDPHSMPELPRTAKQPPVPPPRKKRISRQLASTLPAPLENAELCTQAMALETPTPGPPREGQSPASQAGTQHPPAQATAHSQSSPEFKGSLASLSDSLGVSVMATDQDSYSTSSTEEELEQFSSPSVKKKPSMILGKARHRLSFASFSSMFHAFLSNNRKLYKKVVELAQDKGSYFGSLVQDYKVYSLEMMARQTSSTEMLQEIRTMMTQLKSYLLQSTELKALVDPALHSEEELEAIVESALYKCVLKPLKEAINSCLHQIHSKDGSLQQLKENQLVILATTTTDLGVTTSVPEVPMMEKILQKFTSMHKAYSPEKKISILLKTCKLIYDSMALGNPGKPYGADDFLPVLMYVLARSNLTEMLLNVEYMMELMDPALQLGEGSYYLTTTYGALEHIKSYDKITVTRQLSVEVQDSIHRWERRRTLNKARASRSSVQDFICVSYLEPEQQARTLASRADTQAQALCAQCAEKFAVERPQAHRLFVLVDGRCFQLADDALPHCIKGYLLRSEPKRDFHFVYRPLDGGGGGGGSPPCLVVREPNFL

SEQ ID NO: 655 - DNA, 2989 bp, Homo sapiens
cccgggcctccgtgtgccccagggggctccgggccgcgagccgctgccgaatggcttttgacaaaaaaacccttgaccaccaaggccagcctcttcctgaaagccccgctcgctccgatacaggaagtagaagggagcgagagccccagagcgcggcggcagcggcggcctggcccttccagagggccagagccagggacatgcgggcgcccgggactccgcgttccgcgcggcccggcgcctgagcgcctccgttccccgtcccggagctgccggcggcatgatccgacacgccggggcgcccgcgcgcggggaccccacgggtccggttccagttgttggcaaaggagaggaagaggaagaggaagatggcatgcggctttgtctgccagccaacccgaaaaactgccttcctcaccgccggggcatcagcatcctggagaagctcatcaaaacatgcccggtgtggctgcagctgagtctgggccaggcagaggtggccaggatcctgcaccgggtggtggctgggatgttcctggttcgccgggacagcagctcgaagcagctggtgctctgtgtccactttccttctctgaacgaaagctcggccgaggtgctcgaatacaccattaaggaagaaaagtcgatattgtacctggaaggctcggctcttgtgtttgaggacatcttcagattgattgcgttctactgtgtcagtagagacttactgcccttcacactgcggctaccccaggccatccttgaggccagcagcttcacggaccttgagaccatcgccaacctgggtctgggtttctgggactcctcgctgaatcctccacaagaaagagggaagccagcagagcccccaagagaccgggcccccggattccccctagtctccagcctcaggcccacagcccatgacgcaaactgtgcctgtgaaatcgagctgtcggtaggaaatgaccgcctgtggtttgtgaatcctattttcatcgaggactgcagcagcgccctgcccaccgaccagccacctcttggaaattgccctgcacgccctttgccgcccacctctgatgccacctcacccacctccaggtgggccccacgccgcccaccaccccctcccccagtgctgcccctgcagccctgcagcccagcccagccccctgtgctccctgctcttgcccccgcccctgcctgtcctttgcccacctctcccccagtgcctgccccccacgtcacaccccatgccccaggtcccccagaccatccgaaccagccgcccatgatgacctgcgagagactcccatgccccactgcaggcctgggccccctcagggaggaagcgatgaagccaggggcagcctccagtcccttgcagcaggtccccgccccgccactgcctgcgaagaagaaccttcccactgcccctcccagacgccgcgtttccgagagggtgtccttagaagaccaaagtccggggatggcggcagagggggaccagctcagcctgcctccccaagggacctcagacggccctgaggacacaccccgggagagcacggagcaaggccaggacacagaggtgaaagccagcgatcctcacagcatgccagagctgcccaggacagccaaacaacccccagtcccgccccccaggaaaaaacggatctctcgacaactggcctcgaccctcccagctcccttagagaacgctgagctctgcacacaggcgatggccttggagacacccacgccgggtccacccagagagggccaaagccctgcttctcaggctgggactcagcaccctcctgcccaggccactgcccattcccagagctctccagagttcaagggctccctggcctccctctcagacagcttgggggtgtctgtcatggccaccgaccaggactcctactccaccagcagcacggaggaggagctggagcagttcagcagccccagcgtgaagaagaagccctccatgatcctgggcaaggctcggcaccggctgagctttgccagtttcagcagcatgttccacgctttcctctccaacaaccgcaagctgtacaagaaggtggtggagctggcgcaggacaagggctcgtactttggcagcctggtgcaggactacaaggtgtacagcctggagatgatggcgcgccagacctccagcacggagatgctgcaggagattcgcaccatgatgacccagctcaagagctacctgctgcagagcaccgagctcaaggccctggtggaccccgccctgcactccgaggaggagctcgaagcaattgtagagtctgccttgtacaaatgtgtcctgaagcccctgaaggaagccatcaactcatgcctgcatcagatccacagcaaggatggttcgctgcagcagctcaaggagaaccagttagtgatcctggccaccaccaccactgacctaggtgtgaccaccagcgtgccggaggtgcccatgatggagaagatcctgcagaagttcaccagcatgcacaaggcctactcacctgagaagaagatctccatcctgctcaagacctgcaaactcatctacgactccatggccctcggcaacccagggaagccctatggggcggatgacttcctgcctgtgctcatgtatgtgctggcccgcagcaacctcacggagatgcttctcaatgtggagtacatgatggagctcatggaccccgccctgcagctgggggagggttcctactatctgaccaccacctacggggccctggagcacatcaagagctacgacaagatcacggtgacccggcagctgagtgtggaggtgcaggactccatccaccgctgggagcgccggcgtactctcaacaaggcccgggcctcccgctcctccgtacaggtgaggcctgagagcgggaggggcccggtggggccatgtcccagacaccatccctgctgcctgctggctaaggagccg

SEQ ID NO: 656 - protein, 893 aa, Homo sapiens
MIRHAGAPRDPTGPVPVVGKGEEEEEEDGMRLCLPANPKNCLPHRRGISIKLIKTCPVWLQLSLGQAEVARILHRVVAGMFLVRRDSSSKQLVLCVHFPSLNESSAEVLEYTIKEEKSILYLEGSALVFEDIFRLIAFYCVSRDLLPFTLRLPQAIASSFTDLETIANLGLGFWDSSLNPPQERGKPAEPPRDRAPGFPLVSSLRPTAHDANCACEIELSVGNDRLWFVNPIFIEDCSSALPTDQPPLGNCPARPLPPTSDATSPTSRWAPRRPPPPPPVLPLQPCSPAQPPVLPAPAPACPLPTSPPVPAPHVTPHAPGPPDHPNQPPMMTCERLPCPTAGLGPLREEAMKPGAASSPLQQVPAPPLPAKKNLPTAPPRRRVSVSLEDQSPGMAAEGDQLSLPPQGTSDGPEDTPRESTEQGQDTEVKASDPHSMPELPRTAKQPPVPPPRKKRISRQLASTLPAPLENAELCTQAMALETPTPGPPREGQSPASQAGTQHPPAQATAHSQSSPEFKGSLASLSDSLGVSVMATDQDSYSTSSTEEELEQFSSPSVKKKPSMILGKARHRLSFASFSSMFHAFLSNNRKLYKKVVELAQDKGSYFGSLVQDYKVYSLEMMARQTSSTEMLQEIRTMMTQLKSYLLQSTELKALVDPALHSEEELEAIVESALYKCVLKPLKEAINSCLHQIHSKDGSLQQLKENQLVILATTTTDLGVTTSVPEVPMMEKILQKFTSMHKAYSPEKKISILLKTCKLIYDSMALGNPGKPYGADDFLPVLMYVLARSNLTEMLLNVEYMMELMDPALQLGEGSYYLTTTYGALEHIKSYDKITVTRQLSVEVQDSIHRWERRRTLNKARASRSSVQVRPESGRGPVGPCPRHHPCCLLAKEP

SEQ ID NO: 657 - DNA, 2486 bp, Homo sapiens
cccgggcctccgtgtgccccagggggctccgggccgcgagccgctgccgaatggcttttgacaaaaaaacccttgaccaccaaggccagcctcttcctgaaagccccgctcgctccgatacaggaagtagaagggagcgagagccccagagcgcggcggcagcggcggcctggcccttccagagggccagagccagggacatgcgggcgcccgggactccgcgttccgcgcggcccggcgcctgagcgcctccgttccccgtcccggagctgccggcggcatgatccgacacgccggggcgcccgcgcgcggggaccccacgggtccggttccagttgttggcaaaggagaggaagaggaagaggaagatggcatgcggctttgtctgccagccaacccgaaaaactgccttcctcaccgccggggcatcagcatcctggagaagctcatcaaaacatgcccggtgtggctgcagctgagtctgggccaggcagaggtggccaggatcctgcaccgggtggtggctgggatgttcctggttcgccgggacagcagctcgaagcagctggtgctctgtgtccactttccttctctgaacgaaagctcggccgaggtgctcgaatacaccattaaggaagaaaagtcgatattgtacctggaaggctcggctcttgtgtttgaggacatcttcagattgattgcgttctactgtgtcagtagagacttactgcccttcacactgcggctaccccaggccatccttgaggccagcagcttcacggaccttgagaccatcgccaacctgggtctggaagcaattgtagagtctgccttgtacaaatgtgtcctgaagcccctgaaggaagccatcaactcatgcctgcatcagatccacagcaaggatggttcgctgcagcagctcaaggagaaccagttagtgatcctggccaccaccaccactgacctaggtgtgaccaccagcgtgccggaggtgcccatgatggagaagatcctgcagaagttcaccagcatgcacaaggcctactcacctgagaagaagatctccatcctgctcaagacctgcaaactcatctacgactccatggccctcggcaacccagggaagccctatggggcggatgacttcctgcctgtgctcatgtatgtgctggcccgcagcaacctcacggagatgcttctcaatgtggagtacatgatggagctcatggaccccgccctgcagctgggggagggttcctactatctgaccaccacctacggggccctggagcacatcaagagctacgacaagatcacggtgacccggcagctgagtgtggaggtgcaggactccatccaccgctgggagcgccggcgtactctcaacaaggcccgggcctcccgctcctccgtacaggacttcatctgcgtgtcgtacctggagcccgagcagcaggcgcggacgctggcgtcgcgggcggacacccaggcccaggcgctgtgcgcgcagtgcgcggagaagttcgcggtggagcggccgcaggcgcaccggctgttcgtgctggtggacgggcgctgcttccagctggcggacgacgcgctgccgcactgcatcaagggctacctgctgcgcagcgagcccaagcgcgacttccactttgtctaccggcccctggacggtggtggcggcggcggcgggagcccgccctgcctggtggtgcgggagcccaacttcctgtgaggccctcccggggcgcctcccctcacccccaggcgcacgtctggccccgcctctggctgcgcactcccgaccgcgacgtccacgcagcagagggacatgggccattccatgacgtgcccaggccaacgtcgcaggacagttgtgaaaataacatgacgctcgtccaaggccacttcctgagggcaagtcctaatagccctgagacaccgagacggcatgttcttcattagacggaaagggaaactgaggctcaggagagaggcgctccaggccgctgcagccaacaaaccggcgccctcttcacacgtagctcctcaggccattccccatgagtcccccacacccaccccatcctcggtctttgcaaagaagggcccgagcttagtttccccaggactggcctaggaaggagcaccggccacagctgctccccgtgccactcagggtggacccagcatctcaggagcacctcagggtgtcggttaagagacaggcctccacccctgcaccagagcctgctcttagctcccggtgcccccagaccccgcagctctgtgcccggcaagaagcagctagacacacgccagggcgccaagcacggccagctccgcggacccatggacaagcccagccccgcctcagggaaaacagggcctttccctacaggacacgccccagagctgtggcagattgcaggagccatcgtgtggggagaatttaataaaagcccttttgaaaatgacat

SEQ ID NO: 658 - protein, 480 aa, Homo sapiens
MIRHAGAPRDPTGPVPVVGKGEEEEEEDGMRLCLPANPKNCLPHRRGISIKLIKTCPVWLQLSLGQAEVARILHRVVAGMFLVRRDSSSKQLVLCVHFPSLNESSAEVLEYTIKEEKSILYLEGSALVFEDIFRLIAFYCVSRDLLPFTLRLPQAIASSFTDLETIANLGLEAIVESALYKCVLKPLKEAINSCLHQIHSKDGSLQQLKENQLVILATTTTDLGVTTSVPEVPMMEKILQKFTSMHKAYSPEKKISILLKTCKLIYDSMALGNPGKPYGADDFLPVLMYVLARSNLTEMLLNVEYMMELMDPALQLGEGSYYLTTTYGALEHIKSYDKITVTRQLSVEVQDSIHRWERRRTLNKARASRSSVQDFICVSYLEPEQQARTLASRADTQAQALCAQCAEKFAVERPQAHRLFVLVDGRCFQLADDALPHCIKGYLLRSEPKRDFHFVYRPLDGGGGGGGSPPCLVVREPNFL

SEQ ID NO: 659 - DNA, 30207 bp, Mus musculus
  misc_feature (1)...(30207): n = A, C, G or T/U
tcaaaagtggggacaagctagaaataagccaggggaaaggacaaaaacctagcctctgtctgaggcgttcacaacaagaatatgtttgtgcacatgaatatagcctcacatgtacacatgggcacttgtgaatacacccacacatctgcatccacacaccacacacgtgtgcatgtgcacacttgtttgtacataagtgctcatctatgtgaagtctgctaagagctgttgggctctgatgtggatccaggcctctgagaaccagctcctccctcactcctggaagaaactccctattacacctgaagtagctggcacacggtctttgggactctatggccatacccatgatcattacagtccaactctgttatcaccataggtggtggttatctcaccacctcttcctcaaagaaccaactggggctctcctaccagaagaaatcaagatcctggggaggacttgtactttgaccaaaacaggtccatcttgatagactcctaaaggttcatgtgagaccctcagagctactctgctagtcaggacagtggttaccaaacaggttgctcagtctcctctgcagctttgtgtgtctgtgagccagatgtgtcccatagatcatgggcaaagacacatgcctctctgtctccacaggagaagggcctgagatggtacgggtgacttaagatgcttgtggcagtgtgatctctttgtgcagagacagggaaaagaactagaaagtctcctatcacggatctgtaccctctactcttgctagtgctgcttggtgacttggagacacccgaatacttctcgtggctcctctactgatggtctcaaccatgtgaccattatgacataggaaatcaccttgtgtaaggctttcttcttgggctgtgggtttctgttttgttttgttgtgagatggtttgatactgaagcccatgctaaactgaaacacacagtgcagatcatgctggcctcaatctgtagcaatccttttgccttagtctcccaaatgttgaggtgatagatatacctgtggcttctccctccgcctccttcgtcctccccctacccttccccctctctctttctctctgtgtgtgcattgttctctttgtgtgtgtgtgtatgtgtgtgtgtgcctgcatctgcatctgtgtctgtgtatctgtgtgtacatagagtgtgcattcatgtgtgtgcaggttcaggtgtgtgaaagttcatgtgtggaagccagagatcaattttgagtatcactcctcaggagctattcatcttattttttttttgaaacgaggtttctcactggaacctagactcactaattaggcaaggctgagtggccagcaaggccttagaatccccctgtctctgtcttcctagctcacttgtattatatgcaacacatgcttggctttttatgtagacactggagggttaacctaggtcctcatgcttttataataagcactttaaactgactaggctacctccctagcccatacaacatgaatttttaaatgttatatgctttaaaaattgctctaggttgggtttttttttctaactctggtctctaagaatctaattcttagaaaatgagaaggtatctggccacaaggtctaagaagttgccagcaaccatttcttccactctcctacaagctatatcatgtcagacagacaggggtgggggttgggggtggcatcagcattcccttgtgtagggcaagtggctcacctgtctggttctggttgagtggacattcactccatggcagaggttcctgaaaggagttgaagaagtaccacatgacccaggcgatgatggtgttgtagtacaggcccaccatgaaggacacgaacatggaggcgatgcctgtggggagggatggcactgtgcaaggcgtactggtatctctagcaggtgagtgcatgggtacccatctatgctgtcctaccccaaggagttggtaggacattgggaagggcctgctccccgacctgaagagcagatacagcctcgacctagaaatggaatatcattgtatgatcacctgattctcccagagtgagctcaaggtcccagcattctataccctcgcctgctccacctatggccccaaaagatttatccaggcaagtggtcccagagcccttgcaaagagccttttgacaatgtcagtgggggtggctctgcctcggggagacctacttggcaattcccaagccaaagacaggtggatagattcaggaaaaaaaaaatctctgtgaagaagcagtgagagagacgagcagagatcgtagcgggcaatggctcagtagctggggagaacgcgttgaaagagaagggaggggaagtgagagccagagtcaggagtgggggctgggggggggggggcaagggcagggagagcttgagggtagggagaggcctctgggtgagctttgagctgtccagcattgggcttctgggataaacatatctgaactctctgtccgtggaccctgaccttcccttccctggctggagagcccgagccacttacttgcattctgagctctcagtgagccgtgtcctcttcgtgaggctggaggttggaccatctccaagccagagtttgtaaatgagtgaccacacctaggctggtggcagcgctgggcatccttactgagtgtgtaggagtggtcagagtaggcagcctgcagctagctcccccttctggccctggaggctttctctctaggtaggtgggaatagggcctctcccccagcctctagatcttccttgtgccctgggctgtggggactcgggcgacctctgctggcctgtctgttccctgatgactatgagcctggcctagatgctgtaacactcccatggattctaatgaaaggttgcagagggcgtctgtaagaacaggagcctggaactgattgggaaagctaaggaggaaccagacaagccctgtaaaccctaggccatctgggagagttgacacacacctatacccttcagagcagggtggatggagctccacacacccatgctgcccttgcgtagcctctgaccgatggcaaactccaggtacagcaaaggaattccctcgaacaccagaaggatgaggaatgggatcatgaaggcccctggatgggaagaaacaagacatgccattacaatccaggacaccacctggggacagacactttaacacctttaaaataacgattagatgccaccaacacccctgtggcacttgaacagagctgatatgcagttgtaagccatgtgagtgaggccgcagtaaacttcacagcctggaagtatccctcagcaggtagacagtgtccatcatcacatgtaaacactctctgctggcttgaagaaaactgccatttaacaaagcatgtgacagtgctaccatgctcactgagaataacagaaacccagaggagcctactggctggctccaggcctcacactggccagaggctcgtggacagaaggacagagtcacaagttctgagaatagctgcgcctaggacagtgtgtcactgcacagtcaactaatggtaagtctgatgtcagacaccagcatgaaaagggaactctttactagtggtgttgggcaacatggaggggaagcaagtaccctttggcttaaagcagctccacttgctggtgtatgttctttacttcaaagtgtaataagtacaataatggtctcaaataactgaccacactgccctcatctgtgcaaacccctttgttctatagacctaacaaaccctaatactaggaagtgtgccccttctgtgatttaagaaagcaatcttcaatggtgtcctgcatattaattatatttctataagagctaaattagtgaaaaagtttaaataatgtatactaaataacaatatcggaactagagtgacggctcaaaggatgctaagcacttgctgctcttacaagttccttcagtttctagcacctgcatggtgtctcacaaccatctatagttctagttacaggagatctagcccttttttctgacctccatgggaactaggcatgcacataatacatatacatgtttgaaggcaaaatactcatacacatataataactaagtaaatcttagaaagaaaaaagagctgagcatggtggcacatgcctttactcttaaaaggaagatctctgtaagttctaggctagcctggtctacatagcaagttccaggacagcagatctatattgagaaacctacctcaaacaagaaagaaaagaaagaaagaaagaaagaaagaaagaaagaaagaaagagaaagagaaagagaaagagaaagagaaagagaaagagaaagagaaagagaaagagaaagagaaagagaaagagaaagagaaagagaaaaaagagcaagggaaggggaggggagggggagaggagnnnnnnnnnnnnnnnnnnnnnnnnnnnnnnnnnnnnnnnnnnnnnnnnnnnnnnnnnnnnnnnnnnnnnnnnnnnnnnnnnnnnnnnnnnnnnnnnnnnnnnnnnnnnnnnnnnnnnnnnnnnnnnnnnnnnnnnnnnnnnnnnnnnnnnnnnnnnnnnnnnnnaagagaagagaagagaggaataccactaccaacagagaacctgtggtataggagaaaagatttgcaaactacaagtctggtgagttattaaaattctcaaaatatttagaggacaaaactcaaacaaaattcaactaaaagaagataacagatccccccaaaaaaagatgttgacccagagaagtcacagagtctattaacacataagaaaatgttcacatcactgagcatgcagaaaattcaagttcaagttatgagttaccacctcacaccatgaggatagctacaaaagcaagaaaaaaaggtataaggtcaagagaggtggagactaaaaccctctgtgctgttggtgagaaaacagaatagtacaaccaccatggaaaacagtggagtcatttgtggagtgagactagatacagaacaaccatgttagccagcaattccatatgtaggtccccaagagaattgagagcagagcctcaatgaggtgtttgacgcctgtgttcagtagctgagtggatgaacacacaccacagtctatcccatacagtgggattttaacagaaggaagaaaatggaggatttggttaagttaggcaaaaatccagtcaccaaaagtccaaatagcctactgaacaagtccctggatacaacatattcatggaaaccatagagtggaggttgcaggagcaggaagcaatgtggggtggtgataattggtgacagtttcagttggagaggatgagagttagagatatggaccacggtcatactgtacagccttaagaacacacttaaaaatagccaagaggtacattttacaatgcatgttttctcacacatgggtgctgaaggcagaaaacacatgaagctctctctatacctacagtggcaatcttacccatatcaactccctctcctctgagagacactctagctatcacatttggcctcgggtttcgagcattaagaattaacctttggggctggagagatggctcagtggttaagagcactgattgctcttccaaaggtcctgagtcaaatcccagcaaccgcatgatgactcacaaccatcagtacagctacagtgtactcatatacattaaataaatacataaataaatcttttttaaaaataacctttgaagtatgctgccctgtgggcatttggaaacagttgtagcccagtgctggggtagaactagacagaagatgacctatcccagagaagctgccatgacaatgggaagactgaaagattaagtacttgggagctattttaaaataaggataaacctgtgctgccctgtgggaagtactgcttccaagaaggcctggttccatccccacatgtgtcttgtaggaaagccagcaccaggctactgctgaaagaaagagctggcatgagctttggggcgatcacaatgcttaggagaattttcatgggtgtttactcctaacatcatcacagtagtccatctttttagaaaaacataggcagagaagtgcagcagagagctgccactgtttctgttgtttctgttggaggtctcagtgaggctcagtgaagcaaagcacaagctgaagccaagtcctaagaacccagactcaagagcagcctggcattgggagtgtacaggtccagccaatgccttgactctctttaatacttaggaatcactgacctaagatagagaaggacaagtaggatgggggatagatgaaaaggtatacaaacaaagagactggggcagacagagaggcaagaaaaaacagaaagaaacaagggaagagagagagagagatcagagacagagagacatggagaatcagagacagagaggagagacaagaaaaaaaaaaaaaaaacagaaagccagaccaggagaagcagacaaaagaagagacaaaggtatggaggaaagtatagagagatattctcatttctctaaaggtccttgggtccatggggtggaccaagtaagtgaaccaaagacggtaggccagttcttgttgtgccccatataggggagccagtcacatgggggtacgtcagctgcagtggtgcccaaatggcaaacttagtgcaagacctgggcttctgtagaagctggcaggatgccagccctggataggggtcttcatctctgagccattgtcccacctttccacagggtgtgggggcagcagaacagggttcaggtattggccacagcgacactggagctccaggatggagtaccaaggactaatgtccaaaggttcccagagataaggcctttcatgctgcccagagtcctcggcatttgctgtttacacagaagagaagcaccagagcggggagatagtggcaaagtggggctgaagggaaatggagtgtgcagcttgaataaaaccagttctgtctttgaatcatggttggaaaagtaggagtaaggggagagatgggaaagcaacagaggagccaagagacagaaggcaagtgcttgaggtggagagaggtctatcctctcctctttccagcaagggtgtgtgctaaacacacctgcatatcactgtacacaggtaaccaggtctagacagggggtggtggactcactctggggctgtagagcggatggatggaaaaggttagaaaccttccgtggggggtaacctgatccttgagggaaggcagtgactcgccaggcacccatggcatccactttaaccacaagtgctgttgttgcttggacacagaggaaaggtgggtttcccagtgtcctaaggcttgtagccaggcccaggacatatatggacaaccatgtccaggacagatgcctactgtgatatgctgtacccatgcaggctcttgagtatcctgggtagatatggtaacttccatgtgtgagaaagtgggataaggggccagctgaatgccactgctgttggagccaccctcaatatctcccgtcacattctttccatttcacaggtgagaatgccagaaccaggttgacctaagaggctgatcttggactgctctgtgtctacactacctttgagtacagttctcaggaaaagggcttgaagcaagcccatttcacccaggatcaccatgggagttggtgacaggcttatataatttttggtggacagtctgagttccccagagtaaagcgacagaggaaccagggctgcctgcttctcatgtctggtccacgatacactgggaatatgtgtagttgacaaacccaagagctatcaaagggcagaatatctaagagtcttggatccccagggacaccacccagctccattgtccttgtctatcaatagtctcttgtcccctctccaagagcctgtggggtgccctcagtcctctccatctacttaaggttcctctgaagactagatgagggcagcagcctcacctgcaggctttctctgccagggtccagaggctcagtccagaacaacaaatctaccttgcaatagaactgtttcttttttttttttttttttttttttttgagacagggtttctctgtgtagcnnnnnnnnnnnnnnnnnnnnnnnnnnnnnnnnnnnnnnnnnnnnnnnnnnnnnnnnnnnnnnnnnnnnnnnnnnnnnnnnnnnnnnnnnnnnnnnnnnnnnnnnnnnnnnnnnnnnnnnnnnnnnnnnnnnnnnnnnnnnnnnnnnnnnnnnnnnnnnnnnnnnnnnnnnnnnnnnnnnnnnnnnnnnnnnnnnnnnnnnnnnnnnnnnnnnnnnnnnnnnnnnnnnnnnnnnnnnnnnnnnnnnnnnnnnnnnnnnnnnnnnnnnnnnnnnnnnnnnnnnnnnnnnnnnnnnnnnnnnnnnnnnnnnnnnnnnnnnnnnnnnnnnnnnnnnnnnnnnnnnnnnnnnnnnnnnnnnnnnnnnnnnnnnnnnnnnnnnnnnnnnnnnnnnnnnnntctccctctccctctccctctccctctccctctccctctccctctccctctccctctccctctcccgagtgtgtgtgtgtgtgtgtgtgtgtgtgtgtgtgtgtgtgtgtgtgtgtgtgttaagggtgtcaatacaggccagagtgacccaaagacatgtggctccttcaagaggtgttctcctcactttacctaggctgtccctctaaaacccaagcccagggcctctcagaaagtcaaggctcagaacagtgtgcccaagggaccaaggctatggccaaagccctcactgccctcgccccactgtcttcccagagttggcccagaagtctgcagtactgcctgatccacagaccactgcaccacacacctacagggacggtgccgcaccccacggtccccagtgcattgttggcttagagtggctcattgtgagcccagcaccccaggcacagtcgtgatctcaggtgctgggaatctccagcagattcccactgaagcctgaactatagacacagctcttttgtggaaatcctgaacagttgtttgtggcctagcccttctctcctgggcacaggaatgacctgacatatctgctccttgcctctaaccctccatccatttgacacatccacaccctacaaagatcctccacatcagggtagtacaggagagcctaagggtgccctgcctgggtggaagtgggaagaaggccagagtctgtttgctgtgggagtgtctgcaaccaaatgtggtcctcagaaagtagagaggatccgagaacaggaggttggaaagccttgggccaattctgttgaaatcacctgggctctaggtgaggtcactcgggcagcaatgcctgggactgtcagttccctcacttgctgtggagcctggtctaagtgaaatgcactggcagcgtcatcataaatagccaacctacacatctacacagcaacacagtggccatttcagcttagctgtgacaatcatcacaatcccatcacaatgccagtgtgtgtgactgcacaaactggaagtaaagaaacctgagtcagagaaccccgattaagaggagaatgtctggaacccatacaactgcacctgtggcacacccaggcccagcagagccagttcctacagcagtcaggcctgcccagacctccattggcagctccacattaagaagacagagcctaggctcaaggtgaggaggcaaaggcagaagtcacacacacacacacacacacacacacacacacacacacggctgtctgtgatggtgtttgctagtatgtatgagtgttgtgtgaatgtgcaagtacatgcatgagggcttagtatcaactggaagatgttgtctctttaatgtaggaacctgtggggcagctatgcctgtgacttctgtgccccagctgtgtcctcctgagtcacctggatgtgtgttgcagaatccctttagtggaacaagggtcagagcctggggctctctgaagagggggtgccgctggggagacatggggcctcactgggaaagccaaggttctcttaaaggctgccacatgagctgaggctcgtgagtcaccgagtgcggcagctcctctctacgcatgctggtccaaggccagtcaggagttcaacaagaccggctctatccatgccctgtcctctgaggatcacccttgagaaccaactttccctcttccaacaggatcatgcagtacccaccttcaaagtgggcctaggtgagtgttctgctctcagggagggatgtcaggggactacctgtaccatccgcatctccagggggaggtttttctgcagccccacatagaccacctcattcacatgggcaagagtagaacacatgtccctcggcaacaactttagagactattaccctacatcttccttccctacctgtgaccctcttcaatactgaatcctgaggaacatccatccatgtccttggtctgtgttgcttactcttggaagcaggagtgctatagcttccacccatacctcacccaccgaccagggtcccgggtcctacctcctccatggctctggcataggtaggggaagcgccacacgttgcccagccccacacaaaagcccacacaggtgagcatgtactgggccttgttgtcccatttgggcctggagccggcctcttccttttcaatgacctctaactcatccagagatggaatccgctcctctaggccagggttgggcagcacaagcctcaccatggtggtcgctgggctgggccgggcctggcacactcgggcagctcggcagccaaagggcaagtggttgtgtccaggagctccggctctttatagagaacctttggcacctcaacccaagcacctgggccgaaaggaggcgtcagcagatcctcagggcgcgtcctgcagaactgttaatgccttatctgcagaggcacccagcctaaccagctaagccaccccctccattcacggacaggagatcctgctgaaggcctgggcacccctcctcctgcacaaacccagacataggccagggttgggcgtggagggggacagttcagaccactcctcaggagaaagggaggcatctccagcaaatagatcaaatagatggtgtctgttgatgtcctgtacagaccagcaggatactgattctccctagactattggagctcccagaaatctgtttcacccataggaagctgaacaacaccattattcctaaaggtggctgaagccctgttccctaattgctgctcacacaaagtgccacagtatggcttgggttcttccaggcacagctccgtgctctaagtgtccctcggacgacctctggctacccccagcttctagctccctgtagtatttgttcttccagggagcacttaaggggtgaggagactgtgccaatgccaggcagctacgatgatgaagtcttgccactggcagagtgaccagatgggagatacagagaagccagcatgacatcagggagggccaccggttgccaggaaaggctggggtaaagggccttactcagccttcgaagctagaagtccaagaaaaggctaccaagggttatgtctaaactaagaccagaaacagagatagtgttcgtttcgtgcaaacattgcagggtaggacttaggtggggcatgnnnnnnnnnnnnnnnnnnnnnnnnnnnnnnnnnnnnnnnnnnnnnnnnnnnnnnnnnnnnnnnnnnnnnnnnnnnnnnnnnnnnnnnnnnttgcagggtaggacttaggtggggcatgccctctgttctgagcccttcccctctgcctctcctgcctaccccatgactccctacccctgggaactatcctgagcttctcaagggccaaggatgttaccctatcccctttctcaaattcccctcccacctaccttggtccagcctcaagggtcagctctccagggggcccttcctggactctactgacccaacctccccctacatcatgtccttggcacacgtgaccttcctagaattcacaggacttttagtgttctgttgtctttttcctcttccttttcattgtgctctctcttttttaaatgatgatagatacactttttaaattctgtctctggttatttatttcatcagtgatcaaaacaccactagatgctaacacccctaaagcccaaatttgtccgtttcccctacattagttcctgctgatatccctgaatagcagagatgaagggagggcatcactcagggtagagcaagtgcaggggcctgacctttgaccaaacacactgggaaactagtagggtggaggccaggggcaagatgaagtttacattcgaaatatcctgcctacagaatgtgaaggagaaggtgaagaaggaccctgagatacaaagacagagaggaggagacacaaaactagagatagggaaagattcagaaagatagagggatagagatatgaaggaagaaacagaaagacacaaagagatgacagagagagagagagagagagagagagagagaacgaacagggacaaagaaacagacaccattatagagatatgacccccaaaagacccacagagacaggggcaggagagggacagagaccaagagagatacacggataaatagataaaggcaccaaagacagcagtgcagagccagaaagaagctcaaacacaggcagaggaaaaacagagacaaaaatagagacagagatagaaaaagagacagaaataaagacagagactgagagacagagagagacagaaaggcataaggagatagagatagaaacagagacagaaaggaaggaaccaggccaggtggtgggacctgagaatatggaaggaaggacagtgtggactgggaaggagatgtagcctggcccagaagaccagcaagtagactaaattaaggacccagacctgctctagagacacagtgtgaggcctatgggggtggtagagaggactctatctatgcaagcctagctaagaagaccgcactttttccccccctcaaatcctctagaccctcccacaaaagaaatgagatagagaaactgggttatgggccgatgtctcctgggcaacagcctacacaatcagtgcagagaccttacatcctgtgggtgaattgtacacaaactgtctaatgcctgtcatttcctgagaaaatggcggaaatgactctcactgcaagactggtgcccagactgagtggatgggtggggctgcgattcaggactggggtccagatggggattttactataagctctatggggtcctatcattaccacctatgtcttctgcatgtgccttatccactgaaggtgtgatgccaggtgtctcccctgccttagaacctaagtaggcagatgagggcagaggcagctctctaaggtcagagccaatcctttttccatctgtggatcttgcctcatggctcagcatggagtgaggctcaggcagatgccaccctctgtgatgccaccattaagggcctcatggtatccctgcttttttgtacgagcagaaaaatgacccggtccacaggtcagtcaatggggtctgcaagagagagagtagggacgtaggggcaagagactaaaaaaatagaaacaagacagtctgtctgatcaagtctcaagtctcgtttattagaaggcaactatgggtatatatacactctctggggagtgcagctggagacacttaaccacaggtccaggatgtataggagaaaaacaagatgttatcagagtgtgttcagctgtggtgggcttcttgcaaaaacatcatgctaggaagataagtctcgtcagagtggaaaagtaccacctgtaagtaaatagcccgagatggctgcagagatgatagcggctttctgctaagagtcggctctcaacagaaaaggccttctgtgacctcagctcttcagttgtagagcagcccagaacagcattttcatgtccagatattgtccagatattacaagatcctgcttcctcttcagaatgctctgatgtcactattggcagagaccaccagcctccaggtgatcagcagggtgctacctgcctgactcttagtcctcaccccacttgaagacccatctaagtctctctttttgcacagtgctatttccttccttgactacatagcttacaggttctaggcaaattgctggtgcctaaggctgttgaatccagatccgtgtgtctctttctagtggaagaattcatgtggacagagaaccacatatccagcccccagataatctatccaagttttaacctctcctttctcaacacgtacacaggagcagctcagtagaacctcaggagactggccacacagggccttccagacaggcaagtttcctttcagaatctaggacagttcaggacagcaagtgagagagggtggagtggctatgtgaaccttttgcttttactaaagcagcatgtgaaaataataattttttaaaaaaagattaaaacttgcagaagatattgttgacccagtcctcaaatctcaatgatcagaaaaggaggaagcctcacttagcacctgagctgaggaggtaatcaggacaaacaggacagggtcctgcagaatggattccacacacactgatgggtctgtatccacacacagcccacccaactggtggccctatgccagcatctgggagcagatgactagttcattctctcaggaacagtttttactataaatgcaacccactatattgagaagacaggtgttgccagttccatgctggaaaagacaccgtgattcctctttgccccttagttcacagttgaatatgcagaacacgtacccttccatctgtccatccctccatctgtccttgcttacctccgaagtcccagtatctatatctggctttcacttaacatcgtagcttgagaattttcctttcattgattttttttcaaatagattaattgactttaaattcccagacagttttacatttgcacttttacttagtttttcctccaagtaccatgtcctgagttgtgacacggagagctcttagtgtactgggtactcacaactcttttaccaaaacttcctgaatgcagctcatctgactatggtgctgtgttgaaatgcctgttgctatagtgtgtgcccagaaatgcctgttgctatagtgtgtgcccagaaatgcccgttgctatagtgtgtgcccagaaatgcccgttgctatagtgtgtgcccagaaatgcccgttgctatagtgtgtgcccagaaatgcccgttgctatagtgtgtgcccagagcatttcccacaggccacatgctgcagcttgatgcttgaggtggcagtgttgaaagcgatgggactgggtcttgggaatgtcaccttaaaggggaaattgggagcctggtctcttttttttatttttcttttcattcttggccatgatatagggggttttgctctactgtatgagactgtcatgatatgctactttggctgaagagcaacaggctagccatggacttaagcctccacagttatgaggctaaacaaagctttcttccttgtaagtggatcatcggaggtgtctgttaatgtgacagaaagctggttagcgcaaacatattttttttcaagtggatgactctttgtgatgttgatagattcatgtaactaccactcaggtcaagatccagaacatcccaaagctcctgctctctcccaggcatttggccccctcctcctgagactttgttttttagggtcttgggcatcttgatggctccatgcagactgtgtgctttcaactcttagcactatgatgaagtcaaatgagagtagaggtaatactgtccatgctgatcctggctgcagtgttcctggaggacatgctgtagctgtccaccattctattactctgtagccaggagcagttatgttcgtcttcattgtgccaaagccaccactgcctcttagcccattcctatctggttttatttttttttcccagccacacatccatgggagcatcactgcctcccaagtcttaaaagccttgtaagatgctgccggagctgggggtagctcaggagggtgcacaagcctggttttgatttctaacactggggcaagttaaatctagcataaagatacacgcctatagtcccaatacctgggaggcagagtgggaagattgagaatctaaggccagcctgggctacatgctgagattttatcaaaaagtgctgctaaaacatttttaagaacaaaggaccagtcctcagacactccagggctgcatgggtcctctcatgttcagtgtctctcccgcataggatcctgcccttatattttcacagaagcccatattaatcatgggttctattgttgttccatggtggcctatgacattgagttgttgactttgggccttttagccctcataatctaaaacacttcccagtccacttcctgagggatggtgaccctttcccatgcattcttgaagcttttttttgtgggggggannnnnnnnnnnnnnnnnnnnacaaatgtttcaacatactcagctattgcctttccatttctgatggacaggagcttttaatatgaatctaactacccatcctttaggaaaggctttacatcttcaaggtcctgagttaccctgtgtcttttcttgcattcttcagactgccttgctgagaggctgttccctgtgtaggtggtcagtccttcactctggcccctgagctgtcctttggctttatactctctccacccttatactctctccacccttacagcttcatcaagaaccatgatgtctaatggtccaggtcccatggccatgttcataatcttcaggcaatttggagtgttttctccaccagttaccaaccctcaacttgcactccagctcctcaagactcctattcctatccaagagattcctttctacattttggagacaagcagactgtccccccctattctcttaatgtgattgcacagttccttcagagttctgccactctttcattcctaggatgatcccaactggcccagggctgtacctttcatacccctgggtgggatcagctcataacaaatcaatttttacatctcaagactccaccatccaccctatccactatcctagttgctatgagggtcttctaggtcactccttaaagtcaaatgtctctacagtaatatctgtgcccatattgctgcaaaaagctgggtttccctcccactactggagtaaagacataccattcctctctctctctctctctctctctctctctctctccatcctctgttcccctaccgaaccaactaattccttcaatttaaaaacgtatatttaaaggccaacaggagaactcatcaggtaaaggcatctgcagccaggctgaaaaccaagttcaatcccagaaacccacatcccacatggtgaaggagagaacttctacaagttgtcttctgaccaccactgatgtgtgtgtgtgtgtgtgtgtgcgcgcgcgcgtgtgcatgcgtgcgtaagtgtgtgtgagcacgcgtactttcctatagctacaataaaaacaccataaccaagacaagttatggaaggaatggtttatttggacttatagtttcagagggataaaagtctaataccatcatgatatggaaccttgtccctataagttagtcttttgggggattctttattttattgggttcttatgtctcccaccattccaacccttattccaccctaatcccttccaagcccctattactaggtaggaaagaaagaaggaaatgaggagtagaccttagactacttcctactgaatagggcaatcgagtcccttggggtaagtccaatcttcattgtcaggatatccaatttcttcttgttgtctctttgctcacaaccacttgacaaagcacaatagcaggaaccagcagcctcctcagagcatgcccctggcccctggcagggcccttgcatttataccctctcaaaagttcccagaattccaaatgtcacacactatctgcagctgacaaaaccacacctctgctagagcctgaggcaaatcataatgaactgctgtgaagcagcctcttatcccacccctgggttaaaacagaaacatattcacataacataactaggtttgtaaagaaaccaaaattctcactacatgtccccaacgcacactttctcagctgctgtcacagggtgagttattggtgctccaccatgacatactgcctcaccgcaggcctaaagtaacagagcccagtgaccatgagctgaaacctgaaatctttcctcctgtaagctgtttatctctggtgttcgtcacgatggaaagctgatgaacatggctcctttccatcagtactatagacatttttgtgttcaaatcacaaagataccattttattcaacatctgcttggccacggctgcagttacaaacactcccaacgatgcagaacaacaagtattgatgagtcacagaaagtgtcctgcagggtgaccctaggacagctgtatcttcatatctactttggcatcatgactgaggagaaagggcaaggatgagccatcctgctgaccaaagaaatcacatatctaccagcttcttcaaagggtgagaagggcaggctcatgaggcacagtgggggatggaaagtcctggtaacaggcactcacagttaccagagtcaatgatggcttattagacactatgcattttccctaccccatgctttgagccacagtccttacagtgttttctgctgtgcagggcagtctcacccagccttcaggaacttctttctgagcatcctgacagaacaagaagccttctgtgtccaaaagatgatgccctttcagactgcatgtccacccggccctggtcaggatcctgaagtctgtaacatctgcttggttaccataactgaagaagtggtcagccacatggcctcggtctcaccaatgagcagtgcttctgcatcaccaggcccaagagctggtccccaagtggtcaacatcgtgaacattcctggccctcagagatacttgtgtggcactctagttcccatcaggttgctaggaagcagaaggaccattgggaaggatgcctgaccctgaccttggctgtctcagggtttcttctcaactctccccatccttaccctcctccatgaagaatgacttcttctattgggtggggacagttgcagagaggctagtctttcagggagaggagaatgtcatggaacccaggcttggccattgatccctgtgccaccaaagcaggtctcaaggacaccaccatcccaaggttaaatgtccctaaaggacctagcatttatacctctactcagatataagcagcaggtgtgaaaggcatttggcatgctctcgtgacctatagagggagagccaaaactcacactgttaagggacagtcatacacagtaacatcccatcttctgtggctaacagccaccaggcctgtgttgaccaaggtgaatggctggggcttcttgactgcactgaggagtgaacagggagagaagtttgaagccctgctatggtgcccccaacaatatccaccttgtgtctttcttatgagagcagaggcagaaattgggtgaggagctggaacaggatgcccatctcaaagaccaagcagtaacgttctgaaaactccagtgcctgggccatgaggcacagaggaggatccactctgatggctctccggagccctcctctgtggggcctgtgggaagggctaaattggaggaaggccatggaggaaagccatcagaagaaggctcgtgatgggcagtcattaacctttgtctgaagcagtttgtttacaggggagctgtgtttggaggccagagttgctgagcagcactcagaagtcacaagactccggatgcaccagcctctgctaagctcagtattgactctgagcccgcagttaagcccacgatattagcctcaccccttaaagtcatctctgcacattttgtttgtgtctcctgcctttgtcatctctgaaacctttctgcgacaagtgggtgggggtggggtgcagagagaggggagacaggggagaagagggagaaacagacacggggaggagaaacagaaagaacaagaccttggtgctgaaagcatcagaaatttactgtgagcctctaggctctggttactaggaggcggctcctccaatggagccctgcttgactcacctcgcaggcctggcaaggaagcattcaacctgtaagggatgactgccagccagctgtttcttactagagatcttggcggaaacaattcaggatgcagcttgattttgtctccgagttatagcacccactgaccctcagccttgtgcagaaaagaaggggagccagaatgaccggtacctccctgagcacacccactacctcagccccagagccatctgctgctttgctgctagtggccagggcttgactgcgatccttagctattatgaacactgctgaaacaagcaccttgtttcagaagtcttccttatactcttcacacacaggatttctcaaaaagtggctgatggttaagagagatgaaagctacttccaggaagcacttccaggaaggggccttggggaggatgtccctcgactccctgggagcactagttagttatcatttcaatcttgtccaatttaagaaatagaaaaatcatacgttatggaattggtttatgttcctttaacttcaggctagcttggcagtttccatattcacagacttctgtaggttttctgtgacaagctgttccacctatttccgtgggctggcaatctaagcattgcccccttgagtctttgcgtgtcacaactaagaggcacaaacaggcccagcacagcctccataaggtccatgtatctcaggctactgggctgaggcactgggtagggaagatgggagctgtataaagagactctggggtgagccctcccctgagcccagagcactagctccctactataagatgcaggtgaattaccttcaggcacttcttggcagctatcaagctgtgttggacgtttcactgaagactagtctagcccatagtatcaaggtagattgggtgttttaggaagagcttggcaggtccccagatctccaagatcccttgccaagacaactccaagaggccgtgcagcaacagcaggtagtctggtgtgaaggtggaaagctggtgctgaactgtgaatggccaagggctgttcacaggagtcaaatatccttgggggtagaagtgtggagtaaagaccaaggctggggtcaagggctgtttagggagatgactgagaaattctatagctgcttacctcatggggaaggagtccttggtctgtcaacctaaccctagggacccaagagaagagtggagccctgataggagctagaatcagaccctctcagggctccagcctgtgaatagaataagggtagcacccaaggtcacggcatgactccaccccactctgagttatcatttggcttctgttcaagccatgtttagaaacttgcaaaatggtctttaggtaaatggcccgtgccggattaaccatcaaccgagggcctggcttctgggcatgctctctggtcagtacttttccaagatgaatacatgccttgaagatatctctgagagaagccagggtaacgatagggcctaacacctgtgcctgccttgaatttgtggccttgaagttctgaaacaattgtcctagggccagtagtgcttccaaaaacatgcttctgttcccaaagcagacacactgttcctggtggtctgattcctgcccccaaaccttctgggcggtcctctaggtcttcttggtttccgagcatcttctatggacaaccctatcctttgcctcatgtgcctttctacattcaaatccttgatgtgacttcccagagagtgctatctctttgtgtgtccccagactagcctggtcatggttctccagcagactatacttgttaggtacctaagagtcctgcatctcagcatttgagatcttgccctgacctgggagttggcttccaagtaattatagttctggtcctgtgtaattgcagtgtaattgacttcttgtgcaaaaaggaaccgctattaaaaagtcactgggctcggcccttttcactggcttactaatcttcctgcagacaaagcaaggtcacacgcgcctgtattttcaaatggaagtggctagaagaaaacacagtgaaggggacatctcagaaacagaattcacagctcatgagtgacccgccttcagaaatgcctctggatattccctgtcttcttaaggtccatcccaccgtctactgcagctctcactcggatttaagttcaccgtgagcaaaagcaaccaaatcttttattctttctggttcatacactgtgaggtcccagggccaacacagatttagcactgaaactcccctttgctctttccttataaacagtgtaagggatgaacaaaggtgagcttctataagctcctcttgcatcatactcatgggccttcccacatgttaccagtagccagcagaggcaggaagtctgtggcattgaatcttttcccatgggagttcagagctatgcctaaggggccttctgtccctgggaaccttggaaggtttccaacaaggttggagcacaggagagggatttgcttaggtcgctagagttggggagacaggagcctttttatatcaccagggcttgctgcaagatgatgccagaatctttgtaaagatgatgccagactatttgtagagtctgttgatggtttggtaggggatcacttaaaaccagggcatttctgaagggaagaaagcaggcctctgttttctggggttctgacaccaagcttggctggagctagaaaagcctgacccccccccccagggcagggacttcctgagaacttttgtatgcacggtccctacaggattgtcctacacactgagagtttaggatatagaagagagagacccattcaggtagggtagtgaagaagggtgctcatatgaatgatcaagtgaagcaaccaggtgtaaccagaaaatacagaactcgggaaggcaggaagagctggcatgggcagagggaaggacccagggcatggtgatagaggtggagctggtgacagaaaaccagagaaaccagcagagcccagctggacaggatggagaactcgctgcctcatctgggatacagactgggctttctagaaaagggctggctgtagacaaaggagaacagagtgtctgggatgccatgaagatactgagaagacttggcctcagtgaccaagactcgggagaggaagcttaggggaagaggcaaaaggggagtgaggtatgaagagtaaggagggagaagaagcagagggtagagcagaaatggttaccagagttcagtttggaactgtcaagggcaaggtgtggtcttgagattggtagccagggtacagaggacaaagccggggagagggataactggggcggggagggggggtgcaatgagtcattttagaactttgaagaatgagacaggtgctgagtagaatggggcggcaggtgctaaggtcaccagaagctggaggaaggtctggcagtccaagtggaagaggacttctggaggaataacctgcaagtacctgacacttcactccttgagggcaagggtaaagggagaaaccagatcccttcccctccttattccctcctgctttactcaagtcctctcctctccttcctcctccccctcctcctcctcnnnnnnnnnnnnnnnnnnnnnnnnnnnnnnnnnnnnnnnnnnnnnnnnnnnnnnnnnnnnnnnnnnnnnnnnnnnnnnnnnnnnnnnnnnnnnnnnnnnnnnnnnnnnnnnnnnnnnnnnnnnnnnnnnnnnnnnnnnnnnnnnnntctccttctcctccttctcatcctcctcctccttcttcttcttctccttctcctccttctccttctccttctcctcctccttctccttctcctcctcttcctcctcctcctcctccttctcctcctcttcctcctcctcctcccttccctattctctttcctctacttccctttcttctttccctccctcatcatctttccctcctctcttttctttcttcttctcccctccgcattcagagaaggtgtggcctgttgttcctaggactttgcctgggtcactcccatcacctactcacaacactgtgtcccttctagtttacctcaccttggataaaccttgactacacatggacccttagtcactgtagcccagagcccaggtctgcccttagttctcagctcaggaaaacaacaaagacttcctgaaaagctaccaaccctggcagatgcagaggccagactcccaagctggcagattctacttgactccctccagtggtcatgatgcagaactaccttacctgaggcaccaaaggacaaaactcacctctctgaagaggaccccagagctacagagaacagaaaatacgaacaacaataccagagacagaatatcttagttaagtttcttcatgaccaaaacgcacgttggggaggaaagggtttattcagcttatacttccagatcatagttcgtcattggaggaaatcaggacaggagcccaaacagggcaggaacctggagacagacgctgttgcagagttaatggaggatgttactgactggcttgtttcccatggcttattcagcctgctttcttatagaacccaggactatcagcccaggcatggcactatccataataggctggctaggccctccccagcatttatcactaattaagaaaatgccttacacctggatctcatagaggcatttcctcaactgaggctccttcctcttccttatgtcaaattgacacataaaactagccagtacacagagctcttagaatttgagctcacaaggtcatgtggaaacaacaccatgaaaagaaggtggcctaagaggacacccctgtgctacctaatctccctagaaaccttgaaagtccaagaagagcctgatagggcttcttgctgagcaccaaaggtgaagccctagggaatctgaactctggataccatctcctgtgtgtagtctgctcctggcctctgagcatagagaggttccacccgatgaatgactgaatgattagacagaagaatggataggggctgatgaatgtgcaatgggtggctggatgatagatggagggagggtggtggtgggtaaataattaaataactagatggtatgtagatggtagataaatggatttgtagacaaatagttcagtggtagtgtatagatggtgaatggatgaatatgacagacagatgggtagagctatggatggatggtggagagtggacgatggatggaccctgcatatattggcaagcagggtcagtgaagaatctgcaaggctaaaacactgcagagcatatacttaagagttcaggggagctgggcgtggtggcgcacgcctttaatcccagcacttgagaggcagaggcaggcggatttctgagttcgaggccagcctggtctacaaagtgagttccaggacagccagggctacacagagaaaccctgtctcaaaaaaaaaaagggggctggtgagatggttcagtgggtaagagcacccgactgctcttccgaaggtctgaagttcaaatcccagcaaccacatggtggctcacaaccatctgtaacaagatctgacgccctcttctggagtgtctgaagacagctacagtgtactcacatataataaataaataaatctttaacaaaaaaaaaaagagttcaggggaggggctggagagatggctcagcagttaagagcactaactattcttccagaggtcctgagttcaattcccagcaaccacatggtggctcacaaccatctgtaatgggttccagtgccattctgatccgatgtgtctcaggacagtggtggtgtactctcatacacaaaataaataaaatctttaaaaagaaaaaaaaaagaattcagaggaagctgatgtcaggtcttggcacaagcaggcttgtgaaaacattacttggttgctgattctaaccctacatagtgagagagataaacaactatctttaaaaacaactcacccttctacgtgtcaagttacaaagttcaaagttaggcatttgagaaaaagcaacaagagaagcctgtggaatcttcagatattttgaaaataaaagaaactgtcacatgcaccatgtgagtttgcctccatgtgcttcacagaattccagtcagtcatgcaggctggacagccaaattctcagagtcaggggagctggaagtataggcccagggcctggctggacggaagccactgacacaagtgtcaggccctgttcctgtgtactgactgggaggccagggtgtgggggaaagaagcccttgagaactgtggtgtagcctcttttgctgcacacagacatcttcagagagaggcagagtcctcttgcttgtatttccacttctcctgtgtcctggatagtcccaggtctgcatacagagagaggtatggtaagggaggcaccctagcatctcaagtaagtgtgaacattcctagggttccaacattcaagagtgatgtacatggcctgagcccatcttaggagcagtgtcagcctctctgtttgtggcacagtggtcctgggagccaatgtgtggtttatgggcctgtgggaagatcaggagatgaaatatcaacaaaactcaaccttatatgcaagttgaagaacatggtctacagacataagatgttggtgtgtagcctttgaatatagctgtgagtcccagaaagtcttggaagtgaactggtgagccctttttggaactatttctgccctcacactccagtgagtggttctagagagagggttaagccagggggctaagtatcctggcccaagccatcagcccatgagatacttacccaagtagccttctagcttaagtaaggttctttgagtccaaggctctgaaagcatcagagggaggagagttgggacaaagaaaaggatgacggatataaaggcaaagagggcagttaaggccctggtcacttcttgtcttagttagacttttattgatgtgaagagacaccatgacgagggcaattcttataaaagaaaacatttcattggagctggcttatagtttcaaagatttagtccattgctgtcatggcaggaagtgtgtcatggtgctagagatggcgccacgagttctacatcctgattccatgaaggttcagagctttgagctacgaggaacaccccaaaagtgagagcaactgatagtattcccaggtcggcaaaagtagctaaggaatgcctctgcagaaggatggatgagcaactgatatagtcaagttgacaaccaagattagccattacagggaggaaagagcttaattggcttatacgttacaatatattgtcaggggaagccatggcaggaacttgcaggcaggaactgaagcagaggccattgaggaacactacttactgtcttgttcttcatggtttgttcagactactttcttatacatcccaggacctcctggccagggtagcaccacccacagagaactgggctcttctatatcatcagtcattaatcaagaaaatggtccacagacttgcctacaggacggggaaaggatactgggagctcagtggtcacactttctgatatttttgctgtttggcttggcttatggtgaccttgttgagttggtggtcctcagaagaaatcctgaaacaaggtccccgaaatagtgcaaatgcattcttgcttacgtgatgttcctcctctggctctgaaaaccccaagctcaagtttaagaaaaaccttgaaagcagatgacttctcggcagcaaaattactaaagtataaatgctcagatatggctggcatccttccctaagcctaaccctgagttgtctctctccagtttagatcactttatctacggcagaacatgaagaagctcaaaccttggccttcctatcaaatgtgaggaaagagaagaaagaaagaattatcatccatctcagcataaatgaaaatctcaattccacactctgtaaaagagagaattgattccagctagctgtcctctgacctccacacttgagctgtgtcacatgtacatgctctctctctctctctctctctctctctctctctcacacacacacacacacacacacagagtaaataaataaataaataaataaataaataaataaataaataaatatgtaataaatattttaaacttcacttttgtattacagactttctctccatccaccttgtgcatcctgggcatttctctgtggtgcaggctgagatgaatgacagtcacttgtagctaatgtgcttggtgcagttccatctcacatatgtgacttgtgcttggtgcagttccatatcacatatgtgacttggcttcaaccactcactagttcttcccaccctttttctagttatgttaagcatgtcttccaaacatggccacaaggtggcagcatagctgcacgactgtttcctaaaaacaccttggacaaatcaggcaggctgttaggactaagaataagaaaaggccaccaatgaggcaaacaggctaatttccgtctctcattaggtgacagacccagagataagttagaaacatttgcaattagaactggaagactccctagagaaattcttgtcaaatggactgcccaagttactagcttaaaaagtttgttgatttttttaaattgtgtgtgtgtgtgtgtgtgtgtgtgtgtgtgtgtgtgtgtgtgtaatatgtttttctgaaaatacctcttgcctttgaggagactaaacattttccaaaccttgcaactaagttgataatagaccttgaggtaatttaaaattgtatattctatctgctgttctactatgtattcaaccagtttaagcataacatgtcttcagaaaaacaatgtaaccaaccttaccatgccttaaattctccatgtaatcaacttttacaaccaaagctacatgtataactttacttttaaataatgtagtcttccatgctttgacccagaatggagggggggttggggtggggtaattgattatttgctgaaagtaaccaacagacttaaatcaaccttaaaggcaacaaatatcacataagtgttgaaagcagcatgtggatgtaggttgatagcatcagtgtgaggtttctagtgcggtcctggaccagtaaagaaacttctcttgtaaacctctgttaaatatttctgttttttaaaaagggctcctcattcctttttcataacatgttttctgtggtgttcagtaaataaaggtcaaaggcatttttagggaccaacaacagagtcaaacacagacaacaaacaaactagagacacactgcagactatgaacagacagaagattcagggagaaagagggagatttcaaatctaagtcagatcttgctctaaagtaccccaagaggaagtctctgttcttactatctcatgtaatatccacacaaatgttcgggtaccagaggtctggtcttcctagtgagaggccaaatcttgtaagttcagactccattttagagaacctgacctaagtttgaactcagataaactgacaggccggtacctaacattaatttccatgttgccctccaacaaattctgagcctagctctagcctataggctaatccccaacaagaccagcatctccaggttatcccccacccccaacaaacctgcacccccaggttacaagcccacccctattggtggcctaacaaccaccaatgcagaggggagcagaaattaagttgatgatatgactccccagcaccagctgattatattaaaggccacagtagctttgcaagcagatccttataca

SEQ ID NO: 660 - DNA, 1592 bp, Mus musculus
ttgcagaatccctttagtggaacaagggtcagagcctggggctctctgaagagggggtgccgctggggagacatggggcctcactgggaaagccaaggttctcttaaaggctgccacatgagctgaggctcgtgagtcaccgagtgcggcagctcctctctacgcatgctggtccaaggccagtcaggagttcaacaagaccggctctatccatgccctgtcctctgaggatcacccttgagaaccaactttccctcttccaacaggatcatgcagtacccaccttcaaagtgggcctagggcagtctcacccagccttcaggaacttctttctgagcatcctgacagaacaagaagccttctgtgtccaaaagatgatgccctttcagactgcatgtccacccggccctggtcaggatcctgaagtctgtaacatctgcttggttaccataactgaagaagtggtcagccacatggcctcggtctcaccaatgagcagtgcttctgcatcaccaggcccaagagctggtccccaagtggtcaacatcgtgaacattcctggccctcagagatacttgtgtggcactctagttcccatcaggttgctaggaagcagaaggaccattgggaaggatgcctgaccctgaccttggctgtctcagggtttcttctcaactctccccatccttaccctcctccatgaagaatgacttcttctattgggtggggacagttgcagagaggctagtctttcagggagaggagaatgtcatggaacccaggcttggccattgatccctgtgccaccaaagcaggtctcaaggacaccaccatcccaaggttaaatgtccctaaaggacctagcatttatacctctactcagatataagcagcaggtgtgaaaggcatttggcatgctctcgtgacctatagagggagagccaaaactcacactgttaagggacagtcatacacagtaacatcccatcttctgtggctaacagccaccaggcctgtgttgaccaaggtgaatggctggggcttcttgactgcactgaggagtgaacagggagagaagtttgaagccctgctatggtgcccccaacaatatccaccttgtgtctttcttatgagagcagaggcagaaattgggtgaggagctggaacaggatgcccatctcaaagaccaagcagtaacgttctgaaaactccagtgcctgggccatgaggcacagaggaggatccactctgatggctctccggagccctcctctgtggggcctgtgggaagggctaaattggaggaaggccatggaggaaagccatcagaagaaggctcgtgatgggcagtcattaacctttgtctgaagcagtttgtttacaggggagctgtgtttggaggccagagttgctgagcagcactcagaagtcacaagactccggatgcaccagcctctgctaagctcagtattgactctgagcccgcagttaagcccacgatattagcctcaccccttaaagtcatctctgcacattttgtttgtgtctcctgcctttgtcatctctgaaacctttctgcgacaagtgggtgg

SEQ ID NO: 661 - protein, 140 aa, Mus musculus
MPCPLRITLENQLSLFQQDHAVPTFKVGLGQSHPAFRNFFLSILTEQEAFCVQKMMPFQTACPPGPGQDPEVCNICLVTITEEVVSHMASVSPMSSASDGPRAGPQVVNIVNIPGPQRYLCGTLVPIRLLGSRRTIGKDA

SEQ ID NO: 662 - DNA, 1424 bp, Mus musculus
acctcagctcttcagttgtagagcagcccagaacagcattttcatgtccagatattgtccagatattacaagatcctgcttcctcttcagaatgctctgatgtcactattggcagagaccaccagcctccagggcagtctcacccagccttcaggaacttctttctgagcatcctgacagaacaagaagccttctgtgtccaaaagatgatgccctttcagactgcatgtccacccggccctggtcaggatcctgaagtctgtaacatctgcttggttaccataactgaagaagtggtcagccacatggcctcggtctcaccaatgagcagtgcttctgcatcaccaggcccaagagctggtccccaagtggtcaacatcgtgaacattcctggccctcagagatacttgtgtggcactctagttcccatcaggttgctaggaagcagaaggaccattgggaaggatgcctgaccctgaccttggctgtctcagggtttcttctcaactctccccatccttaccctcctccatgaagaatgacttcttctattgggtggggacagttgcagagaggctagtctttcagggagaggagaatgtcatggaacccaggcttggccattgatccctgtgccaccaaagcaggtctcaaggacaccaccatcccaaggttaaatgtccctaaaggacctagcatttatacctctactcagatataagcagcaggtgtgaaaggcatttggcatgctctcgtgacctatagagggagagccaaaactcacactgttaagggacagtcatacacagtaacatcccatcttctgtggctaacagccaccaggcctgtgttgaccaaggtgaatggctggggcttcttgactgcactgaggagtgaacagggagagaagtttgaagccctgctatggtgcccccaacaatatccaccttgtgtctttcttatgagagcagaggcagaaattgggtgaggagctggaacaggatgcccatctcaaagaccaagcagtaacgttctgaaaactccagtgcctgggccatgaggcacagaggaggatccactctgatggctctccggagccctcctctgtggggcctgtgggaagggctaaattggaggaaggccatggaggaaagccatcagaagaaggctcgtgatgggcagtcattaacctttgtctgaagcagtttgtttacaggggagctgtgtttggaggccagagttgctgagcagcactcagaagtcacaagactccggatgcaccagcctctgctaagctcagtattgactctgagcccgcagttaagcccacgatattagcctcaccccttaaagtcatctctgcacattttgtttgtgtctcctgcctttgtcatctctgaaacctttctgcgacaagtgggtgg

SEQ ID NO: 663 - protein, 86 aa, Mus musculus
MMPFQTACPPGPGQDPEVCNICLVTITEEVVSHMASVSPMSSASDGPRAGPQVVNIVNIPGPQRYLCGTLVPIRLLGSRRTIGKDA

SEQ ID NO: 664 - DNA, 46951 bp, Mus musculus
  misc_feature (1)...(46951): n = A, C, G or T/U
aattatacttgtgtttcttctttgatcagagttatgatgtgaaattctcaaataactaaaaatattatgttgaaaaacaaaacacaaagcttttgtcttattctctgcttaaaacccttcaaaagattccagttcctgaaatgtaaccaaaagtccccgtgggagctggctgtctgctacctccctccctcagcctaaccttgctggcttcttgcagatcttccaggccaaggtctgattaggcccctggccttcccatgggacaccctcctctacccattgttttctctgctctacaatccagctactttagacaacaatttttatagcttgttcttttgtttcatgcctgtctttttccacccctgaaatctgtgtgtgtgttctatttactacagtacagacaatagcatttcattttatggattcactaagaaacatgtttttctaagcttcaatcctgcgtcacagaaatacacttgaagtgtaagcttaaaagtgttaggaagagggaatttggtgaatgctatctaaaaggttggctcaaactttagaagaaacagggctgaggaaaaataatttgaatgaagtatcagaggacagtacgtggtgactaggctcctaagtgaattgttaataacagggacaccagggaaccacagtggttctctgtgtgcctggattcattcatttctaggcctgtgatgccccatcttctcagtcagtgcctgacctgcggctgagttctttgaagtgcagggaaggaagcacagccccacactaatgggctgcatcagggggcaggagacagatgaggggcacagggctctcacttgaagctaggaagccagagttgagacgtgcaaaagtgtatcactgcacaaatagagagagctgaacaccatgttctgaaaacaagaataggcaaacacacaaaattctagtaagagagtgaaaaaattgaagtctataaacttaagtagaattacataataatatttattttcaaaactcaatactacatagcatttatggagagggcactagaactcatttaaagaattagagagtacacattaatttccaggttctatggaacatttggaaaagcaccacacactgggccacaaagcaagtgtcagtctccaccagcaagtcaatactgacaagtctaatgaaagggagctcagaggacgaaagcacgttagagagtgggctccatgacagagaaaaataaacacaggatgagggagatgagtgaagaagagagagatggagggagggaaagaaagagagagaaagaaatcagaattgagggacgttctacagaagtaactgtaagaatgtcagcattgtgctgttcattgtggtacacacacacacacacacacacacacacacacacacacacacacatatcctaagcacttggagaacaagacaagaggattgccagtccaaggccaaccggacctacactgtgaaactttgtttcaggccgaccagcagcacaaggtcaatggtcagagaagatagaggctgaagagctgactcttcagaataaagaagattatagacacatatcaggaagtaatgcctgacccaggattttctgtagccatgaaatatgttataagaacaattggtgagtttgcaaaccagtcttttataaacattggtttcctggattttaaaaattggtttatggttatagagaaaatgcccttgttttaaacaaggactggggtgctaggggtagggatccatcatgcctgtaagtaaagtagttcagaaaagctctgtgcatgcaagacagagatgaagaccaagtaagcgggggaaaccctaactccagggaaaccgtcatgggcgagagaagacttctcattatattctttcaaattttctttaaaaaatgtaacaaacttgtatgtatgtacatgtgtgtgcatatgcgtgtgtgtgtgtgtgtgtgtgtgtgtgtgtgagagagagagagagtcagagtcagacacacaacacacacacacacacacacaccagagaaagagagagagagagagacagagacagagacagagacagagaaacagagacacagagagagagagagagagcacgagcacacacaggcatgtgtctgccatagcacacctctggaggtcagagaataacttcctggagtctcttgcctccttccacctggtttcctcggcagggtctgtcttatgtctgccgtttacgggctttgtatccaagctagctggcccaggggctttctttggtccctccctctctcccaccaggtgcaggagagcgaagattacagatgtaatctgtaccatgatgtaatgtaccatgtcatctttttttaacaaagattctggggactgaaccatgccattaggcttgtacggaaagaacctatactcactgaaccagttctttggctccttttccaacttttctaaaactttgaaatggaataaaaaaaatgtgtatgtgttcatatgcctcaaaaatttaaagttactgtattcagaggtctcagttttggataaataggtacttcattatcccctttatgttttaaatattttataatttaaagggaaaaaatgtagcctagccattaaatctagcctttgttcttaaaaggactgccctgagtcagaattgctgagctgttattcactgcacagaaggtcacctgtagataggacaaagtgccctctgggctgcattcctaaggctttaagcacacaggatgtgctggaagtgacctgtccagttcagcagctctggcttgacttcttatctgtaaacagcaggggctctgtttttctctttactttacaggttacagaggtaataaacacttaaaaacaaacaaacaaaccaaaaaacaaaaaaacaagaccctttaaagcttgtttactccttcagttcctgtacttttgccagtgcagtcaacatttatacaccacactgtaactgaaacactgtactgatgatataggcaggttatcaaaatgaataaagggggcccttgaggtggcttagtagacacctgtccagcaaccggccagcctgagtctaacctccagacctgtgatggcaagacagaaccagctcttgaaagttgtcctctgactttcacatgtgcactgtggtacgaacatgcctaacacacacacacacacacacacacacacacacacactgaataaacaatcaaataaagacacagtgagctcttactccaaatccacaacccaggataagggcctggaaagtggaactcaagacccaaagtggaagtccaaaagaagtcagcttgttccatattatacacctagtgaccaataaatccaagatttgccttctctgtctgactccaagccacatcacaggagagaatctcatagactggatgtctctagggatgagtcacgctggatagagaagtaagtgaaaagctctaagctactccaggttagagcagaaacctcaaaatcatctggggaaggtttcccccatgagttactgttacttctagagattctgggataagaaggccagcaaacttggtctttacagacaaagtctccctaaatcttctggcagaagatagctagaaagccctttaaccagttttgtgctcccccaacccaaataagacaaactgatagttcagtaataattttagtgtatataaaagaagacaggggctgacgagatggctcagtgggtaagagcactggctgttcttccgaaggtcctgagttcaaatcccagcaaccacatggtggctcacaaccacctgtaatgagatatgacacccccttctggtgtgtcagaagacagctacagtgtacttatgtattataataaataaatctttgggccagagcgagtggggctgactggagagagcagagtcctaaaattgaattcccgacaatgacatgaaggctcacaaccatctgtacagcaaaacccctcagccaacattcaaacaatgaggtttgctgatctggcacacattttcctgtatattaaatactctgaggtagttccagagagcacgtggtttgtgtggtttcataggcctgtgtccaagcatttctgccctgatacactcacacacacacacacacacacacacacacacacacacacacagcgcagcatcctgctatatagcctagtttggtcttgaactcacgatcctcctgcctcattctctcaggtgtcagaattatggctatgtttcctatctaattactattttgctatttcctggtcaagaaacgtttagtattgctatgagtgagtcctagaaagtgatctaatgagtcactctagtctttgatatgtaacctccctggttgtagtttttttggtctgtatgaaaaggaataaaagcctgtcattccaacacttgggacacagaggtaggaaaatcagaaagccagactcagctatataaggagttcaaggtcatcctggtctatgtaacaccttgtcttaagaccacaaaagaggtgcctcttttaatcctaccactcaggaggtagaggcaggcaaatctctgagttcgaggccatcctggtctacagggtaagttccaggatagccaggactacatagagaaagcctgtctccaaaacccaagtcaaattaaaccaaacaccagaaaccttaaatcaaaccaattcaaagagcagcaggtacacaaatacaaacaacaaataaataaacaaaccccctaacttacaaagatcaatgggggaaagcatgaagtctatgattcccagtgagtactctagcgattttcttctcccacctctgcacacatagctaacagtaatactgaccatatgatgatccaccctcgcacatggcaggctatgctctaagcactgtccaggatctccctatttaatcctcagttcaacctgcacaatgagcacctttattctataaatgaagatacagagactagggcaggacaaacacctatttactaaattaaatattctcatgttgctttaaatatatatccaattctggccaacactggagttttaaaaaagatctatgctaacttttaaggcaaaactctacccctgctttgcacatttctttttatacatatcgcagtttcttattttgttatactgtaaggctctttaaagtatgagaatggcacaaaaagaaaaaggtgaaatagattttaaaaaaagttaaatttctcccttatactgtctacaatacaattcatgtggactaaaatgttaatgggacaagtttccatgtaacttacaagagagtatgagccagcataaactgatcttggcacaaagagaagttttttttttttttttttttggtttttgttttgttttgtttgtttttggagacagggtttctctgtatagccctggctgtcccggaactcactttgtagaccaggttggccttgaactcagaaatccgcctgcctctgcctcccaagtgctaggattaaaggctactgattaaagtggaacccatgacaagggcaccgtttgtacacggttttccaaatgtgtgcttctgatatagttcaaagtggttcactacttatcaattgtaccaagagatggctttggaaatcaataccatgattactcaacctatcagtaattcaagatcaccatacattatacactctaaacaatgcaaacccagcagatgtatctgaagaacatggtccagtatcttatgcccaaagcatacccttgtgtatttttactggttggactttgtgtgtgtgtgtatgtatgtgtgtgtgtgtgtgtgtgtgtgtgtgtgtgtgtgtgtgtgtgtgtgtgttggaggagggggagggaagaaacagagattctctaaataccccaaaccaggccagtaatctttatctttacctttatctcccttccccattcttctgagagttaggagcagccagcacacctgatttcttaaagcagacacttgacagactcctgtcttcagacagtctggagccaccacttgtcctctgcaaaatgaaaatccattagcatcagaggtttggagaagtactaccatggaaaacaagtcaaactaattgtattctttactttttggttgttgtggcaaaacactattactaaaagcaaccattgaagaaagagtttattttggctggggaagaaggtctgtgtgtgtgtgtgtgtgtgtgtgtgtgtgtgtaaaagtccatcatgacaaggggtagcatggctgtaaatggacatagcggcaggaccagggagctgagagactatgtctccaccattaacacaaagcagagaaagcaagctggaagtgtgtggcaggtagctataaactttgaaaacctgcccccagtgacttacttgctccagcaaggctgcaccaccaactggggacccagtgttccagtatctaaacccactggggaaacttcattcaaaccattacactgacttagtctgacttgactacaaaatctttccttcaacttgatgctgctaacctccatccgttaaagcatacttgagtgggaaagtgcagttgtctgtggagaaagtgctgttgtccctgtgttgtaattttcttgattgaggctccatttgaaggactttctgaatgccctattgagactcagttctgatgctgtaaatacacaaactccacattaacttgctgcttgccaaaatacacaacccccagaagattgccttagacttaatttttgttatatcatattttgttatattcacatgttagagaactataaaatgatttacattagcaacaaatagttctaaaatgtattttgaattatactttgcttttatccattaagatatctcctatgcaagtatgaatatgaagtacattttgttatgatttttaagtatcacaaaattagaacaagttatactgtttaaggaacagagctaatgggagggaaggaaaaagaaagggcagaggagggagaaggagagagagactaagacctttgagaaaaatgcaaggttattactagaattaagttgtaactgttaagtgacctcttaatccttattttccttcctaacaaacatatacattgtgtactatgtaaaaaagaaagagagaggaggaagaggaaaagaaatacaaatgcaatcacaaacagccctggggcactggttacttaggctggctatttaaattcatattgatttgaactgtaaaatgttaggtttatgtccattaagactcaacttcaagccaggcacgatggtgcatgcctttaatcccagcaattgagagatagaggcagacagacctcatgagttctatgccagacttgtccacaagtgaattccaagctagttatgattatatagtgacagcctgtcttgggaaggaaagagcttcaacttcagccatatattgtatctgtaatcccagcacctataaggaagattgagtttgaggccagcctgagctagaggtcagagagaccctgtctagcaaaacaaaataagacaaaaacaaaacaaaaaacctcctctgtgcctatggctcaggcctgtaatcgcagctagtccagaggcatagacaggaggatggaaaatcaggggtctatctgggctatagagtgagttctagaccagcctaagaaacttgggccttgtctcaaaacaaagattaaaaagaagcctgggatcacaactcagctgtaaagttcatttctagcatccatgagaccctaggttcaatcttcaacattacaaattaaaaacaaatacagctttggaacaacttctattacatttgcttttaaccctaattatgttactaatgaggactcagacactgaataaagtacttaacttactgttgctcagtttcttcatctccaaaatagaactggttatgatggtacctgtttcaatattttaatgttaactaaatacacaggaaagatgctaatgtacagttggtggtaagtaaatacacaggaaagatgctaatgtacagttggtggtaagtaggcgttagtagctactactactactgttattattaaacaattttgatccctttaaaaacaacaataaacatactaaagtggagaggtgaaagcctgtatggccccaaccctgcacaaagaactctaagcagtgaaggaatgttgagaggagaggaagcagtcttacctagggaagagcacaccagtaacttatcccataccaaataatcaaccttgaaaacatgcatgcaaataacagtatacagactgaacaggttgtacttatgtatttagaaatacatgactatgtcatagtaagcaatgaaaaagctattatttttacattacttttaattaaaataataatcagataacttcaacttctgtccacttctgtcaagtggacagaaataaacatagagcctaattatcctgaatttcagagaaaagacagtgtgtttaacacaaaggacagttatagatctatacacacacacacacacacacacacagtttgaaaaacgcatcagttgagaccacgaatttgaaagagagcaaggaggggcatatatgagggttaggaaggaggaatgggaagggacatataattatattatagtctaaaaaatagagtgaagtgaaaacctcctatatattatgcaggctgggattatatctcagttagtagaatgcctgcctatcatgcatgaagcgccaagttcagcccttaacactgcataacctaggtgtagtggtatgtacctctgaccctggcatttgggaggtggaggcagaggacagaaagttcaaggtcagttctctactatagggagtttgaggtctgcctgggctcaaaaagtaaaactgtatactatatatgcatagaaaaaccttaataattgtgatctctaactgctaacagacaacgttaactttcttttaaacttattttttaaacatttgatgacaagcaatttccttaacacttaaaaaagaagacaggttggtggcaaacatctttagtcccatcactcaggagatagaggcaggtggatctctgtggatttgaggccaccctcgtctatttagtgaattctacacaaacaaacaaacaaacaaacaaataaacagacagacagacagacagacatacaaaaagacaaatataataacaggatgttttctttaaaagtgttcttacaagttggcgatcagtaattctcaaactgtgacctttcatcattaacctaccagcttataactacgaataagatagaagctcagttacggcacttgctagctaagtggtaattttaaaaaaatgacatcgtatttgaaaaattaatatacttttaaaaaaaagtagcctcatagaaaactcccttttccatgttcttaggacctttaacccggacttcctagcagtggtggtggactttagaccctcttccacaccaatccttttcacttttgttttccccaagcacactcctttctgcgcaaggggaaagtgcagggggacactacccacagcagcctaggaatgtgatttctctgactctttctcgtgggccatagaatgggggacaaactacaaaagagatccagttaaaaatacaactaccgacaagctccgcgaatcatcgacttcctttctgcccccaccttccgagtgccttcctcttcctcctccccgcgtgcgtcgagtcgctttgcatcacggtatttgaagttctttctggacggaagcgcctagcactccttcgcgagagaggagccggaagactctggttcccagagggcagagcagaagctacgcctgcgcagtctcagtgagggcgtgtatgtctgtgtctgagggagagagcgagagtgagtgagtgtgagtgcggggtggggtggtggccgttacgttcggggcaacggctaaggcagtggagaagtgagaagagaaacaacgtccggcgcttccgccttcgcctaggaggaggaggaactggtaggaaaaggaaagccattcgccctgggcctggactagacctcgtcgggccggcggaggtctggctatgtgcctttgagggtcgcttgggacgccgagcgagagccgagagcgatgtctcagccgccgccgcctcctccgctgccgccgccgccgcctccccctgaggctccgcagacttcgtcgtctctggcggcggcggcttctccggggggcctttcgaaacgaagggaccgaagaatcctttccgggagttgcccggatcccaagtgccaggcgcgcctcttcttcccggcctcgggttctgtcagcatcgagtgtaccgagtgcggacagcggcacgagcagcaacagctgctgggagtggaggaggtgaccgacccggacgtagtgctgcacaatctgctgcggaacgcgctactcggagtgacgggggctcccaagaagaacacggaactggtaaaggtgatgggcctctccaactaccactgcaaattattgtcgccaatattggcacgctatggaatggacaaacaaacgggccgggccaagcttctccgggacatgaaccaaggcgaactgttcgattgcgcgttacttggtgaccgggccttcctcatcgaaccagagcacgtcaacacagtgggctatggcaaggaccgctccggaagcctcctgtatttgcacgacacgctcgaggatatcaaacgggctaataaaagtcaagaatgcctcatcccagtgcatgtggatggggatggacactgcctagtgcatgctgtgtctagggctctagtaggccgagagctcttctggcatgctctgagggagaatcttaagcagcactttcagcagcacctagcccgatatcaagccctgtttcatgactttattgatgctgccgagtgggaggacattatcaatgaatgtgaccctctgtttgtgccacctgaaggtgtccccttaggcctgaggaatatccacatattcggccttgccaatgtgttacatcgtcccataattcttttagattccctcagcggcatgagaagctctggtgattattcagccacctttctacctggcctcatacctgcagagaaatgcactgggagagatggtcatttgaacaagccaatctgtattgcgtggagtagctctggtagaaaccattatattcccttggtaggcataaagggggctgccctgcccaaactacccatgaatttgttacctaaagcatggggtgtgcctcaggaccttattaaaaagtacatcaagcttgaggaggatggtggctgtgttattggaggagacagaagtttgcaggataagtacttacttaggctggttgctgctatggaagaagtctttatggacaaacatggtatccatcctagtttggttgctgatgtacatcagtatttctacagaaggactggggtgataggagttcagcctgaggaagttacagcagctgctaaaaaggcagtaatggacaatcgccttcacaagtgtttgctttgtggtgccctttctgaacttcatgtcccttctgagtggttggctccaggagggaaactgtataacttggcaaaaagtactcatgggcagttgaggcctgacaaaaattacagctttcccttaaacaatttggtttgttcatatgatccagtaaaagatgttctgctaccagactatggattgagtaatctaacagcttgtaattggtgccatggctcatctgtgcgaagagtcagaggagatggctctattgtgtatttggatggagacagaactaattctaggtctactggtggcaaatgtggttgtggattcaaacatttttgggaaggtaaagagtatgacaatcttccagaagcttttcctatcactttggagtggggaggaagagtagtcagagaaacagtatattggtttcagtatgaaagcgatccatctttgaatagtaatgtttatgatgttgcaatgaaacttgttaccaagcactttccaggtgaatttgggagtgagatcctagttcagaaagttgtccacactatattgcatcagactgcaaaaaaaaatccggacgattacactcctgtaaatatagatggtgctcatgctcagagagttggagatgtgcaaggacaagaattggagtcgcagctaccaactaaaattattcttactggacagaaaacaaaaactttgcataaggaagaattaaacatgagtaaaactgaaagaactattcaacagaacatcacagaacaagcttctgtgatgcagaaacggaaaacagagaaattaaaacaagagcaaaaggggcagcccagaactgtttctccaagtactattcgtgatgggccatcatctgcacctgccacccccaccaaggctccctactcacctaccacttctaaggagaagaagattcgaataacaactaacgatggacggcagtctatggttacccttaagccttcaacaaccttttttgagcttcaggaaagtatagccagagagttcaacattcctccatatttacagtgtattcgatatggctttcctcctaaagagttaatgccaccccaggcagggatggaaaaggagccagttcctttacagcacggtgacagaattacaatagagatcttaaaaggaagagcagaaggtggtccatccactgctgcacactcagcccacactgtgaaacaagaagagattgctgttactggtaaactgtcatctaaggaacttcaggagcaagctgacaaagaaatgtactccttgtgtcttttagctacattaatgggtaagagcaattaaactctgatggtgtatttttattgtgagtatgaaatactgaggattttgttgttgtggagagggaaaagaaaaacctgttgttaccataaatatttgattctatacataggagaaaattattttcctgtttggtagtagatactaatatgattattgagtgaattagaacagcttgaaactacagaatgaaagtagttactcaactgtaaatgagattaattaaatttatttcaaaatttatttttaaaaaatgtatttatagttaaagccctttctttttctccctttctgagctccatcttgatcatttttcatttatttttaatttcattttcctgtctgtcatgtgatttcaggacttcctgtttgatgaattgcagtttctggtgtttatagtctcactgagctcccacctactagcctatctcttccatttccggttcttccttcattatgtttttcttatgtgtatgataggttttgtgtttaattttatggttcagtgactctggcataattgcagtgaatagctcataagaaacaaacaagaaagatggcaatggggttaggaatttctttttgataatttagtataaattgaaggaaaatatactatcagctaaatactgtaatttcagcctttagataatttgggatcctgcctagtggtacgctatttacattatttgcttaatctttgtctttaagttggtgtgttaacatgctttacacagttttcaagtatgaagaaaatttaaaggttagttgttacaagagacttaattttgttgagattagacctttttgctagaaaagggctggcttttaattctgttttctcagactactaaatagtagtgaattgggccttggtctactataatgatttgttattactggctttaagttgggagcctactcatgggagatataaaagctgtacaaactttcaacttgatattgtccattttggtttggtaggcataaaaactgaattgggtaaatgaggaaaatacctaataaaaaatattaaaaaagaaaaaaaactgaattggggaaatcatccgaggtattttctatatttctgagacattgtggtttcttagagattttgtggaatagaagaatggctgtatgatgttgggaatcagaagacacaatttgattcttggctcaaattacttagtgatttcaggaaaactattaactccccaatatttcaattgcttctgtacaaaagatcacttgtagttgatatgaacatgggtaaagtattcccagaactctgaaaataacatcctcacaaaatgggcaaaattaggtatatacagaatttttttttctgactgcctggccagaaaatattttaagactggcagtttcctaagctaaaacagcgtgataatgtctgtcttaagagagggtaaatttgaacatttatgtggtgaatatctgctgttgactttgtatatcccatagctagtgcccaacgtatagtaagcaatttgaagggttttgttttgtttttaattgaatttaacatgtttaaagaaagactgtagccggcgtggtggcgcacgcctctgatcccagcactttggaggcagaggcaggcggatttctgagttccaggatagccagagctgtacagagaaaccctgtcttgaaaaacaaaagaaagaaagaaagaaaaagaaaggaagaaagaaaagaaaagaaaagaaaagaaaagaaaagaaaagaaaaaagactgtatctgcagaaatggaatggatagtcagcattcaacattgaaaaagagtctgaaaagcagaatttggcagtgcttatacactgttgtacataagaaatttatcacctggggttcatgataattctggtaactagaaaggtaatctttgctgaaggataggaatattttttgagtcctggttttttgcgcctctgccagaacaccctctttacctgattccatgattttataagagcatttacttttaccattcatttagcttcatttgataacaggggagagtataggtaaggattccgtttactccattgtagattaatacattggcatgggtgagattatgaatcagtagtcttaagtatttgcttagtatggtaatatattctgtattgaaagttagtaaaaatactagcttataattacttttcaaaaagtattgatttaagcttcctgcatctaattttctaggaacgagtttagactataatgagttccccaagatgcttctattctgatcctttgctgaggaagtcttctgattttatagcttttatcaaaacacaaccaaccttcttttctgtagacataaaaaatgataaacctcaaatatatcagtcatagcattttagaaaaatgtcttatttgattacacacacacacacacacacacacacacacacacacacagggttgggggagagagaggggtgtgtgtgtgtgtgtgtgtgtgtgtggacttgaagtagccagggatgtgttttccctttttttgggctggttcttttagctaatggcttcagatggttcaatttatcatgctggggagggtgtgatagaacacagtttatatcatggaggtcatggggtagagaaaagggctgttttgagcttttatttgtttttgtggtgctaagattgtacttaggaccttaccttcttatgttttaaagtacaatattcattaaatagattttgtattagatcaacaaaataatatttcagtcatcttggtatggggcattcatggaaacagtcacagttgctttgaaacatttaatggtagtatatttcacatatactttcagtacattttattcagaccattggagtttatttaatttagtttttgcagactgccatcttcattacttgtatagtgtctaaatcaacccctaactatgactttgcaaaatatattagtacaattccttgtagatcacttgtttgtattttattatatgataactatggtagatatgatctaccataagaatttggctcatttcttttttcttactattttctgattatcatagcattatcaggaggtaaagataggtttagtgaaaacaaaaattgactgtagtttagttatctcagtttgctaccaacttttgaaaaatggagaagcttattggattttattacactgtttttcttcctgaaaggactgtggctttttactatatttttaaaacataggacctatttgcgtcaatccccagcatccaaaattctcataacacttgtaatttctttttttcttattggtgaaggtggtactggtagttgaatccaagatctcatgcatgcttagcaaacgtgtttctacttactaagcccatcataataccccaggattttccaagatcacatttggaattcagatgtttattttttaggtgatgttggatctctatattattattctctctttatgtttttcttcaaatgctaggtgaaagtttgaaatctagattatgcttatacatttatttatggtggtattctttatgtgccagtgaatggtttcacttatttatatttatctgtagtgagaatagtcataaagttgaatatgatgttgattgtatacattataggtaatttatgtaattatactttgaagattaagttaatcacttctatgatttagccatttgatatattttacttgcttttattttcttccaaagaattgcaatatatataaagtaacatgtggtagtttttttgttttggttttagttttagttcgagacagggtttctcttggtagctctgggtgtcctggtactcactttgtagaccacctggcttcaaactcacaagagagctacctgcctttgcctggacttaaaagtgcacaccaccacactccaccttgaaacaaggtttttaatgtaaattttaaaaattgaaactagcttctgttttttttttttttaaagattctaatatatatacatgtatatatttaagattctaatatatatatatatatatatgagatatgtacactgtagcagctgtcttcagacacaccagaagaggtcatcgaatccggttaaagatggttgtgagtcaccatgtgattgctgggaattgaactcagtacctctggaagagcagttagtgcttttaaccgctgagctatctctccagccctaaaaatcgcttctgaaatagaaaagaaacagtagataaagtagaagaaaatcatcttgtagtactcctgctatgtatatctctgtttagagaggagaactgaaggctctaggaaggattccagaagaagacagtgaaaagagattatttatggtggtttattttctatcttcacacatagtacatcaactagaaatgtttactgttgtactatgaaaaacagctgactatcaagtaaaactagttgggggactatcacagaatactgtgttgatataatggaggcttcaccataatattcctctttttttttttaaagatttatttatttattatatgtaagtacactgtagctgtcttcagacactccagaagagggcgtcagattcttgttacagatggttgtgagccaccatgnnnnnnnnnnnnnnnnnnnnnnnnnnnnnnnnnnnnnnnnnnnnnnnnnnnnnnnnnnnnnnnnnnnnnnnnnnnnnnnnttaagagcactgactgctcttccaaaggtcctgagttcaaatcccagcaaccacatggtggctcacaaccatctgtaatgagatctgatgccctcttctagggtgtctgtctgaagacagctaccaggtgtacttataataaattaaaaaaaaaaagtttgtcctaaaaagatggagctactttttgtttttgctgagttgatttattagtcttgaaaacaggtgatggtgttggttaggctttacagattcagttatgttactgtcattttttcttcttttcatacatgcatgtgtgtaccacttgcttgcctagtgcccccaaaagccaaaagaaaatgtcagatctcctgaaacagctgattgtaagtggccaagaatgtgttgagaattgaacccaggtccttcctgtagaagaggagcaggtgctcttaactactaagccagaaaaacaaacaaacaaacaaaaacccctcatttgtggtactcattctatgtgtttattcaaccagtattaagaatgcagttgttcagtgctgtgccaggtcctgggaatagaagtctaatgaaccactgacctttccctgaatctgaaaaccttttagtttaaaagaagaaagaaaaagtacactaagttagccagcagtataatagtggccttggtatttctgtaaatattgatatcaaagtaggtattactccaccactcagatgaattgtagaggaagtgacacttacattgaattttatactttatttttattgtacctatttaatttgtgtgtgtgtgtgtgcatgtgtgtacatgctccacagcacatatgtgtaggtcagaggacagcttgagggagttggttttcctcctaccatgagggtctggggattgaatttgggttgtcacgcttggcagtaaatgtgtgcctgtacctgatgaacaattattgaattttaagtttattctttaaactgccttttaaggaatacgtaacaattattggtcttaggacactggaaccgttttggtcttaggacactgcaacagtttgcgttgtgtcatagaaattaaggcagagggaactgggcttgatgatggtgtgtgcctataattccagctctcaggaggtggaagaagaggaaggacgattgggagttgtaaactagtctcagctacttggtgagaccctgtctcacaacaacaaaacaaaacgtcacgggaaggtgtggtgtgaggctggtagagaaggactagctcttgtattatgtaaaaaaggatcttgggcttttatctatgttcttttccttttttttttttttttttctttcttttttagacattgtccgataacttacactggccttaggactccttgtggagctgaggatttcttttggactactttgcttcagtgtgggagatttaactctacatgaacaagggagttggggaggacaagactcagggaaaaccagttgagtgggggcagtaatataggcaggagacagtagtaggagaaggtaccatggagacctttatgtgactgtggtgggcttgtactaagatcctgatctccagtcccctatcttatttatttctcttaccaacaaagataacttactggaggtatttatataccaaagggaataatttctcttttttatagccagttaatatcgtgcatatttataaggcaggaccctgaatagagctgtcatgtttgttttaacatgatttgaactctagtagatgtttaattttagggttatgtatgaactttggattggtgtgaagattcataccgtatcttgccactgctgcatgatcttgggagaattatttaagcattgttctgagctttgtttgcttgtaaatgaaatagagagcttagttgtgacagtagaagatgatattaaaggtaccttctcagctcaaagataggtgaataataatagcagcttggatggtattatatttcctttaacctattaccctttctggggcaaaaattagttcttgggggatagagagtaaaaaactttacccttaatgtataaaattaaacacaaatacataacataaacaaaatagtatagtagagttatctgctattcatactttatggggagtgcagctgatgagactttatggggagatgatgaaaaacaaagagatacatgacctgcttaaagatgacatggtctggaaatgtgctatttttcacattactctcactttggcacctgttcagattcttacccccaaaagccaaaacaacaacaaaaaacccaaaccaaccccaagccctgctacccttatgttttccaaataaataatatccttgaatattttagaaaaactgtgactatttaggataagaatgatcgtaattaagtgaaaggttatcaccatagaaagaaattttctagataaaatttagtcagtatagctgttattagtataggagttattagtttatttgtacttggggggatttgatattttaagtcaaactttcctctatgtttttatttaaatataaccattttggtaatagtactgtattattagtaaaaagtgtttttgtaattgaatgttctagttaaatgaaggttcacgtgccaaggcttttaaaattttctattttaaattggttcactaaagataaactttagggggctggagagatggctcagtggttgagagcaccgtctgctcttccagaggtcctgagtttggttcccagctaccacatggtggctcacaaccatctgtgatgggatctgttgccctcttctggtgtgtctgaggagagcaatggtgtactcatatacataaaatagataaatcttgaaagaaaaagaaaaaaagataattttagctgagtattgcagacatatgattaattagcatcagttatttccatacaagactcaggcccagcagtataattttctagtaagaaagacaaaaattaacccattattgctctgtgttcttattttctatgatgtaatgatgaaaataatgaaagtataaagaagcagcgcattggcatattctattcttccgttctggtgctttcaaatactgttatctttttttcccttttgttggtagggattgaactctggactttgggcaacaaaaaacaactagttaattgcttatatttaatctctacttatttttctccatggctgtttctttttctttgcttttaacacacacgtacacaatataattctgtattctagttaaaagtgaatatcttttcataatcttttctgttcctgaccagtgtttaccagcaagttttccttgaggaactctgaaacttcaaatatattttgttttatatgctcaatactgatttgtgcaattttaagaacatttttgttagctcctatatttaaaaattgagggaacttattaaaaatgtagattgttatggtgtcctgaagagtgacatgggccttcaaacactgggttaggcttctctgtaacagcagttagcagtaactctcacctttacatggtctgtctcttttctagaatgccattgtatctgtgttattctggatctgggccctgcagtctcctttaggctaacctgtgtcagcatagtcaacgatggccctcttatgtttgagctcacactttgtctgcttttgtctttcaggagaagacgtgtggtcttatgcaaagggacttcctcacatgttccagcagggtggtgtattctacaatattatgaagaaaactatgggtatagttacattttgcttttattcttggataatgtttccatctaagctattataaacttgagaacactcaaataggggcccagtgagatggctcagtgggtagaggcaaggcctgtgctgacaagcttgaattgacaacctgattttcacccctaggacctccatggtagaaggggaaaggcaggttctacagctgtcctctgagctacacagtgcactgcggcccatgtgtaccatacacacacacacacacacgcacgcgcgcgtgcgcgcgcacacaaacacacacacaccacacaaaagaagtcaaatacagtaatagtatacaaggacagtcaggatagtttattagaaatactgacagttgggcttagtaccacatgcctatactccaggttggagtgttgatactggagaactccttgagcccaggagttcccacccagcctgggcaacataatgagacaccccacaaccaccatttttttttccattttttattaagtatttagctcatttacatttccaatnnnnnnnnnnnnnnnnnnnnnnnnnnnnnnnnnnnnnnnnnnnnnnnnnnnnnnnnnnnnnnnnnnnnnnnnnnnnnnnnnnnnnnnnnnnnnnnnnnnnnnnnnnnnnnnnnnnnnnnnnnnnnnnnnnnnnnnnnnnnnnnnnnnnnnnnnnnnnnnnnnnnnnnnnnnnnnnnnnnnnnnnnnnnnnnnnnnnnnnnnnnnnnnnnnnnnnnnnnnnnnnnnnnnnnnnnnnnnnnnnnnnnnnnnnnnnnnnnnnnnnnnnnnnnnnnnnnnnnnnnnnnnnnnnnnnnnnnnnnnnnnnnnnnnnnnnnnnnnnnnnnnnnnnnnnnnnnnnnnnnnnnnnnnnnnnnnnnnnnnnnnnnnnnnnnnnnnnnnnnnnnnnnnnnnnnnnnnnnnnnnnnnnnnnnnnnnnnnnnnnnnnnnnnnnnnnnnnnnnnnnnnnnnnnnnnnnnnnnnnnnnnnnnnnnnnnnnnnnnnnnnnnnnnnnnnnnnnnnnnnnnnnnnnnnnnnnnnnnnnnnnnnnnnnnnnnnnnnnnnnnnnnnnnnnnnnnnnnnnnnnnnnnnnnnnnnnnnnnnnnnnnnnnnnnnnnnnnnnnnnnnnnnnnnnnnnnnnnnnnnnnnnnnnnnnnnnnnnnnnnnnnnnnnnnnnnnnnnnnnnnnnnnnnnnnnnnnnnnnnnnnnnnnnnnnnnnnnnnnnnnnnnnnnnnnnnnnnnnnnnnnnnnnnnnnnnnnnnnnnnnnnnnnnnnnnnnnnnnnnnnnnnnnnnnnnnnnnnnnnnnnnnnnnnnnnnnnnnnnnnnnnnnnnnnnnnnnnnnnnnnnnnnnnnnnnnnnnnnnnnnnnnnnnnnnnnnnnnnnnnnnnnnnnnnnnnnnnnnnnnnnnnnnnnnnnnnnnnnnnnnnnnnnnnnnnnnnnnnnnnnnnnnnnnnnnnnnnnnnnnnnnnnnnnnnnnnnnnnnnnnnnnnnnnnnnnnnnnnnnnnnnnnnnnnnnnnnnnnnnnnnnnnnnnnnnnnnnnnnnnnnnnnnnnnnnnnnnnnnnnnnnnnnnnnnnnnnnnnnnnnnnnnnnnnnnnnnnnnnnnnnnnnnnnnnnnnnnnnnnnnnnnnnnnnnnnnnnnnnnnnnnnnnnnnnnnnnnnnnnnnnnnnnnnnnnnnnnnnnnnnnnnnnnnnnnnnnnnnnnnnnnnnnnnnnnnnnnnnnnnnnnnnnnnnnnnnnnnnnnnnnnnnnnnnnnnnnnnnnnnnnnnnnnnnnnnnnnnnnnnnnnnnnnnnnnnnnnnnnnnnnnnnnnnnnnnnnnnnnnnnnnnnnnnnnnnnnnnnnnnnnnnnnnnnnnnnnnnnnnnnnnnnnnnnnnnnnnnnnnnnnnnnnnnnnnnnnnnnnnnnnnnnnnnnnnnnnnnnnnnnnnnnnnnnnnnnnnnnnnnnnnnnnnnnnnnnnnnnnnnnnnnnnnnnnnnnnnnnnnnnnnnnnnnnnnnnnnnnnnnnnnnnnnnnnnnnnnnnnnnnnnnnnnnnnnnnnnnnnnnnnnnnnnnnnnnnnnnnnnnnnnnnnnnnnnnnnnnnnnnnnnnnnnnnnnnnnnnnnnnnnnnnnnnnnnnnnnnnnnnnnnnnnnnnnnnnnnnnnnnnnnnnnnnnnnnnnnnnnnnnnnnnnnnnnnnnnnnnnnnnnnnnnnnnnnnnnnnnnnnnnnnnnnnnnnnnnnnnnnnnnnnnnnnnnnnnnnnnnnnnnnnnnnnnnnnnnnnnnnnnnnnnnnnnnnnnnnnnnnnnnnnnnnnnnnnnnnnnnnnnnnnnnnnnnnnnnnnnnnnnnnnnnnnnnnnnnnnnnnnnnnnnnnnnnnnnnnnnnnnnnnnnnnnnnnnnnnnnnnnnnnnnnnnnnnnnnnnnttggagtttcattaggtcccatttgtcaattctcgatcttacagcacaagccattgctgttctgttcaggaatttttcccctgtgcccatatcttcaaggcttttccccactttctcctctataagtttcagtgtctctggttttatgtgaagttccttgatccacttagatttgaccttagtacaaggagataagtatggatcgattcgcattcttctacacgataacaaccagttgtgccagcaccatttgttgaaaatgctgtctttcttccactggatggttttagctcccttgtcgaagatcaagtgaccataggtgtgtgggttcatttctgggtcttcagttctattccattggtctacttgtctgtctctataccagtaccatgcagtttttaccacaattgctctgtagtaaagctttaggtcaggcatggtgattccaccagaggttcttttatccttgagaagactttttgcaatcctaggtttttttgttattccagatgaatttgcaaattgctccttctaattcgttgaagcattgaattgaattcttctaattcattgcttccttaaattagaaggagcaatttaattaaattgctccttctaattcgttgaagaattgaattgaaactagatttttttatccccaaaaaaaatctagtttctttgttacacgtttttttcccatactatattggttatttaggaatttcacatcatgaaccatgatcacattcccagtcctcccagatcttcccaacccttgtggccttaccccctcaaaggaaagcaggaaaaaaaaaaacccattcagtttgtgttgcccatatactcagtggagcatggtcaaactcccaacggccagtcccttaaagaaaactcaagtccttccctacccacctctgccagaagccatagttatggagagctatacttcagcaatctttatcccaatttttaagatttctcgtcaatagctttctgtctaggctgttacttttttgagggaggtgggggtggagtgggagtaggggttgacatagaagccttccatgtccctctgagtctgcagtcatgaacattactgccagagtatcttccttgccttttatagtgagtggatgatggacttccacgtagtttcttgcaacagcatggccctatttcttaaaagatttactttattttaaattatgtgtatacatatgtgtgtgtgcacatgagtgcaggtactctcagacaccagaagaaggtgttggattctcttgagctggagggactttgagcagtccaaccctatgtgctaggaactgaactgagtcctctgcaagagcattacatgttcttaaccattgagccatctccagtccaagagactcctccctccaacccctgattttttctctttttaaagtgcgtgcatatttctttctttccttttttttttgtcctcctttagtgctagggtttgaaccaaaggcttcactcatgttaggcaagtgctctactactgagctacatgtatgtggttgtgtatatatgtataagtatcccaccactgagctacatccccagccttgtgtataagtgtgtgtgtgtgtgttgtgtttgcatgtgtgcatatttatttaaatacattttttttttgtttaccaaactgccttgttgttatcctgatgtgatcaggtatgttttctgcagtgtaattaatacatttttatattgctttcttgcttctgttttggtccttaatgatgaaagtatacaagctgcaaaattagaggcagaactgattacacttcttatgactgtcccaggaacagataatatgacatttttattgttttgttttagtgatgacttactgctttttaggtttcgggaagcagcttgttttacatttaacttctttgtttataaagataaatacacttgtatgtaagtaaacagttacccctgtaggatcttcagatcttgggagagaagatggcagggcacatatttggacctcatatgtttttgcacagatgcaacatgagtacttttagcttcagatttatcattctggtttagcttattatttctcctacctagctttacagacattaaatataaaaattttatggtgtatactttgaacttttttccttcaaaacaacaaataccaactaggctgctgtagaaatgttcagacatagaaagtagcaagagtattatgagtcccgtgtatctatcacctgacttccataactatgagtatagttcaactttcttctcaactggactgcttaagttagtctcagatatatagttgcagaactaagtccttttagtgtgtatataaaatgtgaaatattttaatttcaccaaatatcagtgtttaaatatcaaacaaatgttttctttcagttcatttgaatcagggaaccaaagattatcttttttttaaaatggattattattattttaaacgtcttaattttttttttaatttgatttttcaagacagggtttctctgtatagctccggctgtcctggaactcactctgtagaccaggctggccttgaactcagaaatctgctgcctccgctttccaagtgctggtattaaagttgtggtccactactgcctgactaaatgtcttaattttattgctattgtgtataaaaatgacgtgtgtgtgtgtgtgtgtgtgtgtgtgtgtgtgtgtgtgtgtgtgtgtatgggtgtcatgtaccacagcttgttggtttgtttgtggtcaggagtcaattctttcctttcaccttgggtcctggcattgagctctggttgtcaggtttgtttgttaagcacttttcatatcactatgccagctcagagacaggttcaaactaagtatcatatacccaaaatatttggaaccagaaacattttggattttgggggacttagggacactttgcatatacatcatgatctattttgttgatggaactcaagtcaaaaattgatttgtgtgtcctacctgtcttaagcacatcacctgcagataatctcatacaatttccttaagtaattttgtagtaacatgaagtaatttttaagtcacatgaagccagtttcatagtgtagaatcttttactagtagcattattttgtgctgaagaaagtttcagattttggcacattatggattgttagattagaggtacttagaacctgtatattctttaatacgctgtatatggattttgagggacatgcactcatgtatcaaccccagtaaaaatacagaatatctttcatcagtccagattttaagccaacccccatttcccagtccccatacattgacaaccactgatttgttttctgagttcattccttttcctttttcatattgttgtattagggtgactttttgtgcatggttccttttgcttagaataggcgttggtaaattagcctgagggacatgtcacatctgttgcttgtgaaattttgttggcatgtagccatattcttgtctacttactacatattgctgcttttgcagtacagcactagaattgactagtattagagaccatacagtatactgtaatcaaagtttcataactgtgtcctttagagagaaaagcctttttctgttttgtttttaattatataaaggatttttatttttgcatatggaaggaagtcagatgtctatggtctatgatctggtaaatagctttcttgctagtaaagtcctgcagcagtataggatataacatggcaagaaacagggataatgaatgtgtcttactgttttagtatatattggcaggtagtagtagttttcattatcattgctgaataatattttattttatttttaaagatttatttattattatatctaagtatactatagctgtcttcagatgcatcagaagagggtgtcaggtctcattacgaatggttgtgagctaccatgtggttgctgggatttgaactcaggacctttggaagagcagttggtgctcttaaccactgagccatctctccagccccataatattttattgattgaacatattacattaaaaaataatagaggctggagagatgtcttagctattgattaagagtgctttctgctcttggcagaggattaaaattcatattccagtaccaactttgggcagctcacaatcctataactccagctccagggaagctgttgccattttctggcctctacaggcacccttatacatggaacataaggtcacagacacacagacatacacacacatacacattttaaaaaaagatcttaaccaaaagacatttgaactgttttcgatttttagctactatgaacctagccctgtaaacatttcatgtatgtacagggttttgtattcatgtaagcttttctcttttcttttttccttcttttctccctccctccctcccttcctcttcttcctcctcctccttatcaatatcattgttattattttgagatgggatttctttagctgtcctgaactggcactatagactgggttggccttgaactcagagatccgcctgcctctgcctctccagtcctgggattaaaggcgtgcgccactatacctggtttcatgtaagtttttcatttcactttggtaaatacttaaatggaacttatgatcatatggtgagtatatattcatctttataagaaacttctatgactaggaaaatggctcaattgatgtgaagggcctgctacataagtgtgaggatctgagtccagatccccaacaatggtggcatgtgtctgtaatcctagcagagtcaagaatattcctgtaactggatggtcagctagtcttgccaaatcagtgagctagggatcaggtgagaggaagataatcagtgttgacctctggcttccacatgcacacacgtatgtacacactctgccaccatataatacacacacacacacacaatcactcatataaacttccatatcgttttccaaagtgattagaccatttttcattttgttttaaaattgtgttggcatttggtagtgtcacttgtatgcgtatgtgcttgtgtgtgtatgtacaggtacatgtgtatgtttgggtatgtgttcatgtatgtatgcatgtggagaccagaggacaactacttcaaatgttgttcctcaagagttgcccacattgatttttttaaaattttatttattttatgtacgtaagtacactgttgctgtcctcagacacaccagtagagggcaaccgttcccattacagatggctgtgagccaccatgtggttgctgggaattgaactcaggacctctggaagagcaatcagtgctcttaactgatgagccatctctccagccctgctcacgttgatttttgagatagggtctttcactaacctagagtttattgaataggcgaggctagctggcctgtgagtcctaagggtccttttgtctctgctgccctaatgttgggattacaagagcatatcaccattcctggctcttttatatgggttctgaggcttagactagtttttgtatatatatatatgtgtgtgtgtgtgtgtgtgtgtgtgtgtttattcatttatttattttggctttttgagagagggtttcctctttgtaatagctctggctcctggacttgatttatagactaggctggctgtgaactcacagagaactgcctacctttgtctccctagcactgggattaaaggtgtgtgccacaatgcccagcttaattgaaaagttattattttaaattacgtgtatatgtgtgggtctgtggatgtgagtgcagatgctttagaaccccgggaattggggttattggcagttgtgagacaccagcaagggtctgggaaccatggtcctcttgcaaaagcagtactcactcttaatcactgagccatctttccggttccagttgttttttggttttgttttgttgttttgagacagggtctcactgtgtaaccctagttagcttggcactcagtcagtgatctgtctccctctgagatgaagctgtaccatttgacttgagtttttgttcttaaaacaacaaacctttggctggagagatggctcagcggttaagagctccaactgctcttctgaaggtcctgagttcaaatcccacaaccacatggtggctcacaaccatccataatgagatctggcgccctcttctgtctgaagacagctacagtgtacttacagataataaataaataaataaattaaaacaacaacaacaaaacccaacaaacctcttcataggtttatcgcattagcccactgtggtttatttctccaatacagtgatgttgaatatcctttgatgtatttgtttgttttttctttttgctcagtgttgaattgtttttattttttttactattaaattatatgtttttttaatgtacaatcattgatcagatgagtgtttagcaaatgttttcttgactaacttgtcctttcattctcttgatatcctttgaatgtgagagttttaaaaatttagataaaatccagtttaacaattttttttatagttcatgcttttcctgttcaaaccaaggtcatgaatattatatactgttttattctataagtcttatagttttaggtttttatatttattttcaggtgtattttagataataatgataaaaatgttgtaagtaagcttggtggtagtgatgtatgcctttaatcccagcaattgatatgcaggggtaggcttcatctctgtgagagtttgaagccagcctagtttacagaactagttctgggacagccagggctacacaaagaaaccctttttcaaaaaaaaaaaaaaaagaaaagaaaagaaaggaaaaaagaaaagttgtaagtataaaagaagttaactttttaatgagttgcaaaagcataaatcaagatttgtttctaattgtggatgttcaatcgttcttttactattaaaaagcctgtattttatccattgagttatcttgatgccttctcaaaaattagttaacaagttatatatttggaaaggataatttaataccatatgcaaaatatccctcagtaaatttgctttaaaagtcacttgaagccaagtgtggtaacatatatctataatcacagcttcttaagacacggccaggcagtggtgatgtggatttctgaattcgaggccagcctggtctacagagtgagtttcaggacagccagagctacacagagaaaccatgtctctcaaaaaaaaaaaaccaaaaaaacaaacaaacaaaaaaaaaaccaaaaaaggctgagacactcaggaagttgaggcaggaaattattacaagttcaaggcctattgggaaacctagcaagaccttatctcacaattaaaaagggttgggaatgtagtttagtggtagaacacttgcatagcatgactgtgtaagactatgtgttcaactctgagattacccagaccaaacaaaacgcaagcaattaaatacatatatatatataatatatatatatatgtacattttctagagtttcttttttttttttctttcttttctgccctttttctaatgtcatgacttgactactgtatttttatagtgattcttcactgagtatttcttctgctcccaaatgttttttgggtatccctggtccttgttaatccacacaagctttaggatcaggttgtttatttcaacaacaacaaaatcaactggaatttttttattgtcatttcattaaatgtatagacaaatcagaaacatttgatagcttaacgatactgttttgcaatttatgaaaatgtttcttcatttactctcttttacccagattttatagtttcagcatacagacattgtacgtattttatttttggacttttaatcctgttattaaaaattgtttcttattgtttattactagtgactagaaataaaattggcttcctgtgttaacattgtaccttgtaaccttgctaataagctcataaatactttttttactttttttagcaggtctccccccccccccttaggttgtgtaggacaacatggcttttgtaaataaaagatagctcttgctttcatctgtaagtcttatattcttttcttaccttattgaagtggctaggactttgagttcagtattgggtcccttggagctggaattattggggagttgggccacctgatgtgggtgctggaattgaaaggagaaagcacactgagctgtgaacctctctccaatctcctgttgggcaggctttcactgagaatttaatttctggaataggtagtactcctaagctgatttcttcaacatgtctgttcatttcatccaagttgtcaaatgtaatggcatcaagttttttttatagtattcccttgttgtcctttaatgcccgtagctctttctgatgttggtcatttgtgtaccctccctcgctccgttttgctactgctccagctaatgtttgggttaccagttttattggtctttttcaaagaaacaacatttgaattcatgggtttttctcttcccttttgcttgctttagacaggagatatgaaggaagatataaacctaattgttgttttagttctaattctcttgtgggtatttttgttgttgcttggtggtagataaatacataaaatatgaacaatattgagtgtgtaaaatttaatgtgaagtttcacacttctgttttgagtgccagttctaactttaagttcattaagttgtatttttatttgcaagttttcctttaataaagttttgttttgttttgtttttttgttttgttttgcttttttctggacagggtttctctgtatagccctggctgtccctgaactcaatctgtagaccaggccggcctcagaaatccacctgcctctgcctcccaagtactgggattaaaagtgcaaccattgcccagctataaagtttggttttaaaggtttattttccttctagttctcttaagtagaagcttaggctagtataattcatttctgtttcctagttataaacataattcaagattttgttttgtctgtggatttgtgtatacacttgtggccatgatgagtcgctgtgcatgtgttatcagaggacaacttgtggaagttgatgctttccttccacagtgggctctaggactcaaactcaggccaggcttgaatggcaagtgcttctattacctgagttatcttgcagggtctgatttttttttttttttttaatgttaggtgtagaattgagacttgaattaaaataatctgttttaaaatggttattgagacaactggatgtccacatgagtgaaagcagggaacagtggtggaatatcaaaccttctggcagttcattcagtctggccttgaactcctgatccttctgcctccacctcttgagtgctgggattaaaggcatggccactatgctttgtttttaataaataaatagccacttagatcggacttgatgttttctttctttcatttgtatggtttggctggacatgaggatgtgcgtagtggaagctccctgctcctgagctaaagctctggcagcttcagggtttttgtcagttgactatgccagaaacatgttaggagaaatttctacctggatttttattaattcacatttttcctactattgaaattaatatttgtttgaaattatagttaaattttagtaaataaaattatatatttttttggtttacattgtggttggatgttgttgttgtttttgtaattcagatgtttaaacttcttttcctaacttctctataggatgatgatttcacatatatatctcattccctggtagaagtactttaaggccttactgatgcctttttttttttttttggtactattatcaattattttctagcaaataatttttaaattttatttatttatttattatgtctaagcacactgtagcagttttatttatttatttatttatttatttatttatttatttattatatctaagtacactcagacacaccaggagagggcgtcagatctcattacagatggctgtaagccaccatgtggttgctgggatttgaactcaggaccttcagaagagcagtcagtgccttaacagctgagccatctctcaagcccagccaataatttttttaatgtttttttttctttattttttggttttagaggcagagtttcactgtgtagccctggctgtcctagaacttactctgtagacagggctgacctccagctcagaggatctacttctgtctgtctcctgtgctggaattaaaggcatgcactaacactgaccagctgcaaataaattttgaaagttgttaatctatcaattgcattcagaaattttattttgaccataaatgtctttgctatgcttttgatagtattgtaaacaagattttaacatgttaaatatctttccttttctttaggcatggctgatggcaaacattgtacttttccacatctacctggcaaaacctttgtttataatgcttctgaagatagactggagttgtgtgtcgatgctgcaggacatttccccattggtcctgatgttgaagatttagttaaagaggctgtaagtcaggtgcgagcagaggctactacaagaagtagggaatcaagcccttcacatgggttattaaaactaggtagtggtggagtagtgaaaaagaaatctgagcaacttcacaatgtaactgcctttcaggggaagggccattctctaggaactgcatctagtcacccgcacattgatcccagagctagggaaactctggctgtgagaaagcataatacagggacagattttagtaatagttccattaaaacagagcctcccgtgttcacagctgcttctagtaatagtgagcttattcgaatagctcctggagtagtaacaatgagagacggtaggcagattgatcctgatgtggttgaggcccagcggaaaaaattgcaggaaatggtttcttctattcaggcttcaatggacaagcacttgcgggatcaaagtgcagagcaagcaccatctgatctttcccaaagaaaagtcgaagttgtgagttctgtgaggcctgcgaatcttcagactggcttgcctgaaccgttttctttaactggtggcactgagaatttgaatactgaaacaactgatagtcatgtagcagatgtactgggagcagcatttgccacaaggtcaaaagcacaaaaagaaaattccatggaggaacctgaagagatggatagtcaagatgctgagacgactaacacaactgagccgatggatcactcgtgatttaatttagaggctaataaaggcagaatgtttattgtgaatatgtaatatttgttggctgggccacataacttgagtagtcattaaaaatcttgtacgtatataattcaaagattatatcttgttattcagtgcatgatagcaagtgtgtgattggcaatagcttttaatatactgctgcccaggctggctctgaattcttgtaaattagtttagatcttttgaaagggtttcttccagatatgtggttcattggaagttctttgtcatttttaattccatgaaagtcttaatttccagacatgaaaattctcttgttaaatgtttggtttctgcacaggccagaattgaagaggaaatgacagtttgtacacattgttttcaaggtagccgtcctacatttcatgagaatgttgatttcaagtttacctgaactaaatgtatcttaaaatacataaaacactttattagattacttataatattatagagacagctattgttggcaaaaatatcttgacagaagagagtagtgatacaacattttcctgatttgagcaaacttgggaagaaatatctaccctagtatgataaaatcagtgtgattcagttagttggtctgagatatggccagttgtgtgctcttgttgataatatgttgccagtattttttaaatcttggccttgtcaagttccacctattatttttaaaatcttacataaaagagaatggcattttgttttagaatatttaaaaataatggtagcagtagttaatttctaattttcagagtatgtcagagtcacaaagagtttatctgtatgaatggttctatagttttgacacagtggtgtgtaagcctgtatatgctaaatgtctctaagcccctatgaaccaaaaatgttttccttttttcttaatgtccttaagattttctttttgtcagcttcacttgagtttggatgcatagtttactccagtagaccattagcatttgcttatattgctttcatgcttatgtagtaaaaacaatgcatattcctgagattggtactgctcttgtattctgttctgtagatttgtatttgtaaatgtgttttcggtccatcttcctttgtttactgaaattaagttgaatttgaatgaacgaatgacaaatgtatgttaatataatctcttagagcattcaaagcccggctatctctgtttgcacatgtaacagatgcagaactgtttgcaattctacaaaattgtatgtcagaaaatacattatcaggtgtttaaaaaaatctcttcctgttcattcgaaaagaatgttgtacttgaactttttctagataagggaggttttttgtttttttctgtgatagtatctttaagtgagtctacatactgaaagtccactttgttgaatgtggaaggaagggagaatctagatgtttttaaagtggagctgaggttaagataatgtacaccaccacacacacctgggttagtgtttatcacatcatactttgaaatattttatctcattcatttatattaaagttccaggaaaatatataactttcatatactaattttgcatgaagtaagatagccaaattcttaacaattagctgtgctttaatgcccccccaacccctccactaaccactattattttggcttagtcagccactgagatactcttctcaattttttttcctggtttaagtacacaaaaactgctcaataagcagaaaatgtactgtgtcaaataaattatataatcaccctgctttaacagatgctcttctgtggcttggtattttaagttaataactggcaggatctcaaagtaggagtatcagaaacaagttttgttttttccagacatggtcttactactatgtagccttggctggcctggagctcactctatagaccaggctggccttaaaaagagatctgcctgcctctgtctcccaagtgttgggactagaaggcatactataccatgcctggctagagactaattttatctctctattaaatacttgaatttcgtgtaaattatgcacatgtgaatgttagaagatggacttaatctccgacaatacttcattgtctctagtgaccgtagtggtatttagggttagaaacttaattgggtataaagaaaagtttgggttctcccttgatagaaaatacagacaaacaaccaaacaaaaaacaggtttgagaattcatcagaattcttgaacatatttcaaatcagttgaatgagattattagtggtttggggtaaattttgagagagtttgttttaaacattatttgtgtattttatgtgagtgttgatgcatttttaccattgtgataccactgtgctatgtcagggcagcacaatagcttgtgatctcaagtaaaaatggttttttagccctagaagtaacataactgtaacttaaagctattcagttctatttgcagtgttcactgaatactgaagtaatactgtaaatatttttcttcagtaatccattttgtaaccataccaagtttgagttgatgacccgaagtccaggcagttaaaggtagtgtatgtccagaaggctggtaatgaacaattgctcaagttgaaggaaacaagacactgccaagtattatgagtagtatacaattagctccaagggaatggtcactcagaaactaaagaacaagcctatctagccatttcatcttccaccccttaaactatgtttcaggtgtttattggaaataattaggaaagagacctgagaaatttagcaaatgctagtatttgaaatgctttataccttcctatagtctttagtttggtttttacaattaagctttactgcttgcagttgagatagcattctggaatgtacttgtgagactagccacaggtcttacagatctttattgccattattttaaggatcatattcattggatattaacactgtcttaaatagggtctcttacctcagggaagataatttgctagcaactcctatattattattgacaggttttgaagaactactttgacatatcacatgttagctaccaaatgcaaaaacaagtattatgtagttacctgctgtctgctactgaacatttctctagatatttagggccctattattaagtaacatttaaatacgaaataaacttctaagttctgtcattagatacttcatgttttcactatagtgatactatatttttttaaatttcagaacattaatatagttttgtcctcatttttcaagtcaatttaatttgcccaaacttaaatactcaaatacaaacaaatcttgagaattttatttttcttgcttcccctcccaccacccttgatctcaaagcaagatttttataagattcttataaaatcagagcccttgcaaaattggtttaaattccactcattttaaacttagattcaaagttacttttttataacataaatagatgcatattctaggttggctagatgttcaactttccaagactataacaaaattgtacaacatagaggctcttcacagttagattttttttttttcaaacaagaacagctcatgaaaataggccatggtagtaaaatgtgtatttaagtaacgaaggggagataaatcactaatgtcacagagttaattgcaagttctgccattctttgagatgccaagtgtttcaattcatatttaatgatactcaaatcgtggaaattttaacgtttgttccaaagtagcagaaactgtaaaaaaaaaaaaaattgtgaattattgaagaaaataccattacttgtatacctgacatttaaagtttttaattatggagttgacatgtttttgtagtataataatacaatgactattctcttgtaaaagaaaaggaaaaactagtaaagaaaaagttttagttgatgttatttgcttgtatcaattactagtattttaaaatttaaggtattgcatactttacgctagaatgcagaaatccttcctggagcctttatgcctgttgtagagcaataaaggactgaaaagcttatcaatattttcaggtttgtttgactgagtattagtgctaagaattgaagagtctccttttttggagggaaatgctacttagattaaaacaaagccataatagtataaatatttagacaaaaaactaacaagtactttaacttggcagtgaagtagtatagatgctattatctgtaaggcacaagctgttagacattactttctggtttcatggttgtttagtatatattaaaattgagaataaataattggtagcagtataacagtatagtgtttttgagcacacatcactgtacagtatttgaaattttgtattaatagaaaactaaataatatattccccctcaacttcacattggctttttaaaaagtaatgttctttagtttcctctaattagagtttaataccataatgcatgaacaaatagttcagttttataataacatttttagcataataaagttgtttttaaaacttatggccaggcagtggtggcacacgccttttattccagcacttgggaggcagagacgtgcggatttcttagttcgagaccagcctcgtctacagagtgagtaccaggacagccagggctgtacagagaaaccctgtctcgaaaaaggaggaaaaaaaatcgaaaacaaaaacgaaaaacaacaacaaaaaaatgcccatacatatgaattacccaggaactgtaatttctttccttaatgcaggttttaatattagatgaaatgaatccaattataaaaaaaaaataagcaaaatttccttagaaattttgggtcatgtaatgcttactaaatatttcaaaatgagatatgttctaattgagaatttatttttgaaaagagtacttgttatgatgaggatatgaagggaaaatatagaaaacagcagtaaagtcctcatagctcaccactcaactgtccactttgatttatttttaagccttagtttatttatttaatatctattggatcacagtattggatcagtggttagaactgccctagactccagactcgggtccaagtcaagcatacaacctactgtgtaacctctgtatcactcccaagaaggatgataatggcatttatcaagagctgggaggattgatgagttattacctgaacattaaaaccatgtctggtacagtgtaccttcaaatactttctgtggttagtatgcttttaagttgtggtaagagttcacctgccactgacgtgcagtacagccttacatgtaggccatgtgtgttatactcttagatctaaaatttgttgaatgtgtgtagtatgttaccaacgagtagaaactggatatttttacatccaaatatttctatgagggcttaatctcacgaactaccaagaacctggaagagttggccttctgtgctttgtgattgagatgtgctatggagcctttaaaggcccataaagctgctgtaaccttgaggtttgcagttgtacctctgttctgttgaccataggtacaatgctgagagtagtgctgaagcaacaggcactgtgaactcagaatgctgagactacagtcacaaacttgagcttgaggtcttctgtgtgtgtgcatgccattgtccatataccatcaagatagagctctcaaaacttcagtcaataaagaagataaacattccacttaagatagttcattactggttttagttttattgactggctgtcataccccagtaagtaaaataaggctgaataattgattgtttctaataattaaaaatgtacagagaaaagttgaagtaagtccattgattttctacactatggcacatggaaagtgaaaaatggtcttcaaatttatgctctttggaactaaaccagcctttggcctacttcttagcatatcatgtgtatgtgtgcatgtgtgtgcgtgcgtgtgtgtttgattattcctgtcttggttttatgtatagaaacatagatgagatgtagtctgcctgtaaaattactaatttttacatttgatttatagaactagagtattgtgtagtcattctgtaatcattcattcaaaacaagtatttgtaagaagccacacttttctaggagctggtgaaagagttctgaacaacaaatttcatgtgatcttgagtgcctgcaatcaagtaaagaccacactgacaactcattacagtgataagtcactataactattaaagtgattgttttccatgtgtttagacaatagcttaaacacttagcaaatgacgattaacctagatgtctatgttgggctgaaagcttatacagattaggtagtttacccaagagtatagaactgtgtctctggacatgacatggtcatcatggtcttgaagtaaccatcagaaaactagctccctttctgaaattggttgggtctcaagagctcttgagatagtgtgctgaaggaaacaaggcccctctcttcttggggctgtgtaagcatagtggctcatgctcctgtcatcagcttctcatccatgatcttgtaagtagacctgattgatctctttaccaagctagtcttgggtggaatcctttcttaggtctgttgtcctgtttggagtgaataggcatttttttcttcacatctccctaggaaaagtcacaaaacactagtgtcttgtagttaagtggcagaactaggtagcaactgaaataaacccaaatgtttatgatacacagcctatgcactaaacctcgatgctacatttgtaaagagtggtcctaggtcttttgaatatcatttaaatctaaattttatgtttttgaatatcatttaaatctaaattttatgttcaccaatctgtgccgaactctgaaagtatagtacatagctttaatatttcccgctgttttgaaacccaattacctacccaaattcctacttggggcttatattcctgcctccaaatgtgcatgttcctcaaaaaaaaaagaaaaaagaaaaaaaaagaaaaaaaaaaaaaagaaaaaaaaagtttcatattttcctcattgactaatcttggtaaatttgagaatcagtggtaagataaatgtctaacaactttacttcaaagttctagaatactgatatgctagctagtttctcagtttggctggagggctctccaaaggtcatgtttctcaaagtgtagtttgtgtaccatatgcactgctagaattcctgtggaatcatgtggcaggtactttgcatccgtaatatgtgtgaggatgtggcgtggttggtagatttcttatctagtgtgcacagagcactggctttcaactctaacactagctagactgggcatggtggtgcacacctgtaatctcaatgcttgggaggtggagttaagaggatcagaagtgcaagctcttcagttacattgtgtacttgaagccagcctgggctacatgaaaatggttggagcagtgggtctcaaccttcctaatgctgtgatctttagtacagttctacatgttgtggtgacccccaaccataacattattttcattgctgcttcatagctttaattttgctactgttacgaatcataaatactttcggagatagaggtttgccgatggttacagaccacaggttgaaaaacaccggtcttgaaaaatagacaacgagcccggcgtggtggcacttgcctttaatctcagcactccggaggcagaggcaggcggatttctgagttcgaggccagcctggtctacaaagtgagttccaggacagccagggctacacagagaaaccctgtctcgaaacaaacaaaaacaataacaaaaacaaaaaaattccatttatggggctggcgagatggctcagtggtaagagcacctactgctcttaggaaagtcctgagttcaaatcccagcaaccacatggtggctcacaaccacccgtaatgagatctgacgccctcttctgatgcacctgataaatcttttttttttttttttaaattaggtattttcttttttttttttttcagtttttttttaattaggtattttcctcatttacattttcaatgctatcccaaaaggttccccatacccacccccccaatcccctacccacccactccccctttttggccctggtgttcccctgtactggggcatataaagtttgcaagttcaaagggcctctctttcaagtgatggctgactaggccatcttttgatgcatatgcagctagagacaagagctccggggtactgcttagttcatattgttgttccacatatagggttacagttccctttagctccttaggtactttctctagctcctccattaggggccgtgtgacccatgcaatagctgactgtgatcatccacttctgtgtttgctaggccccagcatagtctcacaagagagagctataactgggtcctttcagcgaaatcttgctagtgtatgcaatggtgtcagcatttggaagctgattatgggatggatccctgcatatggcagtcactacatggtccatcctttcgtcacagctccaaattttgtctctgtaactccttctatgggtgttttgttcccatttctaagaaagggtaaagtgtccacactttggtcttcgttcttcttgaatttcatgcgtttggcaagttgtatcttatatcttgggtatcctaggtttctgggctattatccacttatcagtgagtacatattgtgcgagttcctttgtgattgggttacttcactcaggatgataacctccaggtccatccatttgcctaggaatttcataaattcatttttttaatagctgagtagtattccattgtgtaaatgtaccacattttctgtatccattcctctgttgaggggcatctgggttctttccagcttctggctattataaacaaggctgctatgaacatagtggagcatgtgttgttcttaccggttgggacatcttctggatatatgcccaggagaggtattgctggatcctccggtactatgtccaattttctgaggaaccgccagactgatttccagagtggttgtacaagtttgcaatcccaccaacaatggaggagtgttcccctttctccacatcctcgccagcatctgctgtcacctgggtttttgatcttggccattctgactggagtgaagtggaatctcagtgttgttttgatttgcatttccctgatgattaaggatgttgaacattttttcaggtgtttctctgccgttcggtattcctcaggtgagaattctttgttcagttctgagccccattttttaatggggttatttgattttctggagtccaccttgagttctttatatatattggatattagtcccctatctgatttgggataggtaaagatcctttcccaatctgttggtggcctttttgtcttattgacggtgtcttttgctttgcagaagctttgcaattttatgaggtcccacccatttatcaattcttgatcttacagcacaagccattgctgttctattcaggaatttttcccctgtacccatatcttcgaggcttttccctactttctcctctataagtttcagtgtctctggttttatgtggagttccttaatccacttagatttgaccttagtacaatgataaatcttaaaaaaaaaaaaaaaagcactgactgctttcaaaggttcccaacaaccacatggtggctcacatccatctgtaatgggatctgaggccctcttttggtgtgtctgaagacagctacagtgtgaaaaagaagaaaaagaaaaaaaagaaaaatagacaaggaataataagcttgtacgagcaatctacactccctgttttcactatgctcacatttctagtgaaggacagcgacacaaaggagaggaggtgctttggtgttatactacaggaagagctgaactgacctagtgatcagggacgctttagggaatgctttctgagagatgggtggatgatctgttagttgaagcagaattattaaggtacttaaaaatcagtgtcaagattgggcacttccacaaaaactatttacaaggctagtccaacaagcaaaattaagtgtagagagccatctcggaagtaggcactgttcttgaagaataacagtttcattcccagcacctacactgggtggctcatggctatcttctggcctcctcaggtactaaacttgtgtacctccccagccccaatgaaaaacttttaaaaattaagtgagatgcttatgttcaccacactgtagattctagtacatcctatgaggaggtagtgatgatggagaaagattagaatttgagaggcttgtcagaacagactgtagggtccagcatgatgattctgggaaatgtgcttattgtcaagcctgattacttgaattcagtctcaggagaccacatgacaggtgagaatggactctcgctagttgttgtctgaacttggcacatggaccataccatgtgtggacttatacacacacacacacacacacacacacacacacacacgcacgcacacacacataagtaaatgtctaataaaaagttggttgctaggaaaagagaaaaatttaacagataatgagagtttgtactgagtgtatgaaaactcatatacatgtgctttgggatcaaaagctgtctctgttactaaatatattcaatatatttaaaatacacacatgcacacacaacaaaaatgtaagcaaagatataaggcaagaatcaaattagggattggaacccaacctgcagtgttgcttttaaaacagggtctcatagcttagggtctatgaccttgaactcctgatcttcttacctctgcctcctatatagcagggttacaggcatatgtctgtttttaatgttatgctggagaactgaatctagtagggcttcatgctaggcacactttctacaagccacgctgcataccagaaagtcatctccagtcatttccagtctttgctccagaaagtcatctcttctgatttcttccattagattatagaaaaattctataaggattatagagcttcacttatggctctggaccagtcagtctttcaccttttcctgcttctcttaagaagtgactagttaagtgtctgaattaagtttcattacggaaattctttttcaatgtaatattaccattatatgatatttcttatgaactgttgaaatattctttggctctttagtaaatgttacattgttatcacagttatttttggttcagtaaggtgattgaaaaatcaagtgtaaactgagcatggtggtacatgctctattatctagcaaaagggaagctgagttagggagatcaggaatttaaggtcaacctggactatataataagactctatatttaaaatataagtaaataatttttaaagggcctaggaagatgacttagtgggtaagagagcttgctctgatagcattaggatatagatttcagttcctatcacccatgtaaaaagctgggtatggctgtgtctacctgtatacctaccagtagcaggcagaaacaggcagatcctaagagctttctagccagccagcctagtcaaaaagccaggcttctagacatgagagatcctgtctcaaggtaataaaatagacactagtggaggaagatactcacagttctgctctggcccccgcaaatgtgcacagggctgagt

SEQ ID NO: 665 - DNA, 5533 bp, Mus musculus
gagaagagaaacaacgtccggcgcttccgccttcgcctaggaggaggaggaactggtaggaaaaggaaagccattcgccctgggcctggactagacctcgtcgggccggcggaggtctggctatgtgcctttgagggtcgcttgggacgccgagcgagagccgagagcgatgtctcagccgccgccgcctcctccgctgccgccgccgccgcctccccctgaggctccgcagacttcgtcgtctctggcggcggcggcttctccggggggcctttcgaaacgaagggaccgaagaatcctttccgggagttgcccggatcccaagtgccaggcgcgcctcttcttcccggcctcgggttctgtcagcatcgagtgtaccgagtgcggacagcggcacgagcagcaacagctgctgggagtggaggaggtgaccgacccggacgtagtgctgcacaatctgctgcggaacgcgctactcggagtgacgggggctcccaagaagaacacggaactggtaaaggtgatgggcctctccaactaccactgcaaattattgtcgccaatattggcacgctatggaatggacaaacaaacgggccgggccaagcttctccgggacatgaaccaaggcgaactgttcgattgcgcgttacttggtgaccgggccttcctcatcgaaccagagcacgtcaacacagtgggctatggcaaggaccgctccggaagcctcctgtatttgcacgacacgctcgaggatatcaaacgggctaataaaagtcaagaatgcctcatcccagtgcatgtggatggggatggacactgcctagtgcatgctgtgtctagggctctagtaggccgagagctcttctggcatgctctgagggagaatcttaagcagcactttcagcagcacctagcccgatatcaagccctgtttcatgactttattgatgctgccgagtgggaggacattatcaatgaatgtgaccctctgtttgtgccacctgaaggtgtccccttaggcctgaggaatatccacatattcggccttgccaatgtgttacatcgtcccataattcttttagattccctcagcggcatgagaagctctggtgattattcagccacctttctacctggcctcatacctgcagagaaatgcactgggagagatggtcatttgaacaagccaatctgtattgcgtggagtagctctggtagaaaccattatattcccttggtaggcataaagggggctgccctgcccaaactacccatgaatttgttacctaaagcatggggtgtgcctcaggaccttattaaaaagtacatcaagcttgaggaggatggtggctgtgttattggaggagacagaagtttgcaggataagtacttacttaggctggttgctgctatggaagaagtctttatggacaaacatggtatccatcctagtttggttgctgatgtacatcagtatttctacagaaggactggggtgataggagttcagcctgaggaagttacagcagctgctaaaaaggcagtaatggacaatcgccttcacaagtgtttgctttgtggtgccctttctgaacttcatgtcccttctgagtggttggctccaggagggaaactgtataacttggcaaaaagtactcatgggcagttgaggcctgacaaaaattacagctttcccttaaacaatttggtttgttcatatgatccagtaaaagatgttctgctaccagactatggattgagtaatctaacagcttgtaattggtgccatggctcatctgtgcgaagagtcagaggagatggctctattgtgtatttggatggagacagaactaattctaggtctactggtggcaaatgtggttgtggattcaaacatttttgggaaggtaaagagtatgacaatcttccagaagcttttcctatcactttggagtggggaggaagagtagtcagagaaacagtatattggtttcagtatgaaagcgatccatctttgaatagtaatgtttatgatgttgcaatgaaacttgttaccaagcactttccaggtgaatttgggagtgagatcctagttcagaaagttgtccacactatattgcatcagactgcaaaaaaaaatccggacgattacactcctgtaaatatagatggtgctcatgctcagagagttggagatgtgcaaggacaagaattggagtcgcagctaccaactaaaattattcttactggacagaaaacaaaaactttgcataaggaagaattaaacatgagtaaaactgaaagaactattcaacagaacatcacagaacaagcttctgtgatgcagaaacggaaaacagagaaattaaaacaagagcaaaaggggcagcccagaactgtttctccaagtactattcgtgatgggccatcatctgcacctgccacccccaccaaggctccctactcacctaccacttctaaggagaagaagattcgaataacaactaacgatggacggcagtctatggttacccttaagccttcaacaaccttttttgagcttcaggaaagtatagccagagagttcaacattcctccatatttacagtgtattcgatatggctttcctcctaaagagttaatgccaccccaggcagggatggaaaaggagccagttcctttacagcacggtgacagaattacaatagagatcttaaaaggaagagcagaaggtggtccatccactgctgcacactcagcccacactgtgaaacaagaagagattgctgttactggtaaactgtcatctaaggaacttcaggagcaagctgacaaagaaatgtactccttgtgtcttttagctacattaatgggcatggctgatggcaaacattgtacttttccacatctacctggcaaaacctttgtttataatgcttctgaagatagactggagttgtgtgtcgatgctgcaggacatttccccattggtcctgatgttgaagatttagttaaagaggctgtaagtcaggtgcgagcagaggctactacaagaagtagggaatcaagcccttcacatgggttattaaaactaggtagtggtggagtagtgaaaaagaaatctgagcaacttcacaatgtaactgcctttcaggggaagggccattctctaggaactgcatctagtcacccgcacattgatcccagagctagggaaactctggctgtgagaaagcataatacagggacagattttagtaatagttccattaaaacagagcctcccgtgttcacagctgcttctagtaatagtgagcttattcgaatagctcctggagtagtaacaatgagagacggtaggcagattgatcctgatgtggttgaggcccagcggaaaaaattgcaggaaatggtttcttctattcaggcttcaatggacaagcacttgcgggatcaaagtgcagagcaagcaccatctgatctttcccaaagaaaagtcgaagttgtgagttctgtgaggcctgcgaatcttcagactggcttgcctgaaccgttttctttaactggtggcactgagaatttgaatactgaaacaactgatagtcatgtagcagatgtactgggagcagcatttgccacaaggtcaaaagcacaaaaagaaaattccatggaggaacctgaagagatggatagtcaagatgctgagacgactaacacaactgagccgatggatcactcgtgatttaatttagaggctaataaaggcagaatgtttattgtgaatatgtaatatttgttggctgggccacataacttgagtagtcattaaaaatcttgtacgtatataattcaaagattatatcttgttattcagtgcatgatagcaagtgtgtgattggcaatagcttttaatatactgctgcccaggctggctctgaattcttgtaaattagtttagatcttttgaaagggtttcttccagatatgtggttcattggaagttctttgtcatttttaattccatgaaagtcttaatttccagacatgaaaattctcttgttaaatgtttggtttctgcacaggccagaattgaagaggaaatgacagtttgtacacattgttttcaaggtagccgtcctacatttcatgagaatgttgatttcaagtttacctgaactaaatgtatcttaaaatacataaaacactttattagattacttataatattatagagacagctattgttggcaaaaatatcttgacagaagagagtagtgatacaacattttcctgatttgagcaaacttgggaagaaatatctaccctagtatgataaaatcagtgtgattcagttagttggtctgagatatggccagttgtgtgctcttgttgataatatgttgccagtattttttaaatcttggccttgtcaagttccacctattatttttaaaatcttacataaaagagaatggcattttgttttagaatatttaaaaataatggtagcagtagttaatttctaattttcagagtatgtcagagtcacaaagagtttatctgtatgaatggttctatagttttgacacagtggtgtgtaagcctgtatatgctaaatgtctctaagcccctatgaaccaaaaatgttttccttttttcttaatgtccttaagattttctttttgtcagcttcacttgagtttggatgcatagtttactccagtagaccattagcatttgcttatattgctttcatgcttatgtagtaaaaacaatgcatattcctgagattggtactgctcttgtattctgttctgtagatttgtatttgtaaatgtgttttcggtccatcttcctttgtttactgaaattaagttgaatttgaatgaacgaatgacaaatgtatgttaatataatctcttagagcattcaaagcccggctatctctgtttgcacatgtaacagatgcagaactgtttgcaattctacaaaattgtatgtcagaaaatacattatcaggtgtttaaaaaaatctcttcctgttcattcgaaaagaatgttgtacttgaactttttctagataagggaggttttttgtttttttctgtgatagtatctttaagtgagtctacatactgaaagtccactttgttgaatgtggaaggaagggagaatctagatgtttttaaagtggagctgaggttaagataatgtacaccaccacacacacctgggttagtgtttatcacatcatactttgaaatattttatctcattcatttatattaaagttccaggaaaatatataactttcatatactaattttgcatgaagtaagatagccaaattcttaacaattagctgtgctttaatgcccccccaacccctccactaaccactattattttggcttagtcagccactgagatactcttctcaattttttttcctggtttaagtacacaaaaactgctcaataagcagaaaatgtactgtgtcaaataaattatataatcaccctgctttaac

SEQ ID NO: 666 - protein, 1214 aa, Mus musculus
TSSGRRRSGYVPLRVAWDAEREPRAMSQPPPPPPLPPPPPPPEAPQTSSSLAAADGGLSKRRDRRILSGSCPDPKCQARLFFPASGSVSIECTECGQRHEQQQLLGVEEVTDPDVVLHNLLRNALLGVTGAPKKNTELVKVMGLSNYHCKLLSPILARYGMDKQTGRAKLLRDMNQGELFDCALLGDRAFLIEPEHVNTVGYGKDRSGSLLYLHDTLEDIKRANKSQECLIPVHVDGDGHCLVHAVSRALVGRELFWHALRENLKQHFQQHLARYQALFHDFIDAAEWEDIINECDPLFVPPEGVPLGLRNIHIFGLANVLHRPIILLDSLSGMRSSGDYSATFLPGLIPAEKCTGRDGHLNKPICIAWSSSGRNHYIPLVGIKGAALPKLPMNLLPKAWGVPQDLIKKYIKLEEDGGCVIGGDRSLQDKYLLRLVAAMEEVFMDKHGIHPSLVADVHQYFYRRTGVIGVQPEEVTAAAKKAVMDNRLHKCLLCGALSELHVPSEWLAPGGKLYNLAKSTHGQLRPDKNYSFPLNNLVCSYDPVKDVLLPDYGLSNLTACNWCHGSSVRRVRGDGSIVYLDGDRTNSRSTGGKCGCGFKHFWEGKEYDNLPEAFPITLEWGGRVVRETVYWFQYESDPSLNSNVYDVAMKLVTKHFPGEFGSEILVQKVVHTILHQTAKKNPDDYTPVNIDGAHAQRVGDVQGQELESQLPTKIILTGQKTKTLHKEELNMSKTERTIQQNITEQASVMQKRKTEKLKQEQKGQPRTVSPSTIRDGPSSAPATPTKAPYSPTTSKEKKIRITTNDGRQSMVTLKPSTTFFELQESIAREFNIPPYLQCIRYGFPPKELMPPQAGMEKEPVPLQHGDRITIEILKGRAEGGPSTAAHSAHTVKQEEIAVTGKLSSKELQEQADKEMYSLCLLATLMGMADGKHCTFPHLPGKTFVYNASEDRLELCVDAAGHFPIGPDVEDLVKEAVSQVRAEATTRSRESSPSHGLLKLGSGGVVKKKSEQLHNVTAFQGKGHSLGTASSHPHIDPRARETLAVRKHNTGTDFSNSSIKTEPPVFTAASSNSELIRIAPGVVTMRDGRQIDPDVVEAQRKKLQEMVSSIQASMDKHLRDQSAEQAPSDLSQRKVEVVSSVRPANLQTGLPEPFSLTGGTENLNTETTDSHVADVLGAAFATRSKAQKENSMEEPEEMDSQDAETTNTTEPMDHS

SEQ ID NO: 667 - DNA, 57048 bp, Homo sapiens
  misc_feature (1)...(57048): n = A, C, G or T/U
agtttgagaccagcctggtcaacatggtgaaactcgtctctacaaaaactacaaaaattagccgggtgttgtagcaggtgcctgtaattccagctacttgggaggctgaggtaggagaatcgcttgaacctgggaggcagaggttgctgtgggccaagattgcaccactgcaatgcagcctgggtgacagagcgagactctgtctcaaaaaataaataaataaaaaaaatagtgcagaggtggcttagggcactaacatccaattatttctatcagcatcccagatcaccacaaaatacacactcgatatgaaacaatgtgcagaaggacatcttctagtgttgtgtgccccaagcagactcctgacattaagcccttctttttcctagacattctagagccatcactgttgctctctggagagtcacaatgtccttagcaaagaaaggctatgagaagacctaaagtggaaaaagaataaaactaatttagtccgcatttgactacagaacccttccttcaacatgatgcctactaatatccacagaattcatggcacataacctgccaaatgccaggctatgtggaaattaatgtttgaacaggaaaatgttgtaccagaggtgtccttgtaaaggatgtagtccatttcttgcgattttactgatactcaatttgaggccctctttgatgtaatctgcggacacctagtgctgatgctttaatttaagtacatacacataatttcctacaataaactgctgcccatctacataaaaaaccctgcttgcagactgccttatatttaaattcttatacatcatcacaatgcacttatatcttggaataatacgaaaggatttatttaaatgatccacagggttaaaaaagaagtatgcaggcttgtgcttttgctcttacctattaaaatgtcttccgcaactacagatgtagaaagtatgtcaggtacttcttattctgatttttatgtcatacaaaaggaactgaattagactgtgtttaggagacagagttaaatgggtcagagagagggatcaggcccttctacaaaaactagaatgttactagaatgaagatataacaagtgtttcacttaagcaaattcttaaactttatattcttccaccctaaaagcacccttcaggttctaaataaagggaaaataaagacaggtaacaggcaaaggtaatagaattgcagtgataagcattcttctgctccaacaatattggttgtttggttttgccatttaaaattaatagtaactcggctgggcgcggtggctcacacctgtaatcccagcactttgggagactgaggcaggcggatcacctgaggtcaggagttcaagaccagcctggccaacatggcgaaaccccgtttctacaaaaataaaataaaataaaatacgaaaattagctgggtatggtggcacatgcctgtaatcctagctactcaggaggctgaggcaggagaatcgcttgaacctgggaggcggagattgcagggagccaagattgcaccactccattccagcctaggcaacagagtgagactctgtctcaaataaataaataaataaataaattaaataaaataaaatcaatagtaacttgaattgtaaagtgttagctttatgagcattaagattcaacttctgatctatttctacgttaaatgtgtctctgtatgtttatttttattttagagacagcatctctccctgtcacccaggctggagtgcagtggtactatcatagctcactgcagcctcaaactcctgggctccatcagtcctcctgtctcaacctcctgagtagctaggactacaggcacacaccagtacagctggctaacttttaaaaattttaaatttattacttgtagagatggggttgaccaagttgttcttgaactcctggccttaggtaatcctccagtctaagcttcccaaagtgctgagattacaggcatgagtcactgctcccaggccctctgtacatttaataatgtcaatgcaaaaacagctgtttgcacaaatacactgcattattaacttcctggtcttctgttgctagtttgaaataatcagatctcaaattttaacaaaaattctggcactacaaaaccctggaaagccagttttatttgaatatcactcgattagagtctactcactttaagataaggttagtattttttcgactattttaaatctgaattatatggtatctaatttaagccttcctgggaaataaaaaaaaattcctcattgtgtatttactactttacttacagtgactaagttgttgcaaatatatgtaagtgcatgtgtgttatgtgcaatttctatttttagtaggaacgtggcaccaacagttacagcactgagtttgccatgggctactgtgtgacatgtgatgactcaactctcccacctcttttctcaaaatgatcgtgaaaccttacacgttttgtcacaatgttcattggctttcaactgataaaaacaaaatcctaaacttggtgtgaattcaggctctcaaaacttcatgttttaaggtactcatctggaaaaatcacaatatgactttgctttagattagcatcaaaatgacaacataaacatttttaaactgcaaccaaatggtggattctccaggaacttatgcttgaatatcaggctgaaacacactgccatagatgatagccattaattcattcaacaatatctattcaggctatatatgcctggcacagggaatccaacaatcaacaaactgcctgcccttatgaaaagccttactaaagagtctagtggggaaggatgacaacagacaagtaatcatataattcctgatgattagtggtataaagaaaatgagtgggggccaggcgcagtggctcacgcctataatcccagcactttgggaggccaaggagggtggatcacctgaggtcagaagttcgagaccagcctgaccaatatggtgaaatcccgtcctactaaaaatacaaaaattagccgggtgtggtggcaggcgcctgtagtcctagctacttgggaagctgagacaggcaagttgcttgaacccaggagggggaggttgcagtgagccaaaatcatgccactgcactccagcctgggtgacagagccaaaaaaaaagaaaagaaaagaaaatgagtgggataggggaagagagaaaaaggatagaggtgttgttttagagacactggttagaaaagccatctcactggaactgagatttgagctgacaactatataaattctacctgggagttttccaggcagaagagcaagtgccaaggtcctgagacaggaatgtacttggaatgtttgaggacccacaaggaggccagtgtggctgaagcacacaagccacggaaataatgtcagagaagccaggtgcctgattacacagggtcctttatgttgtagtgatgactttgttggtccttaaaaaagaaaaaggattgcaggaggcatgcttcagacagactgaggatggaacttctagctctggaactcaatttttttcttttacttttaaaaatccacctcactgggccaggtgcagtggctcacacctgtaatcccagcactttgggagcccgaggaggatggatcacctgaggacaggagttcaagaccagcctggccaacatgtgtttttttgagatggagtcttgctctgtcgcccaggctggagtgcagtggcacaatctcggctcaatgcaagctctgcctcccgggttcacgatattctcctgcctcagcctcccgagtagctgggactccaggcgcccgccaccacgcccggctaatttttttgcccgccaccacacccggcaaattttttgtatttttagtcgagacggagtttcactgtgttagtcaggatggtctcgatctcctgaccttgtgatccacctgcctcggccttctaaagtaatgggattacagccgtgagccaccacgcacggcctataatgtgttttttaaagagggggggattatgaagcaaatatgcagaaaaattaacttttgttaaatctagtagtgggtgcatgagtttttttttacattatttttgcgtatatctttaaacgtttcaaatattttaagagaaaaaagcaggctttcacttaaaatgttaaacaagaggccgagtgtggtggtacgtgctggaggtcccagctactcaggaggctgaggtaggaggatagcttgagcccaagagttcaactccagcctaggcaacataacaagaccttgtctcttaaacaaaaaattacataaaattaaaaaattaaatgttaaacaagaaatgtctaatatcaagattgttcatgatgtgattatacaatacaggtgaaaaacaatatgcacagtagaagagtcagtatagcagagtggttctggcactagattgctttggttttttgttttcctttttgttttttgttttgaggcagagtctcactctgtcacccagactggagggcagtggcgtgatcttggctcactgcaacctccatctaccacattcaagcaatttttctgtctcagcttcccaagcagctgggactacaggcaggcaccatgcccggctgatttttgtatttttaacagagacagggtttcaccatgttggccaggctggtctcgaactcctggcctcaagtgatctacctgtcctggcctcccaaagagctgagattacaggtgttagcctggccttgctttggttttaatcctgattatgctacctactagcaatgagacactgaacaagttacttaacctttctgtgcctcaagttcttcatctgaaaaataagaatgatagtaatggtacctgcttcataaggatattaaaaggattaagtaaatactacatgtaaagaccctggtgcacaatagatgctaaaaaggtgttaatagctattattattattatataattttggtttcttaaaaaagtacatactatacacacatagaaaaaaggagcttgaatggtccattaaaaatgttagcaattataatctctgatagataattttaattttctttttaacctatttctgcacattctgacaagcaattccttttgtattataaacaacagaaacacaacaagccttccccaaaagtgccctacaagtttggtaagcagtgattctcaaagtgtgatcctcgcaaggactggcagcatctgcaaccagagaacttgctagaaatgtaattctcaggctccacctcagacacactcattctaagatggagcccagcaatctgtgttttagcaagccttccagactgtgatgcacattaaagcttgaggactactgtgcgaaggaatgacttgcagctctgtactcggtcatttgtctcaaggggccctggtgtaaggtcttaaagagtggaatactggccactgctcaaacacattcacattagaaaaaaaaaaaggccggggacggtggctcaagcctgtaatcccagcacttagggaggccgaggcaggcagatcacgaggtcaggagatcaagaccatcctggctaacacggtgaaaccccatctctactaaaaatacacacaaaaaaattagccgggcgtggtggcaggcacctgtagtcccagctactcgggaggcggaggcaggagaatggcgcgaacacgggaggcggagcttgcagtgagccgagatcgcgccactgcactccagcctgggagacagagcgagactccatctcaaaaaaaataaagttaaactcctgctgacccaacaaaactacatcaagccaagtttggctactggtcaccagtttgtattgacttcttgcctaattctctctcaaatcagtaagcagctgtgatgtagtggaaagagtgagtgctgaacaaggaaaaccttgatttgaagcccagctctatttcatagctggtggtaataaaaacgatgttaaccttttagagttaaatcttatccgtataaggacaatactgtatcacaggagtgttttaaagattaagatgatatactcaaaacactgccctataataaattgccctcaattaaattttcatagcatttgtgatatttcctgtattattttgattacatgctttattctacttatatttatgaacaatttagtttagcctccctcttctattaaactctaagcttctttgagacagagatgaaattttgcatccctttaaattcttataatacctacttcaataattagtccctcccaaatccactttgagcttcagtcgaagcttgtgactggaagtctgactatacgtggcacgggtctggaagaacacagtcaattcttggtaaagatgtatagtttatataggcaggtatgtggccaacttacagcaatccccaaagttatgattcccttccttatatatataaaatataaaagatcaagaacaatgatggttgttctgttggtaaaagtggatgacttctgcatttacatttaccaagtttgttaaaagcaatatagggagtttacaagtgccatactagaaactatgaaaaagatgaatttctattttaactgaattttggcaatttaggtattagtgatgctggggtgatggtggtagaagagacgtgtatcagcacagctaatgtcagaggcccagcttattcttttcatctggactactaaaaacaagaactattatctaccccacaaaaatcctgtgaaagttaattaggtagttaagttaatcttcattaggcaagatcatggaatttgggaggaaaagaggaaggaagcctgcagatcttgcataagcaggagaggctttctacactcctccggtcttataagaaacagtatgtcctatttttgacctaacaattttttttctttgtaggtatccatgccttctaagtgctagtaataaagaattaattcacatattaaacttgacatggttaatttcattgcccctttatgttagctttctttctgaactttgagtgcatctacaaacttattaaatgatctagacaagccagaaaaaggcttctcatttcttcagtggggtgggaagtgattattttgtcatagtatggttcagaatgacatattcaaatacaattttaaaaatctacttcactatgtatatgtatcatcaataagaaaaatttggcctggtgttgttaagatataaaagtacctgacagtgttagaattgcagactgttgtcatctcatgtgctacaaagctttaattcaattatttggattctgtatgagaaaaactttcactgcaggtgtaacattttcgtcacagcataaaataatctccacttaaaggagatacccaatttctctacttataaagcattcaactgttaataaaaaatcagtgccaaaaccaatctgtgtagttaccaccaaacttgttagaataaacaacttttcttgcatgaattctctgagaaaaactttattgaaaaataccccctccggccgggcacggtagcttgcgcctgtaatcccagcactttgggaggccgaggcgggcggatcacctgaggtcaggagttcaagacctgcctgaccaacatggagaaaccccgtctctactaaaaatacaaaattagctgggcgtggtggctcatgcctgtaatcccagctactcggcaggctgaggcaagagaatggtttgaacctgggaggcggaggttggggtgagccaagatgacgccattgcactccagcctgggcaacaagagtgaaactctgtctcaaaaaaaaaaaaaaaaaaagaaagaaaaatatcccaagataggaaaaatcacttctcttgtaattaaggtccattatggaggatttctctttcaaatatttattttcaagaaaattgtagcaattaggtgcacatcaaaactaataccctttatgggcctctattttgcagatggttcatttcaaagcatcaagttctacatacatacatacacacacacacacacacacacacacacacacacacaacctaatcaggcggtttcctgggcagctacagaagactcaaatgatctcatggacttcactaatgtttctagttggtgccaaatgtttcagaaattttgaggtagtccacttacctaaggtgatactaaacttccagaaagcaagaatttccgtaataagtgaaagaggatgaatgtacaaaaataatactagctttcaattaacatatgaatattgttctgtatgaagaggcagtttcctacccaagtgaaaaaagaataaagctgttgcctccttaacattaaacatcccttcatcactaagaggagactctaaggcctagcaaaagatttgagcctaacattttgggttttttttttttttttgagacggagtcttgctctgtcgcccaggctggagtgcagtggcgtgatctcggctcactgcaagctccgcctcccgggttcacgccattctcctgcctcggcctcccaagtagctgggactacaggcgcccgccactacgcccggctaatttttttgtatttttagtagagacggggtttcaccatgttagccaggatggtctcgatctcctgacttcgtgatgcatccgcctcagcgtcccaaagtgctgggactacaggcgtgagccaccgcgcccggccgggattttttggtaagcagcagcgtaaaaatcactctcaaggtttgagattgggatccagcataactggtgacttgaccttgggcaagtcacttaattccttttagtctcagtttccctgattgtaaatgaagtcaacaccacctggtaaaggtattacaggactggtgtgaggatgagatgatacatgtgaacatattattaaatatgtaaactataaggcaatagtaagcaaatgctagttactattctatgtaatacaggcctaacctttcctgcctatgtcctgatctgtaaaaagaagacaggttgagatctgaatgtctatccactcacttatcagctgcgtgaactttagcaagtcatttcctttctgggcctgtttcctaagaaggttattttttaagatcaaatgatatcgtgttatgcaaatgctgtccagacacatattaagaacttaacacatgatggctcttattattctctggggagtagggtggtaaagagcaaatgaaattaaacctagttaagagaatttgtatatgcacacaaaactctacagacatccaaggtaccgttatttgcactgtaaactgccaaaacatgcaggaaacgagaaatcaaatggcgcctcagtgattcgcactagagagggggagaaggcagagcttccgagaatcaactgttttcccccttatggcctccagcctagattagaccatttattcaacttcccagcccccaatatccctggacatttatttactgtacctttttcactgagagcctttccactcccctccccttctagtagtcgtgaacttcagaccctcgcttcgactcccactgccataactgtttttaaccaagcttccctgaatcctcccctccgcctaaggaggaagtgcagctagacgcaccgcacggcatcctaggaaatgtggtctctcagactctttgccttgggctgcagagtggggaagacgacgaaggagagcccagtaaaactacaactaccggcaggcaacgcgagtcaccatctttctttcgccccttttcctgttgccgtcctcttcctcctctcctctagcgctgaaccgcttggcctcacggtacttgtagttccttctggactcaagatcctagggcttgatggccagcacagaggctggaagactctaattcccagagggcagagcggaagctgcgcctgcgcacactcaatgagggcgtgtatgtctgtgtctgagggagagagagcgagagtgagtgagtgtgagtgcggggtggggtggtggccgttacgttcggggcaacggctacggcagtggagaagtaagaagagaaacaacgtccggcgcttccgccttcgcttaggaggaggaagagctggtagggaaaggaaagtgcttcgccctgggcctggactggaccgagtcgggttggtgggggtctgggctatgagcttttgagggtcgcctgggacgcggagcgagacacgagagccaggagctatgtctcagccgccgccgccgccgcctccgttgccgccgccacctcctccccctgaggctccacagactccgtcgtccttggcgtcggcggctgcttcgggggggcttttgaagcggagagaccggagaatcctttccgggagctgcccggatccgaagtgtcaggcgcgtctatttttcccggcctccggttctgtcagcatcgagtgtaccgagtgcggccagcggcacgagcagcaacagctgctgggggttgaggaggtgaccgacccggacgtagtgctacacaacctgctgcggaacgcgctgctcggggttacgggggcacccaagaagaacacggaactggtaaaggtgatgggcctttccaactatcactgcaaattgttgtcgcccatattagctcgctatggaatggacaaacagacaggccgggccaagcttctccgggacatgaaccagggcgaactgttcgattgcgccttactgggtgaccgcgccttcctcatagaaccagagcatgttaacactgtgggctatggcaaggaccgctccggaagcctcctgtatttgcatgacactctggaggacattaagcgggccaataaaagccaggaatgtctcattccagtgcatgtggacggggatggacactgcttggtgcatgctgtgtctcgggctctagtaggccgagagctcttctggcatgccttaagagagaatcttaaacagcactttcagcagcacctggcccgatatcaagctctgttccatgacttcattgatgctgctgagtgggaggacattatcaatgagtgtgaccctctgtttgtaccacctgagggtgttcccttgggcctgaggaatatccacatatttggtcttgccaatgtgctacatcgtcctattattctgttagattccctcagtggcatgagaagctctggtgattattcagccacctttctacctgggctcatccctgcagagaagtgcactgggaaagatggtcatttgaacaaaccaatctgtattgcatggagcagctccggtagaaaccattatatccccttggtaggcataaaaggggctgctttgcccaaactgcctatgaatttgcttcctaaagcatggggtgtgcctcaggaccttattaaaaagtacataaaacttgaagaggatggtggttgtgttattggaggtgacagaagtttgcaagataaatacttacttaggcttgttgctgctatggaagaagtctttatggacaaacatggtatccatcctagtttggttgctgatgtccatcagtatttctacagaaggactggagtgataggagttcagcctgaggaagtcacagcagctgctaaaaaagcagtaatggataatcgccttcacaaatgtttgctctgtggtgccctttctgaacttcatgttcctccagagtggttggctcctggagggaaattgtataacctggcaaaaagtactcatggacagctgaggactgacaaaaattacagctttcccttgaacaatttggtttgctcatatgattcagtgaaagatgttctggtaccagactatggaatgagtaacctaacagcttgtaattggtgccatggcacatctgtgcgaaaggtcagaggagatgggtctattgtgtatttggatggagacagaactaattctaggtccactggtggcaaatgtggttgtggattcaaacacttttgggatggtaaggagtatgacaatctaccagaagctttccctattactttagaatggggtggaagagtggtcagagaaacagtatattggttccagtatgaaagtgattcatctttgaatagtaatgtttacgatgttgcaatgaaacttgttaccaagcactttccaggtgaatttgggagtgaaatcctagttcagaaagttgtccacactatattgcatcagactgccaaaaagaatcccgatgattatactcctgtaaatatagatggtgctcacgcccaaagagttggagatgttcaaggacaagaatcagagtctcagctcccaactaaaattattcttactggacagaaaacaaaaactttgcacaaggaggagttaaacatgagtaaaactgaaagaactattcaacagaatattacggaacaggcttctgtaatgcagaaacggaaaacagagaagttaaaacaagaacaaaaagggcaacccaggactgtttctcccagtaccattcgtgatggtccatcctctgcacctgctacacctaccaaggctccctattcaccgacaacttctaaggagaagaagatccgaatcacaactaatgatggacgacagtccatggttacccttaagtcttcaacaaccttttttgaacttcaggaaagtatagccagagaattcaacattcctccatatttacagtgtattcgatacgggtttcctcctaaagagttaatgccaccacaggcaggaatggaaaaggaaccagttcctttacagcatggcgacagaattacaatagaaattctaaaaagtaaagctgaaggtggtcagtctgctgcagcacactcagcccacactgtgaaacaagaagatattgctgttactggtaaactgtcatctaaggaacttcaggagcaagctgaaaaagaaatgtactccttgtgtcttttagcaacattaatgggtaagatgaatttaattctgatggtatatcttaattgtaaatataatacactgagttttcctgttatctttgggggaaaagaaatctgtagccattgtaagtttttaattatatatttcaggagagaattatttttagtattttgaacagttgatagatgttaataggattattgagtaactattaggaaaatagaaagttaaggtagtccctcaataatagtcaacagattatttaaatatatcttattcttgcaattgctttttaaaaaacagacttgtatttatttaaagcgttttaaattttttggtaggctctattgatcctgcctaccttgcccctttttcatttatttttaatttttattttcctgtatgtcatgtgatttcagcacttcctgtttgatgaattgcagtttctggtgtttatattctcactgcactcccacctagtagtctcttacatttcattttcttcctttcccagttcatcacatttttctttctcatacactaggatttgtatgtaagtacactaggatttgtatttaagtaatttcactactcaagtctttgccatcaattataatgaactgttataagttgtagttcatgagaaacataaacagagatggatggtaatggtgtaaagaagtatttgtttttaatcagcataaattaaagaaaaatatattaaccaaatgtgtaatttaaagctttagatgatttgggatactgttcaatggtgtactttttacagtgtctatatttgcttagtctttgttttgaaataacttagtatgctttactaagtcttaaagtatgaagtaaaatttaaatgtgttagttactggaagggttttatttttgctgagattaaagctttcaacgagaaaagtcatctgggttttgattctgttttctgatagtactatatggcagtgatttgggccttaatctatcaaaatgaatactactcctggcttatctgggggagtagtaaataggggatctaaaaaccctgcacaaatttagaacccggaattgttgattttagtttgccagacatagtaattgaattggggagtatgtcaggaactgtcctacgcactttatatatttcttttttttttttctttttttttgagatggagtcttgctctgtctccaggctggagtgcagtggcgccatctcggctcactgcaaactccacctcccgggttcaagcaattctcctgcctcagcctcccaagtagctgggactacaggcccacgcctccatgcccagctaatttttgtatttttagtagagacggggtttcaacttgttgaccaggatggtcctgatctcctgaccttgtgatcaaggtcacttaaatacgaatgctagtgtacttaaatacaaatcctaggtggcctgtgactgtaatcccagatactctggaggctgaggcaggagaatcgcttcaaccccggagttggaggttgcggtgagcctagatcgcgccacggcactccagcctggcgacagagcgagactctgtctcaaaaaataaataaataaatgaataagtaaataaataaaagaccttcaatctcccaggtcaaaaacaggaaagagaagatcttcctcaatagaagatggactcttgagaatgtggctcttacctttatccttgtatgcacagaacctgataatagtgctcagcaggtagtatgcactctgaaatgttttttaattgaattaaatagatgacattaacacagctaaagaaaggctgtatctgcagaaatggaatggatggtcagtcagcactgaacattgaaaaaagtgaaaagcagaattcggcaatgttcatatactgctgtacaaaggaaaaaggtacatcatctggggttcatgaaaattctggtaactagaaaggtaatctctgtcgaggggtaggaatatttgaacaatcctgactgtggcctggctgaaacatctctatccctttgcctgatttccatgttcatcaggcatctattcgtaacacttannnnnnnnnnnnnnnnnnnnnnnnnnnnnnnnnnnnnnnnnnnnnnnnnnnnnnnnnnnnnnnnnnnnnnnnnnnnnnnnnnnnnnnnnnnnnnnnnnnnnnnnnnnnnnnnnnnnnnnnnnnnnnnnnnnnnnnnnnnnnnnnnnnnnnnnnnnnnnnnnnnnnnnnnnnnnnnnnnnnnnnnnnnnnnnnnnnnnnnnnnnnnnnnnnnnnnnnnnnntctcaaaaaaaaaaaaaaaatctgatcggtatgattatatatagatttttgagacagagtctcactctgtcgcccaggctggaatgcagtggcgcgatctcagctcattgcaacctctgctacctgggttcaaatgattctcctgcctcagcctcctgagtagctgggattacaggcatgtgccaccacacctggctaatttttttgtatttttagtagagacagggtttcaccgtgttagctgggatggtctcaatcttctgatctcatgaaccgcccgcctcggcctcccaaagtgctgggattacaggcgtgagtcactgtgcctggttgataatatatttcataatgaaaattaatcaaatataattctggtgtataaatactttctgagtttggttggaggttcttggacctgaatatctgagagaacctagagtatggactgcaatgagttcaccaagataatgtctttctattctgatcccttccctcttcatatccagcatttatgcctgtataaacccacaaatttctttaaaacttcttccactaccaacacaaaatttgggtgtaaaagagagcattgtgttacttttgtaatgatatcacttgagatactttctgctttaaattgaagtattaagtgcatagcctgtattatattagtcccttataaatcttagttttcttcctctagttcgcttatgactgtatttgaattatgtagaagattttttttttgagacagagtctcgcagtgtcgccaggctggagtgcagtggtgcgatctcggctcactgcaacctctgcctcctgggttcaagcaattgtcgtgcctcagcctcccaagtagctgggattacaagcacgtgccaccacacccagctaatttttgtattttaatagagagagagtttctccatgttggtcaggctggtcttgaactcccgacctcaggggatccgccctcctcggcctcccaaagtgctgggattacaggcatgagccactgcgcctggccgaagatattcttaatttaaaaaaaaagatgttcctacaaaattcagtttggggataaatactaaccatatgtaaagagtactggggaactgttgatgtttagattggagaggactagaaaatgacagagcttgtttagaagattacagatttcaaagtgcagaaattactttgtgaattaccaaatgtgagctaagctgtgttatgttagtttagaatatagctcatcagactttatgctgttcaaatagctggttctttctcgtttaagtttaggcttaaataccaccaccctgtaagggtttgagaaaactttgctgaccattctaagtaggttccctctatcagtgtaccctgttgatgtccctcacggcatctatcacaatttttaataatcttatttgttggtttaattatttgtttgcctcccccactatattataaagtccatcaagacagagactgaaccctattttcttcactaatcaataccttatttcctagttcagggcctggcacatagtaggtaccaagtaaatgcttgttggattaatgaatgcaattatttcagcaaaatcagtgtatactatgaacttgtatgtatgttgagtgtacaaagataaatgaaagtcagtgcttgccctccattaacttacctgcaggctttcagctgaaggagttccatactttttagctttcatcagcagatctccagctttattttctaaatacataaaaattataaaatccccaaataggaccaacacagcattttagaacttctcatttgattaagaatcaaatatatacatggggattgtatattttctttcttttttttttctggagacagattgtcgcccagcctggagtgcagtggtgtgatcccagctcactgcaacctctgcttcctgggtccaagtgattctcaacctctcaagtagctgggactacaggtgcgcaccaccacgcccagctaattttttgtatttttagtagagatggggtttcgccacgttgcccatgctggtctcgaactcctgagctcagacaatccaccgcctcggcttcccaaagtgctaggattacaggcgtgagccactgcacccggcctgtatgttttcactaaatgggctgactgcatgatagccagggacatgagctttttctttcatttttaagtaggatattcattgattagatcgtctattacttatattaataaaacaataagtaggtgtattagtctttggcttagtacaagtcattcatggaacctagtaactttgaatcttaggaactataaaatggaataacaatattttacccataatattttacatttttaatctcttttatccagaccacaaagtaattgaacttaattttttgcagacagtcatcttcattatttatataatacttaaaagactaactctggctttgcaaaatatgtcattcagatttcttgtagacctggtgcggttgcagtgagccaagattgcgccactgcactccagtctgggcaacagagcaacactctttccaaaaaaaaaaaaaaaatttcttgtagatcagttatttgtaggttttctttcatggtagacaggataggtggtacattatccaccataaatatttgggctaatttattttttcttagtgttatatttcattaagtttctagttttgtttgtttttttgttttcctagaggtaaggacagatttaggtgaagaacagaatttgtcagtttggagttacttaaatgaaattaggctacatgacacttccttgctttactacaaagtgtaccaacctttcaggagttgagaaacttgtttcattttgatatactttctctgttcctgaaagaattgtgtggctttttaacgtatatatatatttaaaatacacaatattttgtaatttcataatacctcttgatgtcgtaaatgccttagaattttccagaatcggctgggtgcggtggctcacgcatttaatccagcattttgggaggctgaggcgggtggatcatgaggtcaggagtttgagaccaggctggccaagatggtgaaaccccgtctctactaaaaatacaaaaattagccgggcatgatggcgctcgcctgtaatcccagctactcaggaggttgaggcaggagaatcacttgaacccaggaggcggaggttgtagtgagccaagatcatgccattgcactccagcctggtgacagagtgagactctgtctcaaaaaaagaaaaaaagaattttccagaatcacgcttgggactgagacacttattttttaggtgacaactgaatattattattgcacctttttttttttcaaatgttgggtaaagggcagtttcaaatctagatagtacttatgcatattcttctttttttttttttttttccccaagatggagccttgctctgtcgctcaggctggagtgcagtggtgcaatctcggctcactgcaacctctgcctcccagtttcaagcgattctcctgcctcagcctcccgagtagctggaattacaggcgcctgccacaacacctggctaatttttgtatttttagtagagacggggtttcaccatgttggctgggctggtctcgaactcctgacctcgtgatccgcccacctgggcctcccaaagtgctgggattacaggcgtgagccaccgtgtctggctgcatattattattctttctatgccttctgatagcccttctgttgatttatatgtagcatacttgtaatgggagagcagttataaagttgaataaaaaataatgcataggtgtatcttaagataaatgtatatattgtaaatggtgattttatataattatactttgaaaattaagtcaaatattgatgttattcctttctagatagaaaaggaaatctagataataatagattctgttccaactactttgatcacttttattttaaatattttttcaattacaatataatgtttaaaattcaaataattcaagtacctataaaatatggtagttcttaacatttgtactccccagataaaatcattattaataaattgggatgtgtcctttcagactctgtacacatttaaacactgttgagtttgtgtgcatgtctgtgtatgataaaaatattcattaatgctgctggtgacactaaagttgtgtgactatataccgttaaggggactgaatttcaggcaagaaacagatatgccttttttataaaccattttgactatcaatagggtagataaacttttaaacgtgaggattacgtcaggaagggtagagagatgccaacaattctttcagcaaatgaatacctttacctttggaattctgtctagttgaaacagtcctgtgttcctactttatatttggaaccatttattcaaattattaaaaaattttgaattgtttctttaaattttaaatttaaataaacaagtacttcattttatggtcataaatagttgagttcagagttcgttttgggtgtttcttttggggctttaaaaatacattttggctgggcatggtggcttacacttgtaatcccagtactttgggaggccgagatggacaaattgtctgagatcaggagtttgagactagcctggccaacatggagaaaccctatctctactagaaatacaaaattagccgggagtggtggcgcacacctgtaatcccagctactcgggaggctgaggcacgagaattgcttgaacccgggaagtggaggtttcagtgaacagagattgcgccactgcacttcaggctgggggacagagcaagattctgtctcaaaaattaaataggctgggtgcagtggctcaagcctgtaatcccaggcctactttggtaggccgagggggcggatcgcctgaggtcaggagttcaagaccagcctggccaacatggtgaaaccctgtatctactaaaaatacaaaagttagttgggcatggtggtttgtgcctgtagtcccagctacccaggaggctgaggcaggagaattgctggaacctggaagatagaggctgcagtgagccaagatcatgccactgcactccagcctgggcgacagagcaagactctgtctcaaaaataaataaataaatgaataaataaataaaaatacatttcatataggtattagatttttaaatttactgctttgcctcataaattgcaaagtaaaaaattcaaattgcctttttaaatatttaaagttagaaggctaggcacagtagctcacacctataatcccagcactttgggaggccaaggcaggaggatggcctgagaccaggcattcaagaccagcttgggcaacacagggagaccctgtctccaaaaaataaataaacttagcggctgtggtggcacacgcctgtagtcctagctactcaggaagctgaggtgagagggttgcttgagttcaggagatcaaggctgcggtgaaccatgattgagccactactttccagcctgggtgacagagcgagaccctatctcaaaaaataaataaatacctaaaatttaaaaattagaatggtgacctcttaaactttttttgatgttgactttaaacttttaattccataattttattagaaaaaaattagaaaaaatacattttaaaaaatgtattttaacatattttaaacaattaaaagttattcacatcaaataggaaaaaaattggataaaccaaaagaaaaagcgttcatagtaccactgccatatatagctactgtttcaggtagaagattgaaggttatgaggggggaaggatttgtggaagcaaggcagtagtatagattttttttctacatttatatatacacagtacattggatagaagtatttttacttttgtagtatgaagaaacagttgaattataaagtaaaaataattggagactaacaaaaatataaattaacataattgttagaggcttttccaaactgttcctattctctaaaagtttgctttcgaataaaatggtagaaaaactatttccctttttttttgctattattttgttttattagattcttgaagagaaaacaagattcagggaaaagtcagtagcatataatcattagttgtattttatatatgtaacattgaagaatggttatcatcatgctgcttcgattaagtttattctggattgctttaaggcactgtttaaaaggaaaaacctcgtttataatattcactccgccaagggtgtctaaggtagataatacagttatgggttcttagcttttgtttctggttgggccagtagagccctttcctcatcacgcttttctgcttatcactagagacagaaattaaaaccgtagcttcaggctgctaaaagcctaaaacaaaacaaaacaggaaaacaacaaaataaggctggttagaaaagcttgcatctatacattcattcaaccaatactatgagtgttgccatctgttcagcactgtgcgaggccctgggggtaaaaagtcagataggccactgacctttccctgaatctgaaaagtataaaagggaaacctagtctagaaggtaaaacagaaaagttaattaacctgaagtgtgataagggctgtggtattcatatatgtaggagcatcaaacaagggtacctacctaaccaacactccaaagaatcctaaaggaagtgatacctagattgagttttaaatgatacgtaacaattattggcctttagggaacaggaacagttgtgtggtggtataacattgtaaaaataagggtatggtatgatgtcagatgggaaaggcaaggtccaactcttagagtgccttgtatgccatggaaaaggaacttggactttgccatacggcattggggaaccattataggtttaactctgaatgctgtatagaggagggatttatgggggataagactcaagggaaaccagctgtgaggaagtggcagtaatccaggcattgaacctgggcgttaggagggttggagagaaatgcagtggagagccataggagagtggtgcaggacttgtgcaaagtgtcaaaaccctgcttcctgatctctaatccttttcctcattttggtaccaacaaacatgaccttcagtggagatatttgtttagcaaaagagattacctatttttttctccaaccagttgttgatgccatgaatttctattaagaaaagcctggatagttctttcaaatttgccgaaacacaacttgacctttttttgtgtgtgcgccttgctctgtcagccaggctggagtgctgtggcacgacctcggctcactgcaacctctgtttcctgggctcaagcaattctcctgcctcagcctccagagtagctaggataacaggcatgtgccaccacgcctggctaatttttgtatttttagtagagacggagtttcaccttgttggccaggctggtcttgaactcctgacgtcaggtaatctgcctgcctcggcctcccaaagtgttgggattacaggcgtgagcctggccaatttgaccttcagtagaggtttaatgtcaatggaaaggagggtataagctttggactgatacacaggattcaaatcctggctctcccacttactagctgtgtgatcttggaagagttatttaagctctctgagcttgtttccttgtctgtagagcttagttgtgatgagttaatgaaactatgtgaagagcctgctcagagcttggtagataatagaggcttacatggtatttcccttaaagcaatggaacagtggggccatattgctttgaagggggtaaaaatttgttcttggaggaggaagggtgaaaaaatcttatgattaatatataaaactaagatgtatatacagtacataagcagatataaggtatatctgtgtaattcaaatatcatgaggacatggggaggactaggaaaataatgcctgtaaaggctccttagggggagataatgaaaacaaggttgacaaacactgcagtagagtaagtgatttgcctgtttaaattaggaataactaggtatgtaaagtacctaagagatgtgatttttcttattaatcagttggtcagttctgaggagttcaccattttggcacctattcattcttgtggtttttgtttgtttggactagtcaagtgcaggtagtgagaaggggagaaatggtagaataagcagttccaactgtaactgaacagtcagttgagataactcactacctttagaccagccctgtttggattcttatcaaaaaaattaaataccaccctatctttttttgatatgtcttccaaataaatgctatactagaatattttagaaaatattaagtgcatttaggacaacattgacaataacgaaatgaaaggttatcatcatagaaataatttatccaagtgaggtttaatagtaagctcagcaatcagagccaccactagtggttattaatatttctttatttgtggactcttattaatattaaacttctgtgtgtccatccttaaatatagctattctagtagtactgcatcattagtaaatgtttataagtaaatgttttgattaactgaaactttaattgtcaagtcttctaaaacttgtctactttaagctggtatagtgaaggtaagtttagccaactgccacataaagtcataccctgtttatgaatgtgaggtgggattagaactctgagatgttgtaagtacatagtgattaattagcagtgtcagtcacaactattcagagctcaggtccaacaatataatcttcatgtagggaagacaaaagttaattttttgtgttaaaaattaaaaacttcctgattataaaagtagtatgtatacattagcagattagaatgtaaactataaagcaaataaaaacagccatagtaactgttatgttcctgccattctttattgatttcttcaacagtgatgatcattctttactttttatttgaaatttcttactgaaataagtactgaaatagccccttctgtttatttcttggttttaatataaatataaaatttatatttacaattttgtattttactttcaaaaatatctttttttttttttgagatagagttttgctcttgtagcacaggctagagtgcaatggcacgatctcagctcactgcaacctccactttctgggttcaagctattctcctgcctcagcttccaagtagctggaactacaggtgcacgccaccacgttcagctaatttttgtatttttaatagagacagggtttcaccatgttggccaggctggtctcgaactcctgacctcaggtgatctgcctgcctgggcctcccaaagtgctgggattacaggtgtgagtgagccaccatgcctggcccaaaaatatctttcaataatcttatctgttctagtacagagtttacagactagtttcctttgagctggattgagtcttcagatatattttgttcatcataatattgactatcttgacttgtggttttttctttttttgaaacaggatctcactttgtcacgcagggtagagtgcagtgatgcaaacactgctccctgcagccttcacctcccgtgcacaaggggttccccccagccactccactgcttcagccctcttaagtagctgggatgacaggcacatgccaccacgtccagctattttttttttttttttttgtagagatagagtttcgccatgttgccaaagctggtatcggaactcctgaactcaggctatccacagacccccaaagtactggggttacaggcatgagccaccatgtttgttgactcatgcagttctaaagatgctttttaattagttcccacattttaaaattgggagaattcatattaaaaacttgaattttgggcttctcttgaaaagccacatggtcttgagacactaggcgtgcactcttccatgacagcacttggcagtggctggcacatttagataggccatgcattttctagtatgccacaatctgtcactcagtatcatccctctatggcgtgtcaggctgtttcactcatttaggagctctgccttgatgtttattctaggctaatccttactaaagcagccctggatggaactcttttgtttgttgctaatactatatctgtttttgtcttacaggagaagatgtatggtcttatgcaaagggacttcctcacatgtttcagcagggtggtgtattctacagtattatgaagaaaaccatgggtatagttaatttgattttattcttaaataatagctctactgaagctgttttaagattaagaaagttcatatagttttctactaaaatattttcaaagttaattttaggtttatattcttttagcagtttgcctaattaaaatgaattattaccctgatatggtcagctatgttttctgctagtattactaaaaatctatcactttgttgctattcttttctcacttaaattatgtgtatgggtgtatgattctttttttttttttttttttgagatggaatttcgttcttgttgcccaggctggagtgcaatggcgcgatctcggctcactgcaacctctgcctcctgggttcaagcgattctcctgcctcagcttctcgagtagctaggattataggcatgtgctaccatgcccggctaattttgtatttttagtagagatgggggtttctccatgttgattaggctggtcttgaactcccgacctcaggtgatctgcccgccttggcctcccaaagtgttgggattgcaggcatgagccactgtgcccggccatgtgtatgattctttttttttttttttttttttttttttttgagacgaagtcttgctcttgtcccccagactggagtgtgatggcgctatcttggctcactgcaacctccgcctctgggttcaagcaattcaccacgcccggccatgtgtatgattcctaacaactaaagacaaattgtgaaatcagaagcagatttgtttataatgctagtattccagaaccagataatgtttgtgttgttgttgttatgtttggccatatttagcgtatatcttattgctttctaagttctaggatacagctcattatacatttagcttctttcacattgtgcatacattgtttgtaaagatagacttgtgtacaagtgtatgtctgtatcttcagagtggtcttaggagagaggttgccaggccatgtgtttggacttcacacatttttttcaaagattttatgttaatgctttcggccccagatttaccgttctggcttatctatttcacctacctggccactgtaggcattaattgcataatcttgttgttttcatctcttcctcatacacttttttttccttccaacttggttgttgtagaaatattcaaacatatacaaaagtagcaagagtaatgtaatgaatccccatttacctactacccagcctcaataatgattagtacatctctgtcccctttttaattggactattttaaagtaaatctcagatatactataatttcacctgtaagtacattggtacatatttcctttttttccttctcattttctcctttgaatttcaatatgtatttctaaagataaggactctttaaaaaaaaaagtcattattacaacctaaaaaaagaacagtattttttatgtcaccaaatatccagtcagtgtttgaattttcttgataattaacgttgataattttctaaaaaatgttttcttctcttggtttttctttaatcagagaccaaaaaaagccttgttttttttcttttaagacaggattattgaggcataatttataaacagtaaaattcactcttttcagacttacaagtatacgaattttgtatactgtatatgaattttgacaaacatatatagtcatgtaaccaacaccaccaccgtaataaaaatatagaatactttcatcactccaaaaagttttcttgtgcctctttgtattcaactctcctcaatcccaggccctgacaaccattgatttgattctgctcctatatgtttgcctttttcatattaccatgtgaatggaatcctatagtgtgaccttttgtgtccggcatctttaatttagcacaggaattggcaaactgtggcctgtggggccatctcaagtctgctgcctgtttttttgttttagagacagggtctcactctatctcctgggctggagtgctgtggtgcagttatagctcactgcagccttgacctgggcttaggtgatcctcccagctcagcctcccaagtagctgggaccacagccatgtgccaccatgcccagctaattttttgtatttttagttgagatggggtttcgccatgttgcccaggctggtcttgaactcttgagctcgagcaatcctctcgccttgacctcccaaagtgctaggattacaagcgacagattacaagcatgagctactgcacccagcctgctgcctgtttatataatttattattattattattactagttttgagacagagtcttgctctgttgcccaggctggagtgcactggtatgatcgtgactcactgcagcctctagcgtcaatcctctgggctcaagtgatcctcatccttcaccctactgagtagctgggactacaggcataagccaccatgcccgactaattttttttacattttttgtagagacaaggtctcactatgttgcctaggcttgtcttgaattcctgagctcaggtgatcttcctgcatcggcctcccaaagtgtgcgattacacgtgtgagccactgtgcctggctgaatacttaaaagttttactggggctgagcacagtggctcacacctgtaattccagcactttgggaggcgagttgggcagatcacttgaggctaggagtgtgagaccagcctggccaacatggtaaaacctcatctcttcaaaaaatacaaaaaaattagccgggtgtggtggtgcacgactgtagtcccagctacttgggaggctgagacccgagaattgcttgaacccaggaggtggaggtagtagtgagccaagatcatgccactgcactccagcctgggtgacagagtgagactcagatagatagatagatagatagatagatagatagatagatagatagattagatacatagatgatacattggatagattagatcagatagatgacagattaggtagatggacggatggatgatagattagatagattagataaatgatcaattagatagattagattagatagatagacagacagacagttttattggagcacagccacactcatgattacatgttgtctatggctgctttcacattacagtggcagagttgaatacttgtgaaagaaaccatatggtgcacaaatgttgccctatacagaaaaaatgtgcctatttgttttaatatgcttttgagatctgtcttgttgcatgtgttagtttattccttcgttttttaaaaacactttgaataactagagtttattcctttttattgctgagtagtattccatgatatagatgtgtcacattttaaaagacctgtaactggccaggtactgtggctcacacctgtaatcccagcactttgggaggccaaggtgagcggattgctcaggagttcaagaccagactgggcaacatgatgaaaccccatccctactaaaaatataaaaaatataaaatataaaaaatatataaaaaatagttgggcttgtgcctgtggtcccagctactcaggaggctgaggtgggagaatcaattgtgtttttttctaggagtttatagttttaggttttatatttaggtttatgatccatttcaagttgattttttaatatgttgcagggtatgagttaaggttcattttttaatgtatggatgaccagttgttccagcaccatttgttgaaaaggctttatgttatccattgaattattttggtatatttgtcaaaaatcagttgaccatgagtcatacacctgaaaaggatgaattatgtgatatgcaaaatatacctcagtgaagttactttttcttaaatcaactgactatatgtgtggttctattagtatttgtagaatctcttttctgttttgttgatctatatgtctctcctttctccagtacagtaataatcctgattattgtatcttatagttattcttgaaatcagtgtgagtcctccatctttttttctttttcagaattgttttgggtgttctgagtcctttgtttatccatataaattttattatttttatttatttatttatttacttacttatttacttacttatgtttttgagatggagtcttactctgttgcccaggctggagtgcagtgtcgcagtcttgggtcactgcaacctctgcctcccagattcaagccattctcctgcctcagtctcccaagtagctgggattacaggcgcctgccaccgcgcctggctaatttttgtagttttagtagagacagggtttcaccatcttggctaggctggtcttgaactcctgaccttgtggtccatccgccttggcctcccaaagtgctggaattacaggcgtgagccaccatgcctggcctatttatttatttaatttacttatttatttatttttgagacagagtcttgctctgttgcctaggctggagtgcagtggtgagatattggctcactgcaacctctgcctcctgggttcaagtgattctcctgtctcagcttcctgagtagctgggattacaggtgcacaccaccacacccggctaattttttgtgtttttagtagagacggggtttcaccatgttgcccaggctggtctcgaacttctgtatttatttatttttttgagatggagtctcactccgtcacccaggttggatggagtgcacgatcttgggtcactgcaacctccatctcctgggttcaagcaattctttcctgcctcagcttcctgagtagctgggattacaggcgtacaccaccacacctggctaatttttgtaattttcgtagagacaaggtttcactatgttggtcaggctgatctcaaactcctgacctcaagtgatctgccttcctcagcctcccaaagtattgggattacaggcgtgaaccaccgcgcctggcctatccatataaattttagaatcagcttgatttcttcaaaaagagtctgccaggatttttattgtgattgcattgaatatacaggctgtgcctgatttaggactttttgactttatgatgggtttatcagggtattaaatgcattttgggccaggcacagtggcctgttatcccagcactttgggaggccgaggcaagcggatcacttgaggtcaagagtttgagaccagcctggccaacactgtgaaaccccgtctctactaaaaatataaaaattagtcaggtgtggtggcatgcgcccataatcccagctatttgggaggctgaggcaggagaagcccttgaacccaggaggtggaggttgcattgagccgagatcacactgctggcactccggcctgggtgacagagcaagactctgtctcaaaaaaaaaaaaaaaaatgcattttgactttgagtttatctggctgtaacccgttgtaagttgaggagcatctgtatagatcaaattggggacagttgatatcttgacaacgagtcttttgaatcatgaagatgttatatttcttgtttttggttttattgagacagggtcccactttgttacccgggttggagtgcagtgacacaatcacagtttactgcatcgttgacctacctggctcagttgatctcccaccttggccttctgagtagcagggactacaggtgcgcaccaccacgccctgctaattttttttttttttttttttttgtagagacagggttttgccatattgctgcccaggctagtcttgaactcctgggctcaagccatctcctgcctcagtctcccaaagttctgagatacaggcgtgagccactgtgcctgaccaaaaatgttatatttcttcattaagtctttaatatctctcatcaaaattttgtagtttacagcagataggtctgacacatagtttgttagatttatactgtgaaatatttgttttttggatgatactgtaaaagatgcttctacaaatttcaattttcttattgttcatttctagtacatagaaataaaattggctttctttttcttttgttttattttttgagatggagtcttgctctgttgcccattgcgccagtgcagtggtgcaatctcagctcaccacaacctctgcctcctgagttcaagcgattctcctgtctcagcttcccgagtagctgagactacaggtgcacgcaacaatgcccagctaatttttttatttttagtagagacggggtttcactatgtcggccaagctggtctcgaactcctgactcgtgatctgcctgcctcagtctcccaaagtgctgggattacaggcatgagccaccatgcccggcctctttttttttttttttttcttggatacagggtctcactccatcacccaggctggagtgcagtggcgcaatcttagcccactgcaacccccaccacctgtgtcccaccaccaactgggctcaagcgattctccagcctcagcctcccaagtagctgggaccacagatgtgggccaccacacccagctaatttttgtattttttgtagagacggggtttcactgtattgcccaggctggtctcaaactcctgagctcaaagtaatccgcccgcctcagcctcccaaagtgctaggattacaggtgtgaactactgcacctggcctaaaattttttttttttttttacattgcccttgattgcccttgtaccccatgtgtgaccttgctaaactcacatattttagcaacttttagcagatccttgtctatgtagatcatcatgtgttttggaaataaaagacaattttattagcaatggctaggacctttagttcagtgttgagtcggaaaggtgagagtagacattatttcctttttccatatcttggaagcattcagcttgcaggtttttcacagataccttttgtaagattgaggattgattgaggacatttctttctattcctgggtttgttgagagtttatattatgaatggaggttgaattttgtgagatgctcttttcctacatgtatcaagatgatcatatggtttttctcttttggtttgttgatagcgtgaattacattgatttttttgaatgttgaacgaactttacttgctggatttaatttgctaatattttgttgagtgtttttgtgattgtgttcaggaaggataattatctagttttcttgtaatgactgtttaatcagggtaatgttggcttcataaaatagcactgagaagcattgcctcctcttttcttctgttttttggtagattttataatagttttaactggtagaattcaccagtgaaaccatctttgcttagagttttctttgctgggcagttttttagctacaaatttaatttctttaatagagtacttttaaaattatctgtttcttcttgagtaagctttgttagttttgtcttttaagaaatctgcccatttcatccaagttatcaactgtattggcataaagttgtttctagtattcccctattgtccttttaatgtctgtagaaatctgtagttctttcatttctgatcttggcaacttgtgcctctttttttttttttttttttggctgtccattctggctgttgatcttttcaaagaaacatttggattcatagggttttttttgtttgttatttttctgatttcagtttcattgatttctgcttttatgtttattttttccttccttatgcttgctttaggtttaatttgctcttttttttcttatttctttattttactttttgagacagagtctcaatctcttgcctgggctggagtgcagtggtgcaatcttggcttactgcaacctccgcctcccggattcaagcaattctcatgcctcagcctccccgagtagctgggattagaggtgtgcgtcactatgcccaactaatttttgtatttttagtagagacagggtttcgccatgttagccaggccagtcttgaattcctggccttaagagatctacccaccttggccttccaaagtgctgagattacaggcatgaggcaccatgcccagcctacaaatttttttttaatgtaggcatttaaagctataaatttctctctaagcatcccttcccttcccttttttttaacatcttttttttttctttctgagatgaagtctcactctattgcctaggctggagtgcagtgccgtgatctcagcttactttaacctccacctcccgagttgacgtgattctcctgcctcagcctcccaagtagctgggattaaaggcatgtgccaccatgcctggctaatttttgtatttttagtagacatggggtttcgccatgttggccaggctggtctagaactcctgacctcaggtgatctgcacacctcgggctcccaaagtgctgagattacaggtgtgagccaccatgcctggcctttttacatcccttttaaactttttatctttcatttcattctactttgttttattttcttctttttttaaattctactttctgaaatatattgatactaattagtggtttttagaagttagtatttaattaggatggattatggggattccagtaatctggatcaatatgcactatcttccatgcaactgcaaataatttccttcagttgtgttttgtgtgtgggagggggttgaaggataagggggtggcatggggatggctatctttactattttcaaaatagttttgtttctagtttgaaattattttttaaatgttaactgtgttgctgagacaattcagcggggaaagaatagtcttttcaacaagtggtcctcagacaattagatattagcatgcaaaatattgaagtttgatgtctacctcaggtttgacctctgcctcacaccatatacaaaattaattcaaaatagatcaaagacctaagtttacctgctaaaactagaaaactcttagaagaaaacataagcataaactgtattgaccttggattaggcataatcttagatacaaaaataaaagcataaataacaagagaaaaaaataaaaagcaaacttctgtgctacaaattatactatcaagaaagtaaatacacaaccacagaatgggagaaaatttttgcaaacatgtatctgagaatggatttgtatctagaatataaagaactcttacaactaaacaaaaaagacaaataacagttaaaaatgggcaaaagatatgaataaatttctctccagagaaaatatataaatggccaatcacacgtgaaaagatgctaaacatcattagtcatcaggggaatgcaaatcaaaagaaaaatgggatggtataatacttcatactcactagcctggctgtggtccaaaagtcacataataagaattgtaggcgagaatgtagagaaattggaaccctcatacattgctggtaggaatgtaaaaatgatgcagccacttgggaactttggcagttcctcaaaaggttaaatgtagagttactatatgatccagcagttctactcttaggtgtatacacaagataaatggaaacatatgtccacacaaaatttgtacacaaatgttcataggtgcattattcatcatagcctaaaatggaagttactaaaatgtccatcaactgatgattggataaataaaatgtgttatagccatacagtgaaatattatttggcaataaaaagtagtaaagtattggtacttgttacatcatggaagaaccttgaaaacattatgccatgtgaaagaagccagtcacaaaagagcatatagtgaaatatccagaataggaacacttagagaaacagagagtgaatctgtggcttccctagggctgggaatgaggtagagggaatgactgctaaggttcagggtttctttttggggtgatgaaactgttctaaaagttccacaactttgtgaatacgctaaaaactggctatgcacagtagctcatgcctgtaatcccagcactgggaggctgaggtggaaggatctgttgaacccagatcgcagtgagctatgattgcactaccacactgcagcctgggtgatagagggaaactctgtctctaaaaaaaaaaactatatatatatgtcccaaaccatttgtttatacatttaaaatgggtgaattgtatgtgaactatatctcaatagagttgtcatatttcctagaatgttacatgtggtatttatcattaagaggtagtttagagctctggagttgaaacgggatagttcccttgacccccgaggggcttgtgaaggggttggcttgcttacttagcccgcagctctcaacccttcatgggacaggcagcacacaggtcagcagatacaggggccgggatgagtgcttctgggcaccagcaggagtagaactctgtgcggccctgcagcagcatctaggggggtacctgtggcccccagggccccagagggcatgtgttaacagtgtgcccttttatctttcccctccacaaatagcttaagtgcttaacagctcattgaagggtcagggtgacagccttttgcacccaccctcttggtacccaagttcttctctggcatccaggaagaatcaggttgcacgaacaaattgaagggtggtgaatgtggaggatttttttgagtggtggaggtggctctcagtggggtggggagctggaaaggggatggactggaaaggtggtcttcccctggagttcagctgtccccggccaaactcttccctgaagtaccccccgtcaagccatccctttgaagtcaagctacttttctctgacatccagctgtttcttctcttctctcgttctctgccactctgccagtctgctggtctgcctggggtttttatgggtacaggatggggggcagggcaggccaaaaagcaacatttgagcggaaaaacaggaatacatgttctcactttgggccgcgggtccaggcttgagggtgggcctccactagggaccttgcccttttctgcctagtatttacctgcctcctttctgtatcagagtcagaacatttgagatcaaattctggatgtattacactctgacttctaagtgtcagtttatttgtaaagtgggtatgataatgtcagggtgattgtgaggatcaaaggagatggtggatgtatagcagttagcaaatgatctggtacctaataaatacttagcaaatgtttgttgttgttattagaattctagctgttcacaaaattaaaattctgactataacacagccatttgaaatggatcatcctcagaaaagtaccttccaaaatagaatttttttctgatatttgtggtaaatttttctctatatttttataacagattcatgtggcaaattattactattatttttaagttcggggtacaagtgcaggtttgttacctaggtaaacttgtgtcatggggatttgttgcacagattatttcatcacccagatatttagcctagcacccacctgatcctccctcctcccaccctctatgctccgaaaggcccaagtgtgtgttgttcccctctttgtgtccatatgttctcatcatgtagctcccatttattattatcatcatcatcatcatcctgtggtcaaagaatcaaaacgtatcaagcccctctcaaccccagccatttacctccgtcttccaaaaacaggaaaggagcatacataactctcttattttattcaaatccaccttaacatatagatggttacatctacatttgaaaaacagtattgcccattataactaaactatactattactatttctgttcttcatttttggaaaggtattctaaaattaattggctcaggccaggtacagtggtccatgcctataatcccagtactttgcccaccctaggtgggcagatcatttaacatggtgaaaccctgtctctacaaaaaatgcaaaaatttgttgtgtatggtggcaggcccctgtaatcctagctacccaggaggctgaggcatgagaatcgcttgaacctgggaggaggaggctgcagtgagccgagatcgcaccactgcactccagcctaggcaacagagctgagagcagacaccatttcccccaaccccagcaaccccaaaaaaaaaaaaaaaaaaaaaaaaaaagaataaaattaattggcttaaaatatagtaagttttcggccaggtgtggtgtctcatgcctgtattcccagcattgtgggaggccaaggcggacagatggcttgagcccaggggtttgagacgagcctgggcaacatgatgaaaccctgtctctactaaaaatagaaaaattggccaggtgtggtggcatgtgcccgtagtctcagctactggtgaggctgacgtgggaggatcacttgagcccaggaggctgaggccatggtgagccatgatcacacaccactgtactccagcctggttgacagagtgagaccctgtcccccacaaaatatatgtatatatatatatatatagagagagagagagagagagagagagagagagaaagttttcttgcaggtttttgtacagagaaatgaagaaatgaatggcaaatttagttttaactatataatactcaactttgcctgtgtttgaactttataaaaatggaattatgctgtataccttcttctatgatttctttctttctttctttttttgagacaggagtctcgctctgtcgcccaggctggagtgcagtggcgtgatctcggctcactgcaaactctgcctcctgggttcacaccattctcctgcctcagcctcctgagtagctgggactccaggcgcccgccaccacgcctggctaattttttgtgtttttagtagagatgaggtttcaccgtgttagccaggatggtcttgatctgctgacctcgtgatccacccgccttggcctcccaaagtgctgggattacaggcgtgagccaccgcgcctggccttttttttttttttttttgagatggggttttactctcaggctggagcgcagtggtatgatcacaacttcctgcagcctcaacctccctggctcaagtgatccttctgcctcagtcttccaggttgctgggactacaggcatatgccactacacccagctaattttttaaattttttgtagaggtgaggtctccttaggttgcccaggctggaactcttaggctcaagtagtcaatttgcctctgcctcccctagtgctgggattacaggcatgagccccaaacctggctgacttgtttagtttagcaacactttttcagatacatctgtattgatgagttcaactgtaggttattcattttcactgctgcatagtattctgttgtattgtttttaacacaattcattgttctgctcatgagcttttgggtagtttctgggtttttaatgtaaagaataatgtaactataaatactatacatgtcattagcatatataagtaatggaatttttgttttgtttcgttttgagacggagtctcgctctgtcgccctggctggagtgcaatggcacggtcttggctcactgcaagttccacctcctgggttcacaccattctcctgcctcagcctcccgagtagctgggactataggtgcctgccaccacgcctggctaatttttttttgtatttttggtagagatggggtttcactgtgctagccaggatggtctcgatctcctgaccttgtgatccgcccgcctcagcctcccaaagtgctgggattacaggtgtgagccaccgtgcccggccctaagtaatggaattgttgatatgtgatagagaaattttaatgtgccttgcttcttaaaatttgaattaaaatttgaaggactatataaaatctgaacattctgtctatacctgccaaaaaaaacccctaaacaattatgcttagaagtatcacaacagtatttgtgttgtatttaaagtatatctttttttttttttttttgagatggagtcttgctctgttgcccaggcctcccaaagtgctgggattacaggtgtgagccactgtgcccggcatatccattgatttttaaatatatattttaaattggggtgtttgttttttgttttgttttgtttttagacagtttcttgctatcacccatgttggagttcagtggctcagtaatagctcactgcagcctaaaactccagagctcagtgatcctcctgcctcagcctcccaaaaagctgagactataggtgtatgccatcaccctcagctaaccttttgttttttttgtagagaccagggtcttaccatgttgcccagctggtatcaaactcctagcctttgtttgttggaaacaaactccaagcgatcctcccgcctcagcctcccaatgtgctgagccaccacgcctggctggagttttttaataacaatataaacgtgcagaaactatagaaatgggaaacatcacctatcatttaaaaatatttgtcttatacatacatgttttaggcaagattgtaatcatagtacttatatttgtttcctgctgttgcagcatcatgcacattttactgtatatatcaggcatcacagcttcctatctaaattttttttttttgagacggagtctcactctgttgcccagtctggagtgcagtggcatgatctgggctcactgcagcctccgcctcttgggttcaagcattatttatctgaatttttttttttttagatggagtcttgttctgttgcccaggctggagtgcagtggtgcaatcttgtctcagcacaacctccacctcctgggttcaagcaattctccctgcctcagcctcctgagtagctgggactacaggcgcgcaccaccatgcctggctaatttttgtatttttagtagagatggggtttcactctgttggccaggctggtctcaaactcctgacctcatgatctgcccaccttggcctcccaaagtgctgggattacaggtgtgagccactgtgccgggcctatttatctaaattttaataactgcatatacttccaacaggtagataggaaataatttacttatttcttgttgaaaatttagatttttttccattgtttcattgtaagtaatactgtgatgaacatgtgtggaactatgattctttctagggatagccaaggaaaagcatctcagtagcaatctggaaacacctgcaaaaccttttttttttttttttttttttttgagatggagtcttgctttgtcacccaggttggagtatagtggtatagcggcgccatcttggctcactgcaacctccgcctcctgggttcaagcaattctcctgcctcagcctccccagtagctgggactacaggctcacacaccaccatgcccagctaatttttgtatttttagtagagactgggtttcaacattttggccaggctggtcttgaactcctgacctcaagtgatccacctgtctgcctcccaaagtgctgggattatatgcatgagccactgcacctggcctcaagctccattcttttttttttttttttttttgagatagagtttcactcttattgtccaggctggagtgcagtgccgcaatctcagctcactgcaacctctgcctcccaggttcaagtgagtctcctgcctcagcctcccaagtagctgggattacaggcgcctgctgccatgcccagctaattttgtgtattctcagtagagttggggtttcaccacgttggccaggctggtctcgagctcctgacctcaggtgatccacctgccttagcctcccaaagtgctgggtttacatgtgtgagccactgtgtgacctcaagccccattcttaactttgctgttagttaagatagcaaaaaaatttttttaaaaaagattctctggggagaactactttagggtctatggcggtggttcttttttgtaatacaataaatctgaatgaattttgttttgaaagctgttatctgtaaattgttatttaaaattcattattttaactataattgtcttgactacacttttattaataccttaagattttaatatgttaaatatcttttcccctttttaggtatggctgatggcaagcattgtacttttccacatctgcctggcaaaacctttgtctataatgcttctgaagatagactggaattgtgtgtggatgctgcaggacatttccccattggtcctgatgttgaagatttagttaaagaggctgtaagtcaggttcgagcagaggctactacaagaagtagggaatcaagtccctcacatgggctattaaaactaggtagtggtggagtagtgaaaaagaaatctgagcaacttcataacgtaactgcctttcagggaaaagggcattctttaggaactgcatctggtaacccacaccttgatccaagagctagggaaacttcagttgtaagaaagcataatacagggacagactttagtaatagttccactaaaacagagccttctgtattcacagcttcttctagtaatagtgagcttattcgaatagctcctggagtagtaacaatgagagacggcaggcagcttgatcctgatttggttgaggcccagcgaaaaaaattgcaggaaatggtttcttctattcaggcttcaatggacaggcaccttcgggatcaaagtacagagcagtcaccatctgatcttcctcaaaggaaaacagaagttgtgagttcttctgcaaagtctgggagtcttcagactggtttgcctgaatcttttcctttaactggtggtactgaaaatttgaatacagaaacaactgatggctgtgtagcagatgcactgggagcagcctttgccacaaggtcaaaagcacaaaggggaaattccgtggaggagcttgaagagatggatagtcaagatgctgagatgactaacacaactgagccaatggatcactcttgatttaattagaggctaataaaggcagaatgtttattgtgaatatgtaatatttgttggctgggccacgtaacttgattagtcattaaaaatcttgtacgtatataattcaaagattatatcttgttattcagtgcatgatagcaagtgtgtgattggccatagcttttaatatactgctgcccaggctggctctgaatttctataaattagctgttagatctgctgagatgactttcttccatatatgtggttcattggaagttctttgtaattttaattccatgaaagtcttaatgtttccaacatgaaaattctcttacttaaatacgtttgatttctgaaaagcctacaaatggaggggaaatgagattgtgctaatgttgatgtcatcaaggtaaccatctcatatactagtgtcaaaaggtttatgtaaacttgaattttatctgaactaaattgtatcttaaaattcatacaattatttattagacagtggaatgcaaatgtttctatgaacgtaaacacattcatagagatttcttggcgaaaatatcttgagaatagaatgtaacgatataacattttgctgatttgtgcaagattggggaaaaatttcttctagattgatgaggtcaatgtgattcagttgtgttgctgtctgagccacagccaattgtgtgtgctctattaatatgttaccattatttttgattcctggcttggtcaagaacaacctgatttttttttttttaatcttgcagaaaagttgattgcaaagtgtggtagaaaaagaaataatggtagcagtagagaatttataaataagagtttatctttatgaatgagttaattgttctacaattttgatcagtggtatttaagcctgtatatgctaagtgtatttatgcccctttgagccaaaatttttttttttttttcagaatccataagagtttatttgttggcttcacttgggtttagatgcaaattttactgcatcacaccctgatcagctgggtatttgcttagtgtattcatcaaatcttcagtgccagtttccttgagaagcagctttcatgcttattccttaaaaacaacagaagagtgtttatcctgagattggtattgcactattttattttattctgcaaatctgtatcctgaagtgtacatttcaacccatattcttctctgttcactgaaattaagttgaatttgaatggctgaaagacaaaatatatgttaatacaatctcttacctagagcattcaaagcctggctgtctctgtttgcacatgtaacagatgcagaactgtgtttgtaattctaagaaaatgtatgtcagaaagtattttatcagatgtttaaaaatctctgcctgttgattcataagggatatagacagtactttaacttgtgtttccagataaggcagattttggtcatctttctgtgaaagtatctctaactgaatccacttcttaaacaaactactctattttaaataaggaaagaatggagaatctagacattttacaggtgtatctgagcaaaatatatatttgggttagtttttatcacattatcacgtttgtctttatattttatcttcatcctaaattttctccctatcaaaacagcaggaaatttttaaacttttatattgtacactatttttgcataaaataagagctgtagctaccaaatactatttactacttagtaaaggtggcttctgtgtattaaactacgaattacaaatatcacttcactaaccactataattatttttggctttttcagccactggaactttttttggggggatttaaatacaggaaaactgtttaagcaaaaaatgcactgctttcatgtaaaatgatataatcttctttaacaaatattttcttcattgataactgacagatatctcatagcattaacataaaataccagaaacaaactttatctccctattcttacatttagtgcaaattggaatgcgtatgtgaatgttagaagatggacttaatctctgacaactttattaatttctctagctacagcaatgctatttaaaagccagttaggtatgaatagtacagtaatagtttgggttctcccttgataaatgaataaaaggctcaattctgataagtgatcaaatttcttgaaattctttcaaatcagctgaaaatttggttggggtgaattgatggtttttgagaagtaggccaggtatcctcacaaagaagttttagaatagggtttcttttaagtttttaaatatcatcctttgtctttccatatggttttcataaccaaatacatgactatagcatggttatttttctagtactgccatttgtgatatagccacatcttggcgtgcaagctagacatctcaggtaaatttgtttttttttttttttttagccctagaggtaacattataactaaaatgcattcctgcaattctgtttgcagtgcttcactaaacattgaaataaagttgtaaattttttcttcagtaatccattttatagttaatcataccaaatttaagttgatgacctaaagtccaggtagtgttgaagatagtatgtatctagaatactggtaatgagaaattgttgtaaattgaagaaaacaagatgctgccatatattaagatagaatataattaactccatgagaatggttactcaggaactagttaaagagcaaacccatttctcccgcttcactctgtttcagatatttttattggaaaatgttagggtagaggcctgagaaagttagcaaatgctattgactgatactggctctgtgtcttccagtgatttttagtttggtttttacagtcaagcctactgcttgcaattaagatatcaatctgaaatgcatctgtaattcctggccacaggtccttattgccattatttttaagtatcttcattggagatgaacactgacttttgcatatggtctcttacctcagggaagatcacttgctagcaactcatactactaatgacaggtttttgagaattgtactgacatcacatgttagctactaaatgcaaaatgtataaaagtattgttttatgtagttacctaccaatactatctgctactgaataactctctaaatatgtagacctcactaataactaacctttaggtaaaaaatttacttctgtcattaattacacttcaactggtcaatatagtggcagcataaagtgtttatttcagaatatcaatacagttttgtcttcatttttcaacagtaatttcaattggttcatacttaaaatactacacagattttgagttttatggttctcaaagcaaggtttccatcttaagatttttataaacacaaagcctttgcaaaattggattaaattccacctatcttaatgtgaattaaaaaccaccatttataataataatagcgccatattctaagttgagtaaatgcatcctaccattcaaggttatcatataatttaacaaaattgtacaaccttaaggctcttcacagtataaattaatttttcaaaccagagctgttcacatgaaaatattccttagtagaatgtatatttaagaaataaaacaacaaaggggaactatatcacccatgtaagttatagagttaattacaagttctaccattcttgataattctttgagatgctaagtgtttcagttcatatttaatgatacttaaatcgtgggaattttaatgtttgttccaaaatagcagaaattgtaaaaattatgaattattggagaaaatgccattacttgtatatctgacatttaattttttaattatggagactacatgcttttgtagtataatattaatgattattctcttgtaaaagaaaaggaaaaattagtaaagaaaaaagttttagttgatgttacctgcttgtgagtatcaattacttagtttttaaatttttaaggtattgcctacttttctttagaatgcagaaatctcgtcctgagcccttattatgcctgtggtagagcaatgcaagactgaaaaggttgccagtattttcaggcttatttgactaagaattagtgccaagaactggaaagtctactttttggagggaaatgatacttagaatttgtaaacataagcagtaatagtgtaaatatttagaaaaatagcaagtgctttaactgctcaataaaatagtatagatgttatttcacccttaaggcactggctgttgcccattattttccgatttcgtgattactgtatatattacatttgagtaatgaataattggtaatagtgtattatagtgttctacagcacaccttactgtacagtatttgaagttttcttttatatcaataataaaactataagttaatactgattttcccctgaaattctccacattagcttttaaaggtaattttatgttctttagtttcctggaattataatgcatgaacatatagttcagttttataaagaaattcttaaataataaagttttcttgttgaacttaagcgggttatcgtacaggaatagtgatttttccccttaatgtagatttcattgctagatgaaatggacccagtgaaaaaagagtgcgcaatttaaaaaaaaaccaaaacggtctcactctgctgcccatgctggattgccgtggcatgatcagggctcactgcagcctcaacctcctgggctcaagtgatcctcccacctcagcctcctgaatagctgggactacaggcatgtgccaccacacctggctaatttttgtattttttgtagagatagggttttgccatgttgcccaggccggtcttgaacccctgagctcaagtgatctgccctcctctgcctctttaagtgctgggattacaggcgtgagccaccgcaccctgccagcaaaatttctttagacatattacataattgggccataatgcttactgaatatttaaaaatgaaggcaaattctaacagagaacttgattttgtggtggtttaaaaaaatactggttagtgataaggaaatgaaaggaaatacagataatagtactaaataacgtttgtgtagcttagcagtcaacacgtttacttccaagttttattgtatatgcttaatatacattttattagatcatttaactcaataatttagagtatagccttagacaccagactgcctaggtctgactcctggtacgctgctttctgtgacctctctgtgcattcctctctgcgaggatgatgatcacatctgctcccagggtggctgtcttaaatgagttaacacgtatctgatgattagaagagtgcctgacacatagtaaacactcaaatatttgctatgttatatgttaatgtaatgtggtagagttcagttgccattaagtgggataaatcctcacagggcacacattatttaaataatttgttacattaaaacttattttacttgtacataattgactaaaaaatggggggttgtacattcaaacatttatgaccatgtgcaacactgagaatctcaaaccgacagtgtgctctgtgacccaaggcaagtcttggagcctttcaaggcctcaatttcttctgtaaccttgtggtttcacaattgtcaaccttttgttctgccgaccattgtcgtcatagtcttacttgcagagggcatagtgctgatgggacaagtgacatgggtatgagccccatgtaaactaaaacataattacctttcctttaggtgttggctacagttatcccaaacttggacttgaggtcttgtatatgcatgccattggtcacataccatcagaatagaattctcaaaaactctttagtaaataagataaacatcctacttataacagctcattatggattttatttttattgtctggctctttcagaccccagcaactgcaattctgacttaataatcaattgtttctaatcattaaaaatgtatatagaaaaactgaagtaagtctttaattgattttctgaactgtatatgatacactgaggtgaaaaacatatgggctcttcaaatttgcacactctagaagtaaacctgtctttggcccatttgtcataccacgtaaattatttgagaaacagataaattgtgtaggaatctggggggattattcctgtttgttctatttacagaaacaggtatagtacaaagtctacctataaagtgatgacatttttatatttgatttatggaatcagtattttatttttaattttcttttttgagaccgagtctcgctctgttgcccaggctggagtgcagtggcaccatcttggctcactgcaacctccgcctcccaggttcaagcaattctcctgccttagcctcccgagtagctgggattacaggcacccgccaccatgcccggctaatttttgtattagtagagacggggtctctactaaatagaggggtcattcattattttaaacaagtactgataaaatgcctgttttaaaaacttgggaaacagttccaaatgagagaaattccatgcgtccttagagcttacatcccaatgatggagacaagcacaaaacacattggtaatagctaacatttagtgactctttcccttgtatctgggcaataggctgaacactacatgcaataattaaccgtcaaaagcctttgtggttgggtactatcattatcatcttttaggaaacaagttgatatagattagttggtttacctgaagtcctggagttaggtggcagagttgagatttaaatccagatgtttaagactccatagtctatgctgttaactttaatgctacatttgtaatttagcaaaggaataaaatttggtggtcacataagtctttacaaacatttattgttaaatctagcttgtttttagatacaccaacatggttttaattgatttcagtgtatagagtatctggctttttttttttttttttaatacagatggtctctctgctgtgcaggctggagtgcccagtggtgccatcatagctcactgcaatctcaaactcctgggctcaagtgatcctgctgcctcagccttccaaatagctgggactacagatgtatgtcacctcacctggctaatttattttttgtagagacggggtctccctatgttgctcaggctagtctcaagtcccagaagtgctgggattacaggcatgagcaacagctttaatttcacttcctactagttcccttcctgaaccctagtcctccatctcaagttcttccttccttggatttgttttcttgcctcctctaaatttggaggtgctttaaggaagagtttcagaatttcttagatgactaacctgggtacatttgagaatcactggttaaagtccagtttttcaaggacctaaaataattcttgtttactaagtgggtctgctgctttggaggggaggtttcccaaaggtgatgtttctcaaaaaatagttcatgggctatatgcatctcaactagaaagtttatttctatggaatcatgtgtcaggtactttgctcaacagaaggaataataaactgagaaagacacttcctgccttcattacatttacatttttagtgagagagagatacatttaaataagcaagtaactacatattggggaagcattgggtgatgtgggattatgctgcaagaggaactaacctgacctgctaaatggttagggaatgcttcctgagaggtgatgtaccatctgagacctaaataattgataggatacttaaaaatcaaattggccagccaggtgcggtggctcatgtctgtaatcccagcactttgggaagctgaggccagcagatcacgaggtcaggagttcgagaccagcctggtcaacatagtgaaactctgtctctactaaaaatacaaaaattagccaggcatggtggcgtgcacctgtactcccagctacttgggaggctgagaccggagaattgcttgaacccggaacgcggaagttgtggtgagccaagatggcgccactgcactctagccttggcaaccgagcaagactccgtctcaaaaaaaaaaaaaaaaaaatctaattggccagggatggaggatagtgcccagtgcatggggaggcagagatgggaggatcacttaaggccaggaattcaagaccagcctgggcaacatagcgagaccctaacactattggaaaaaaattagctgggtgtggtggtgcatgcctatagtcccagctactcaggaagctggggaagtttataagtgagctatgattgtgtcacggcactcagcctgggcaacagagtgagtccctgtctcttaaaaaataaattggcaagactcagtatctccaaaaataacttactaactaggtcagttcatcaaacaaaattaaatgggatgcttatgtttgccgtactttagactccagatcctttaagggggcagtgagccagctgaatagagaaggatgaggaactttgagaaaactgttgaaaatagggttgctagagaaaaagaaaaaactttagcaaggaatgagattctgcactgagtatacaaaagtaaccagatacataagcttctcctttgaaatgaaaaggtgtctttgtaatatgaccaatgtaaattagatacatagatgaataacacaaacgtaagcaaaacagtaaagccagaatcaaattagagggttagaagccctcagttattctgatttctttcaacatgaccaggactatagaaagactagtttctttattttttttgaggctgagtcttgccctattgcccaggttggggtgcagtggtgcgttctcggctcaccgcaacctctgcctcccgagttcaagtgattctcgtgcctcagcctcccaagtagctgggactacaggcaaacgccaccacgcccggctaatttttgtatttttagtggagacagggtttcaccatgttgcccaggctggtctcaaactcctgacctcaagtgatctgcccgcctcggcctcccaaagtgctgggattacaggcatgagccacagcacccagcctcttttttttttttcctgtgacggagtcttgctctgtctcccaggctggagtgcagtggcgcgatctcggctcactgcaagttccaccccccgagttcacgccattctcctgcctaagcctcccgagtagctgggactacagatgcccgccaccacacccggctaattttttgtatttttttattagagacagggtttcaccgtgttagccaggatggtctcgatctcctgacctcgtgatccgcccgcttcggcctcccaaagtgctgggattacaggcgtgagccaccgcgcctggcatttttattttttttggacagtctggctctgttgcccaggctggagtgcagcggatgatctttgttcatgggttcaagcgattcttgtgcctcaacctctcaagtagctgggactacagtcgtatgccaccactcttggctaatttttgtattttttgtagagatggggtttctccatgttgcccaggctggtcttgaactcctgaactcaagcaatccacccacctcggctcccaaagggctgggattacaggcacaaaccatggtgcccgacctagaaagattagtttcatttcttcctatagcttctcccagcctataccagtatctgtcacctctgtttccgttaagcagtggtactgcctaagtggctagtaatcaaatgcctatcttaaattgtgcttacagtattccatttcaatttaagattatcattatgtgatctttcttatggcaggtgatttggctcttttgtaaatgttacaatgttattaaatttatttttggtacatggggtaattagaacaattactatctggaaaagttctcattcaaatagcccttaattttttcccatttaaaacttattctcggccgggcttggtggctcaagcccgtaatcccagcactttgggaggcagaggcaggcggatcatgaggtcaggagatcgagaccatcctggctaacacggtgaaaccccgtctctactaaaaatacaaaaaattagtcgagtgtggtggcgggcgcctgtagtcccggctactcgggaggctgaggcaggagaatggcgtgaacccgggaggcggagcttgcagtgagccgagatcgagccactgcactccagcctgggcgacagagcgagactccgtctcaaaaacaaaacaaacagaaaaaacttatcctcaaagcaatacatgtacatggctaaaataattcaaaactatagaaggcacccacttctcccatcccaatcactaaatcaaccgttttatcttcagtggttactacaacttaaataagatataggtataatctcttgatttgtcgactttagacggtattttattcctccgttgtgaaaaatattagttcccttgccctttttagttttctctgtaactttaaataatacagttaggtctctgtttattaatccaccaatttcaaacattatctcttgactctccctatgaaaaatgaggcaattagcatttttacactttctgaaatcccttatcttctcattctacttcctaattttttatcagctatcctatttattacttttacattgtcaaggttgatgggattcaagttatgttcttttagccataagtgcctttttaaaaatctatagtttaattaaactaataaatagccaaggtggtcccaaatgttaaaatgaaaaagatttcactttccctagaataattaaaaaaataaaaataaaatgaaaaggttttttttttctgggacactaattagaagttggagtgttttcaaggcaaacgttgtaattgttttttcacctattttttcacccagtgaaatcaaggcagtcattgtaatttaatttatttggagaacaagcctcttgtttttgcctgggtataaattcactagcagttattccgcaagaagaaagtaggaatagattgtggacaagattaatagacacttcagctatcttgttttatgtcccactattcactctttttttttttttttttttttttttttttgagatggagtctcgctcagtcgcccaggctggaatgcagtggcgcaacctcagctcactgcaacctctgcttcccaaattcaagcaattctccctgcctcagcctccaagtagctgggattataggcgtgtgccaccacacctggctaatttttggcattttctttgaaaattgttctaactctacaaattcagtttgtaaatatgataaatatatttgtattttattatgtaaataataaaaatgcctaattcattttctactctaaatctttaaattgcttccccaggaatatgcaccacccgtatagctgtacctattgcttcccatcctcctgtaacgaaaggacaatactcccaggatttgcttatgctggtttgacaagccctggttaatctagtacctagaacgctatactttttttttttttttaaagagatgggatcttactctgtcacccaggctggagtgcagtggtgtgattatagctcactgcagcctcaaactcctgggttcaagggatccttccacctcagcctccccagtagctagaactagaggggtgccaccaggtccagctatgttttttttttttaatcctagaatgagcaggcacggtggctcacacctgtaatcccagcactttgggaggcccaggcaagcggattgcctgagctaggagcttcagaccagcctgggcaacatgtaaaaataccaaaacaaaacaaaacaaaaaattagccaggcgtggtggcgcagacctgtaattccagctactccggaggctgaggcaggagaattgcttgaatccaggaggcagaggtttcagtcagccaagatcgcaccactgcactccagcctgggcgacagagcgagctctgtctacaaaaaaatcaatcaatcaatcaatcagtcaatcaatcaatcctagaaggaaatagctccaaaaaataaaagtacctggacagatatgatgaaaccatgtattcaatctgaaaacaaaactcaggttcagaactctatcttggatagagaaatgtttgctccattctctgtcccctcaccaccaatatttttgctaatcttcagtctacatttagggtgctattttaaatttgatggaaattatgaatagaaatcacactgtctaacataagcagttatagaattcttagtttggcttttaaagttaaaaataagagcacttgaactgcataggaagaaaaattgtaaagagaaagaaaagttttagtgtccctatttaaacccaagactccttgctctatacttttgtggtagagagaataatgatttctcaagtatccatgaccgaatacccagagcctgtgaatatattaccttccatggcaaaagggactttacagatgtgattaacttaaggatcttgacatgagggattaacctggatttgccaggtgggcccagtataatcacaagaatacttaagaatggaagaggcagacaggagagtcagagaaagatttgaaggtgctacaccactggctttgaaaatagaggaaggggctgtgagccaaggagtgcacactgcctttaggagctggcaaaaacaaggaaacaaattctcctctagagtttccagaaaacgaacacaaccctcctgacaccttgattttagcccagtgaaatcctttttgcacttctggcttccagaaccttagggtaatgtttgtatttctttcttcttttttctttttttttttgagatggagtctcgctgtgttgcgcagagcgagtgcagtgacatgctctcagctcactgcaacctctgcctcccaggttcaagcgattctcctgcctcagcctcccgagtagatgggactacaggcatgtgccaccacacccggctaattttttgtatttttagtagagacagggtttcatcgttgttagccaggatggtttctatctcctgacctcgtgatccgcccgcctcggcctcccaaagtgctgggattatacgcgtgagccaccacgcccggccatgtttgtattgttttaagccattacatttgtggtaatttgttacagcagcaataggaaactgatatacctttgctgaaattttcaacatttttggcctgtaataataaaagtaatgtttctcttcaaaaagtaattttccataatgttcaaattctagtcctcatttacaacaaataagcctactaactgagggttcaaaatgaaggataggaactccaagttagggaagagggtattcagggcattaaaatgataacttaccagcatgccacaaaatcctcaaagcagggttattactaattggtgggaaacatgacatccaccaagatatgaatatgtgtgcttctcttaaattctgatctttctacctccactctaaatgttatcaccttctactttaacagagataataatctatcttgtctttttccagcctctccttctctactggcctggcatgtccaggcattactaatgggcacagtgaatttttgaaagtttagggggaatctgtgcttcttcatggtggttactggcatttagtgtgctgggactgggaacacattgctcttgcaatgtgtgagacagccctgcacgaggaagaagtatcctgcattccattcacctttcaaccagtcatgtaagtgaaatacctgattataattacgtaagctagaaccagacttccttttatacagaagtgcacaactgttttttgtactattttaaaataattgagtatttccagaaatgcaactaccatgtaaaccaaggaaatattgtattttattttgttcaggctgaaccaagagttgtctccccattttagaaaatcacattactgaaggcaacccagctcaaagacactaatacagcccatgtatggatgtccgtatttgtagatattgtgttcatagtgactctacctatatatattggctgtattagttgtgcctgagagagattttattataaatttcttgtctgtcctctatattgtaggtagagcagtaaaacaatttttaaaaaagtaatgtgtaagttatttatgaatttcattttagtatggtacagggaatagaaaatgctgttataaaaaggggatattggctccagtagggttgaaatcattgctttaaatgtatccatccatccatccatccatccatccatccatccatccatccctccctccctccctccataaccatgtatcactgccttgccttcccctctctctcaaatatcttcagagtgccttgacttcactacctaatcagttgtcagtcctcttgaaatctgacttttactaccaccatgccattgaaactgtggccacaaagtcaccaaaccctgttaaatccaatatatacctgtagaaagaaatc

SEQ ID NO: 668 - DNA, 8466 bp, Homo sapiens
gtgagtgtgagtgcggggtggggtggtggccgttacgttcggggcaacggctacggcagtggagaagtaagaagagaaacaacgtccggcgcttccgccttcgcttaggaggaggaagagctggtagggaaaggaaagtgcttcgccctgggcctggactggaccgagtcgggttggtgggggtctgggctatgagcttttgagggtcgcctgggacgcggagcgagacacgagagccaggagctatgtctcagccgccgccgccgccgcctccgttgccgccgccacctcctccccctgaggctccacagactccgtcgtccttggcgtcggcggctgcttcgggggggcttttgaagcggagagaccggagaatcctttccgggagctgcccggatccgaagtgtcaggcgcgtctatttttcccggcctccggttctgtcagcatcgagtgtaccgagtgcggccagcggcacgagcagcaacagctgctgggggttgaggaggtgaccgacccggacgtagtgctacacaacctgctgcggaacgcgctgctcggggttacgggggcacccaagaagaacacggaactggtaaaggtgatgggcctttccaactatcactgcaaattgttgtcgcccatattagctcgctatggaatggacaaacagacaggccgggccaagcttctccgggacatgaaccagggcgaactgttcgattgcgccttactgggtgaccgcgccttcctcatagaaccagagcatgttaacactgtgggctatggcaaggaccgctccggaagcctcctgtatttgcatgacactctggaggacattaagcgggccaataaaagccaggaatgtctcattccagtgcatgtggacggggatggacactgcttggtgcatgctgtgtctcgggctctagtaggccgagagctcttctggcatgccttaagagagaatcttaaacagcactttcagcagcacctggcccgatatcaagctctgttccatgacttcattgatgctgctgagtgggaggacattatcaatgagtgtgaccctctgtttgtaccacctgagggtgttcccttgggcctgaggaatatccacatatttggtcttgccaatgtgctacatcgtcctattattctgttagattccctcagtggcatgagaagctctggtgattattcagccacctttctacctgggctcatccctgcagagaagtgcactgggaaagatggtcatttgaacaaaccaatctgtattgcatggagcagctccggtagaaaccattatatccccttggtaggcataaaaggggctgctttgcccaaactgcctatgaatttgcttcctaaagcatggggtgtgcctcaggaccttattaaaaagtacataaaacttgaagaggatggtggttgtgttattggaggtgacagaagtttgcaagataaatacttacttaggcttgttgctgctatggaagaagtctttatggacaaacatggtatccatcctagtttggttgctgatgtccatcagtatttctacagaaggactggagtgataggagttcagcctgaggaagtcacagcagctgctaaaaaagcagtaatggataatcgccttcacaaatgtttgctctgtggtgccctttctgaacttcatgttcctccagagtggttggctcctggagggaaattgtataacctggcaaaaagtactcatggacagctgaggactgacaaaaattacagctttcccttgaacaatttggtttgctcatatgattcagtgaaagatgttctggtaccagactatggaatgagtaacctaacagcttgtaattggtgccatggcacatctgtgcgaaaggtcagaggagatgggtctattgtgtatttggatggagacagaactaattctaggtccactggtggcaaatgtggttgtggattcaaacacttttgggatggtaaggagtatgacaatctaccagaagctttccctattactttagaatggggtggaagagtggtcagagaaacagtatattggttccagtatgaaagtgattcatctttgaatagtaatgtttacgatgttgcaatgaaacttgttaccaagcactttccaggtgaatttgggagtgaaatcctagttcagaaagttgtccacactatattgcatcagactgccaaaaagaatcccgatgattatactcctgtaaatatagatggtgctcacgcccaaagagttggagatgttcaaggacaagaatcagagtctcagctcccaactaaaattattcttactggacagaaaacaaaaactttgcacaaggaggagttaaacatgagtaaaactgaaagaactattcaacagaatattacggaacaggcttctgtaatgcagaaacggaaaacagagaagttaaaacaagaacaaaaagggcaacccaggactgtttctcccagtaccattcgtgatggtccatcctctgcacctgctacacctaccaaggctccctattcaccgacaacttctaaggagaagaagatccgaatcacaactaatgatggacgacagtccatggttacccttaagtcttcaacaaccttttttgaacttcaggaaagtatagccagagaattcaacattcctccatatttacagtgtattcgatacgggtttcctcctaaagagttaatgccaccacaggcaggaatggaaaaggaaccagttcctttacagcatggcgacagaattacaatagaaattctaaaaagtaaagctgaaggtggtcagtctgctgcagcacactcagcccacactgtgaaacaagaagatattgctgttactggtaaactgtcatctaaggaacttcaggagcaagctgaaaaagaaatgtactccttgtgtcttttagcaacattaatgggagaagatgtatggtcttatgcaaagggacttcctcacatgtttcagcagggtggtgtattctacagtattatgaagaaaaccatgggtatggctgatggcaagcattgtacttttccacatctgcctggcaaaacctttgtctataatgcttctgaagatagactggaattgtgtgtggatgctgcaggacatttccccattggtcctgatgttgaagatttagttaaagaggctgtaagtcaggttcgagcagaggctactacaagaagtagggaatcaagtccctcacatgggctattaaaactaggtagtggtggagtagtgaaaaagaaatctgagcaacttcataacgtaactgcctttcagggaaaagggcattctttaggaactgcatctggtaacccacaccttgatccaagagctagggaaacttcagttgtaagaaagcataatacagggacagactttagtaatagttccactaaaacagagccttctgtattcacagcttcttctagtaatagtgagcttattcgaatagctcctggagtagtaacaatgagagacggcaggcagcttgatcctgatttggttgaggcccagcgaaaaaaattgcaggaaatggtttcttctattcaggcttcaatggacaggcaccttcgggatcaaagtacagagcagtcaccatctgatcttcctcaaaggaaaacagaagttgtgagttcttctgcaaagtctgggagtcttcagactggtttgcctgaatcttttcctttaactggtggtactgaaaatttgaatacagaaacaactgatggctgtgtagcagatgcactgggagcagcctttgccacaaggtcaaaagcacaaaggggaaattccgtggaggagcttgaagagatggatagtcaagatgctgagatgactaacacaactgagccaatggatcactcttgatttaattagaggctaataaaggcagaatgtttattgtgaatatgtaatatttgttggctgggccacgtaacttgattagtcattaaaaatcttgtacgtatataattcaaagattatatcttgttattcagtgcatgatagcaagtgtgtgattggccatagcttttaatatactgctgcccaggctggctctgaatttctataaattagctgttagatctgctgagatgactttcttccatatatgtggttcattggaagttctttgtaattttaattccatgaaagtcttaatgtttccaacatgaaaattctcttacttaaatacgtttgatttctgaaaagcctacaaatggaggggaaatgagattgtgctaatgttgatgtcatcaaggtaaccatctcatatactagtgtcaaaaggtttatgtaaacttgaattttatctgaactaaattgtatcttaaaattcatacaattatttattagacagtggaatgcaaatgtttctatgaacgtaaacacattcatagagatttcttggcgaaaatatcttgagaatagaatgtaacgatataacattttgctgatttgtgcaagattggggaaaaatttcttctagattgatgaggtcaatgtgattcagttgtgttgctgtctgagccacagccaattgtgtgtgctctattaatatgttaccattatttttgattcctggcttggtcaagaacaacctgatttttttttttttaatcttgcagaaaagttgattgcaaagtgtggtagaaaaagaaataatggtagcagtagagaatttataaataagagtttatctttatgaatgagttaattgttctacaattttgatcagtggtatttaagcctgtatatgctaagtgtatttatgcccctttgagccaaaatttttttttttttttcagaatccataagagtttatttgttggcttcacttgggtttagatgcaaattttactgcatcacaccctgatcagctgggtatttgcttagtgtattcatcaaatcttcagtgccagtttccttgagaagcagctttcatgcttattccttaaaaacaacagaagagtgtttatcctgagattggtattgcactattttattttattctgcaaatctgtatcctgaagtgtacatttcaacccatattcttctctgttcactgaaattaagttgaatttgaatggctgaaagacaaaatatatgttaatacaatctcttacctagagcattcaaagcctggctgtctctgtttgcacatgtaacagatgcagaactgtgtttgtaattctaagaaaatgtatgtcagaaagtattttatcagatgtttaaaaatctctgcctgttgattcataagggatatagacagtactttaacttgtgtttccagataaggcagattttggtcatctttctgtgaaagtatctctaactgaatccacttcttaaacaaactactctattttaaataaggaaagaatggagaatctagacattttacaggtgtatctgagcaaaatatatatttgggttagtttttatcacattatcacgtttgtctttatattttatcttcatcctaaattttctccctatcaaaacagcaggaaatttttaaacttttatattgtacactatttttgcataaaataagagctgtagctaccaaatactatttactacttagtaaaggtggcttctgtgtattaaactacgaattacaaatatcacttcactaaccactataattatttttggctttttcagccactggaactttttttggggggatttaaatacaggaaaactgtttaagcaaaaaatgcactgctttcatgtaaaatgatataatcttctttaacaaatattttcttcattgataactgacagatatctcatagcattaacataaaataccagaaacaaactttatctccctattcttacatttagtgcaaattggaatgcgtatgtgaatgttagaagatggacttaatctctgacaactttattaatttctctagctacagcaatgctatttaaaagccagttaggtatgaatagtacagtaatagtttgggttctcccttgataaatgaataaaaggctcaattctgataagtgatcaaatttcttgaaattctttcaaatcagctgaaaatttggttggggtgaattgatggtttttgagaagtaggccaggtatcctcacaaagaagttttagaatagggtttcttttaagtttttaaatatcatcctttgtctttccatatggttttcataaccaaatacatgactatagcatggttatttttctagtactgccatttgtgatatagccacatcttggcgtgcaagctagacatctcaggtaaatttgtttttttttttttttttagccctagaggtaacattataactaaaatgcattcctgcaattctgtttgcagtgcttcactaaacattgaaataaagttgtaaattttttcttcagtaatccattttatagttaatcataccaaatttaagttgatgacctaaagtccaggtagtgttgaagatagtatgtatctagaatactggtaatgagaaattgttgtaaattgaagaaaacaagatgctgccatatattaagatagaatataattaactccatgagaatggttactcaggaactagttaaagagcaaacccatttctcccgcttcactctgtttcagatatttttattggaaaatgttagggtagaggcctgagaaagttagcaaatgctattgactgatactggctctgtgtcttccagtgatttttagtttggtttttacagtcaagcctactgcttgcaattaagatatcaatctgaaatgcatctgtaattcctggccacaggtccttattgccattatttttaagtatcttcattggagatgaacactgacttttgcatatggtctcttacctcagggaagatcacttgctagcaactcatactactaatgacaggtttttgagaattgtactgacatcacatgttagctactaaatgcaaaatgtataaaagtattgttttatgtagttacctaccaatactatctgctactgaataactctctaaatatgtagacctcactaataactaacctttaggtaaaaaatttacttctgtcattaattacacttcaactggtcaatatagtggcagcataaagtgtttatttcagaatatcaatacagttttgtcttcatttttcaacagtaatttcaattggttcatacttaaaatactacacagattttgagttttatggttctcaaagcaaggtttccatcttaagatttttataaacacaaagcctttgcaaaattggattaaattccacctatcttaatgtgaattaaaaaccaccatttataataataatagcgccatattctaagttgagtaaatgcatcctaccattcaaggttatcatataatttaacaaaattgtacaaccttaaggctcttcacagtataaattaatttttcaaaccagagctgttcacatgaaaatattccttagtagaatgtatatttaagaaataaaacaacaaaggggaactatatcacccatgtaagttatagagttaattacaagttctaccattcttgataattctttgagatgctaagtgtttcagttcatatttaatgatacttaaatcgtgggaattttaatgtttgttccaaaatagcagaaattgtaaaaattatgaattattggagaaaatgccattacttgtatatctgacatttaattttttaattatggagactacatgcttttgtagtataatattaatgattattctcttgtaaaagaaaaggaaaaattagtaaagaaaaaagttttagttgatgttacctgcttgtgagtatcaattacttagtttttaaatttttaaggtattgcctacttttctttagaatgcagaaatctcgtcctgagcccttattatgcctgtggtagagcaatgcaagactgaaaaggttgccagtattttcaggcttatttgactaagaattagtgccaagaactggaaagtctactttttggagggaaatgatacttagaatttgtaaacataagcagtaatagtgtaaatatttagaaaaatagcaagtgctttaactgctcaataaaatagtatagatgttatttcacccttaaggcactggctgttgcccattattttccgatttcgtgattactgtatatattacatttgagtaatgaataattggtaatagtgtattatagtgttctacagcacaccttactgtacagtatttgaagttttcttttatatcaataataaaactataagttaatactgattttcccctgaaattctccacattagcttttaaaggtaattttatgttctttagtttcctggaattataatgcatgaacatatagttcagttttataaagaaattcttaaataataaagttttcttgttgaacttaa

SEQ ID NO: 669 - protein, 1222 aa, Homo sapiens
MSQPPPPPPPLPPPPPPPEAPQTPSSLASAAASGGLLKRRDRRILSGSCPDPKCQARLFFPASGSVSIECTECGQRHEQQQLLGVEEVTDPDVVLHNLLRNALLGVTGAPKKNTELVKVMGLSNYHCKLLSPILARYGMDKQTGRAKLLRDMNQGELFDCALLGDRAFLIEPEHVNTVGYGKDRSGSLLYLHDTLEDIKRANKSQECLIPVHVDGDGHCLVHAVSRALVGRELFWHALRENLKQHFQQHLARYQALFHDFIDAAEWEDIINECDPLFVPPEGVPLGLRNIHIFGLANVLHRPIILLDSLSGMRSSGDYSATFLPGLIPAEKCTGKDGHLNKPICIAWSSSGRNHYIPLVGIKGAALPKLPMNLLPKAWGVPQDLIKKYIKLEEDGGCVIGGDRSLQDKYLLRLVAAMEEVFMDKHGIHPSLVADVHQYFYRRTGVIGVQPEEVTAAAKKAVMDNRLHKCLLCGALSELHVPPEWLAPGGKLYNLAKSTHGQLRTDKNYSFPLNNLVCSYDSVKDVLVPDYGMSNLTACNWCHGTSVRKVRGDGSIVYLDGDRTNSRSTGGKCGCGFKHFWDGKEYDNLPEAFPITLEWGGRVVRETVYWFQYESDSSLNSNVYDVAMKLVTKHFPGEFGSEILVQKVVHTILHQTAKKNPDDYTPVNIDGAHAQRVGDVQGQESESQLPTKIILTGQKTKTLHKEELNMSKTERTIQQNITEQASVMQKRKTEKLKQEQKGQPRTVSPSTIRDGPSSAPATPTKAPYSPTTSKEKKIRITTNDGRQSMVTLKSSTTFFELQESIAREFNIPPYLQCIRYGFPPKELMPPQAGMEKEPVPLQHGDRITIEILKSKAEGGQSAAAHSAHTVKQEDIAVTGKLSSKELQEQAEKEMYSLCLLATLMGEDVWSYAKGLPHMFQQGGVFYSIMKKTMGMADGKHCTFPHLPGKTFVYNASEDRLELCVDAAGHFPIGPDVEDLVKEAVSQVRAEATTRSRESSPSHGLLKLGSGGVVKKKSEQLHNVTAFQGKGHSLGTASGNPHLDPRARETSVVRKHNTGTDFSNSSTKTEPSVFTASSSNSELIRIAPGVVTMRDGRQLDPDLVEAQRKKLQEMVSSIQASMDRHLRDQSTEQSPSDLPQRKTEVVSSSAKSGSLQTGLPESFPLTGGTENLNTETTDGCVADALGAAFATRSKAQRGNSVEELEEMDSQDAEMTNTTEPMDHS

SEQ ID NO: 670 - DNA, 23969 bp, Mus musculus
  misc_feature (1)...(23969): n = A, C, G or T/U
gagaagataaaatatacacgcacacacacatgaatacgactagaattatagtcatctgtaaaggaaattactttgtaggaaatttgatggaactgaaatattgttatgcaaaacaagccaggacaggtatttaatcgtttttctcttgtgtagactgcagaacagaaagacaacatataattaggggacagactggtagggaagaagataaggatgaggaagaggagagacgggttagccggggacgtttgcaaagtccacagtaattcctatgaggttttcttttgtacacttaatatccgctggggggaaaggccatgtgacaagcaggatggaagatgcagggaggcagctgtgtggaactccattagatgtacacaactgaagggaaggagcaagttgagaggagtgaacagcaggtggcatggaagcgcttgcttgccctttgtgttcagagactggactcagtgcctctggcctcctcgagctgcagctgcctagttattttgcagcagacatgactcacctgcatctttctggttccttcaaattttcttttagttttaagaggtccctaacccaggctggcctcaagctgccttctcaagtctacatgtgtgttgtgtatgcagaaacacacacccacatagacacaaatagcagacaatgaccttgaactttcaggcctgtcctctgcttcctgaatgctggaattaacaaggtttgtatgatcaggctctgcttatttacatggtgcaaaaatcaaacccaggtcctcctgtgtgttaggtaagcattctcccaattgagctatgtccccagctctcagatcagctgcacagatttctcctgtgaaatgctggtgacagctgtggaaaaataccagtatatgtatacaactaaagggaaacagcaaatagtggaggggtcacaggtagtgacatagaggcacttgcttgccctttgggttcaggggctggactcacagggcatcaggcctctatcacgtgctggccagaaatggtggcacacaccttttattccagcatgtactaggtagaggtagacagatctctgaggccagtgatctccatagccagtttcagagcagtcagagctatagactctccagagttaagtaaacctagacccttacaccagacaagtacttccccaccgagctatgccctagcccctcacctctaattcctccagctcctttatgccatctcttctgtctaggatttctgaggcgttctttcagtttactccttccggaagcttccatggctttccttccttaacctctggtctcggttccgtccctcgcgtcccatttgttctccctggctctctgcgtggcctagatctgctatcttacaagaaggcctgtaaaggggctggccagatggagcagcaagtaatgggacttgctaccaagtctgaagacttaagttcaaggcctcagaacccatgtagtgaaaaacagaaccagctcccacaagctgtcttctaatgtctacatgtgtgttgtgtatgcactaatatttagaaaaagtttgtttccagacagggtttttctctgtgtagccctggctgtcctggaactcactctgtagaccaggctggcctcgaactcagaaatccacctgcctctgcctcccaagtgctgggattaaaggtgtgcgccaccaccgcccagctggaaaaagtttgttatggttgttaaaaagagaggtgtgaggatcccgaaggagcaatgcggtctatcacttgtctctggagtgagaatcactccacacacatgctcaaggaaaaggctctggagggctgcacacaggaaaacccaacagaaaccaggagaggagggagggaggagaggaacggagaaaagaatagtaacatgaccagacaaggtcatgagcctactgatcccgagactaaggcaggtcccaaggttctagctggtgtcaccccagatctgagtgattgacatagactgaaagttaacattttaatcatcctgagactgtaagagggaaagcccagttcagcttttttgagacagccctttttctgtatagccctggctgtcctggaactcactttgtagaccaggctggcctggaactcagaaatccgcctgcctctgcctcccaagtgctgggactaaaggcgtgtgccaccacgcccggccagttcggatccttatactccttcctccttatcaatcagaacagaacacttagggccagatgccttttgccagttcccaggtaggtgtcttctaatcagttctatcctgagtacagggtactcagccctagactccacccccaccacacacacacacacacacacacacacacacacttcccttgttaattacaaagccctgggggggtttccttgggtttgattgccccacacacacacaatggcagggggttccgtgggggaagggtagcgtcagacagcactctcttgtgagctctcagaagtccttacctttacatttggttagcatgctagaagcaggctccccaagccctcctcagtttgaatacagtgctagggcaatactttacctatgcttgcctacgtattatactagatgctacaaaagatactgattaaaacccaaatgaagagatggataggatgagggtggggacaaagagatctcatgccctctccaggagtgccagactcaaggaattactgtgtccagctaagcataaccccttggaatccagtcttttttgggcctcagtttatgaatacaattcattataaccatggatcataaacataacctttagctagtctctagagaagttggaggtaagccccaagttccagttctccagttccatctggtgtctagtcacccagcccccaccctaaaggtggtcagtcaacagcttactcattagcatataacaagataatcattgttttgaatattccaaggattttaggagttgcattccaagaaacaaaagaccacaaccaaaaaaaatgtattttacaaaaatcacaaccataggggctggtgagatggctcagcgggtaagagcacccgactgctcttctgaaggtcctgagttcaagtcccagcaaccacatggtggctcacaaccatccgtaaggagatctgactggtgtgtctgaagacagcttcagtgtacttacatataataaataaataaatatttttttaaaaaaagaaatatctcttggagctggagagatggctcagcggttaagagcactgactgctcttctgaaggtcgtgagttcaattcccagcaaccacatggtggctcacaaccatccctaacaagatctggtgccctcttctggagtgtctgaagacagctacagtgtacttacatataataaataaataaatcttaaaaaaaatcacaaccatagagtgtggcttttcatagagttgagctaaaagcatgaaacaagttcccattgtgaaaaacaactgccattgcccatctctggaactctggagctcctgtgcgtgtgtgtgtgtgcgtgtgcgtgtgcgtgtgcgtgtgcgtgtgcgtgtgtgtgtgtgtgtgtgtgtgtgtgnnnnnnnnnnnnnnnnnnnnnnnnnnnnnnnnnnnnnnnnnnnnnnnnnnnnnnnnnnnnnnnnnnnnnnnnnnnnnnnnnnnnnnnnnnnnnnnnnnnnnnnnnnnnnnnnnnnnnnnnnnnnnnnnnnnnnnnnnnnnnnnnnnnnntatcacagtgcatctggggatcagaacacacccaccctggagaaccatttgtgtggtgctagggagagaagagttcagagttcggggggtggtaggcaagcgctccatcaactgcgctatatcccaagcccctgaaacatttgacatcgttttttattgcactgttggagatggagtccagggcctcaagagtactaaacaagtgctctatgtcaagttaagttccctaacttttcctagatctactttaagtttgaaccttacttatctacccatgaacacgtgaggtgcctccttttgtgagctatttataatgctaatttgaatagtcaactataatttttacaagaattcatacattaattatatatttattgttttttttttcttaaaatattcagctagaggtttagaggtgtaactcagtggcagggtgcttatcttactgacttgagaccccaggtttggatccccacaatacaaaaaaaacaaaaacaaaacaaaactggatttggcgattgtattataattgtctatcagtgctgagggcttgcctaccaagtgggactcctaggttggattctctagcaccacaaaataatgtgtatcagtttggaaaggaagcagcattttgctctagccctagttagccgggaactatgtagccctggctggtcttcttctaaagaaaggccttcttctgcctctgcttctcaggttgtggaattacaggtgtgagccatgatttcaggctgagaatataaaactgaagacccagctcagtgatagagtgcttgtttcgtatcctcgaaaatctgagtgtgatctccagggtgcttgctcgtgcatacagaaacacagtaacttaatattgtgacctggtatggtgtgctaacttgtacgtccaactatttaggccagaaacaagcactacttgagtttggtaatttagggcaaacctggagagaatagcaagaacacgtttcattgtttaagggatataagaaaggttttatttggggaagtagctggacagagggagcagtgtttgtttgtttgtttgtttgtttgtttgtttgtttgtttgacagccctggctgtcctggaactcactttgtagagcaggctggctttgaactcagaaatctgcctgcctctgcctcccaagtgctgggattaaaggcatgcgccccacgcccggctgaacactattttttaaattgggtttnnnnnnnnnnnnnnnnnnnnnnnnnnnnnnnnnnnnnnnnnnnnnnnnnnnnnnnnnnnnnnnnnnnnnnnnnnnnnnnnnnnnnnnnnnnnnnnnnnnnnnnnnnnnnnnnnnnnnnnnnnnnnnnnnnnnnnnnnnnnnnnnnnnnnnnnnnnnnnnnnnnnnnnnnnnnnnnnnnnnnnnnnnnnnnnnnnnnnnnnnnnnnnnnnnnnnnnnnnnnnnnnnnnnnnnnnnnnnnnnnnnnnnnnnnnnnnnnnnnnnnnnnnnnnnnnnnnnnnnnnnnnnnnnnnnnnnnnnnnnnnnnnnnnnnnnnnnnnnnnnnnnnnnnnnnnnnnnnnnnggctactcagagaaaccctgtcttgaaaaaaacaaaaaacaaaaaagaacactttcaaaacaatttgtttttgtttttgtttttttgtgcaccaccacgcccggcacaatttttataatatataattgtttcatcaaagttttatgaaatgtctgtgttcaaatcatttttaaatatttcaataaaattttttaaaaaattagactaccacaaatcaactgtctatagatttcctttatcctagacatttttcatgtcttcccccccccccctttggttttctgagacagggtttctctgtgtagccctgtctgtctgtcttggaactcactctgtagaccaggatggcctcaaactaaaaaaatctgcctgcctctgcctcccaaatgctggcttatatgtcacttttattttaggtatatgagtgttttgcctgcatgtatgtatctatgtgtacaacatgcattcagcgcctgcgggggccagaagagggcagcagcttccctagaattggagatacaaagggctctgagccacgggagtgctctagaagagcagcaagtgctcctaaatgtggagtcttctctctagctccagtatgtagatggggggggggttgttttactttgttttttgagacagggtttctctgtgtagtcatgactgtcctggaattcattttgtagaccaggctggcctcgaactcaagatctgcctgcctctgcctcctgagtgcttggattgaaggtgtgcgccaccacccatcttacactagttttctattactacaaatctcaacttgtagtcaggacagagaagaaaccttaggttgcatccccaggactacgaagcaacaaacaatagtaaataggcagggtcttttggggggggcggggaagggaggtcagaagtaagggtttagggctgggatgggaaattggggctcaataggaaagcatttgcttaatatgttcaaagccttggaccccattcccacccctcccgagatggatggggggcgggagggaggaagggaggaagagaagtcagggctgacttagttgtgtttcctactaagattctctcaaagtggagtcacagtattggttgggactacagtatcatctgaggcacaaccaggaaagtagtcacttccaaggtctttagaattataaaacatatagaaaggagagcttcagtttcctactggatgcccaaggaatccttagcccattatgccttagctcctatagtccagccagagagcttgtaacctttgctatttaagatgccataagtcctaaagagcaagttccagggcagccagggctacaacagagaagctctgtctcaaaaaacagacaaacaacaaaaacaaaaaacaagataccccagtggctgcttgccttatcaagttaggagtctccttagcaaagggttatttcatcttatcgttaatatatacgtttgttacatataacctgctacttgtagtcacatatacactcgatgggactagattatataagtaaaagacatggacaccaagaggtgggggaaatggaagccatctcaagtgtgtgtctgttatattggtgtttaatcctcaggtccataaagaaatacacttttttttttgtatgtgatttgaggcagagtctcctatgcagttctggctggccttgctcttatgtaaatctaactagccatagacttgcaacagcaccagtccttctgccttggccttccaagggctggtattacagctgtgtatgaccaagccagactttcataaaagtagccaggaaaggatttgcattgtgttgtcatctgtgatcctgggaacatacagacaaatcaacagatcagctatctatgccttagaccacagaggtgcatctttcttttgcccatttttttcttttagatagggtcttgtatacattctaggctgtgctggaactcactatccgccagcctcagctccccaagtgctggaattacaggagtgcaccagtggactggctctttgcttcacttttattatttattttacttgtttttagtttttagtttttgagacagggtctctctgcgtagcactggctgacctgaaactctctacgtagaccaggctggccttgaattaacagaacttcctgcttctacctcctgagtgctgggataaaaggggtatgccactatgcctggctctccttcacatttaatctatgccatgtcatcatatgttgttttaatttcactttattttttttagttttaattctcaatgaaaatatatagatttttgcagcagcgtgttctaatcataactttattttccagtaaaggaagatatagcaaccactggttctgtatccagaacgacgcactgtcagcattgccctctccagggtttccccctttgggatacacacactgattttatcagaatcctctgggtttggtgctgatgttcaaatccagctatagaaatgcttcactagtgagctacattcccagtctttgatggatcattccagtgttttgggttcttgtggttgttgtttggctgttctttaagaacatggtttctctttgcagcccagattgctttggaacgaactttctttctttctttctttctttctttctttctttctttctttctttctttctttctttctttctttctttcttttaacatacatttatttatttgtttgtttatatgtgagtacactgtagctgtctccagatgcaccagtagagggcatcagatctcattacgggtggttgtgagccaccatgcggttgctggaaattgaactcacgaccgtgctcttacccactgtgccatctctccagcccagctttggaactttctatgtagaccaggttgaccaggaactcagcagagatctgcctgcttctgccttctgagtgctgggattaaaggccagtgatagcacgcccagctgatggtttatttatttgttttatttctatttttcttggtgaactccaagcatgaacgtgctctacgaataatctctatcccgctctacctctcctgattgagannnnnnnnnnnnnnnnnnnnnnnnnnnnnnnnnnnnnnnnnnnnnnnnnnnnnnnnnnnnnnnnnnnnnnnnnnnnnnnnnnnnnnnnnnnnnnnnnnnnnnnnnnnnnnnnnnnnnnnnnnnnnnnnnnnnnnnnnnnnnnnnnnnnnnnnnnnnnnnnnnnnnnnnnnnnnnnnnnnnnnnnnnnnnnnnnnnnnnnnnnnnnnnnnnnnnnnnnnnnnnnnnnnnnnnnnnnnnnnnnnnnnnnnnnnnnnnnnnnnnnnnnnnnnnnnnnnnnnnnnnnnnnnnnnnnnnnnnnnnnnnnnnnnnnnnnnnnnnnnnnnnnnnnnnnnnnnnnnnnnnnnnnnnnnnnnnnnnnnnnnnnnnnnnnnnnnnnnnnnnnnnnnnnnnnnnnnnnnnnnnnnnnnnnnnnnnnnnnnnnnnnnnnnnnnnnnnnnnnnnnnnnnnnnnnnnnnnnnnnnnnnnnnnnnnnnnnnnnnnnnnnnnnnnnnnnnnnnnnnnnnnnnnnnnnnnnnnnnnnnnnnnnnnnnnnnnnnnnnnnnnnnnnnnnnnnnnnnnnnnnnnnnnnnnnnnnnnnnnnnnnnnnnnnnnnnnnnnnnnnnnnnnnnnnnnnnnnnnnnnnnnnnnnnnnnnnnnnnnnnnnnnnnnnnnnnnnnnnnnnnnnnnnnnnnnnnnnnnnnnnnnnnnnnnnnnnnnnnnnnnnnnnnnnnnnnnnnnnnnnnnnnnnnnnnnnnnnnnnnnnnnnnnnnnnnnnnnnnnnnnnnnnnnnnnnnnnnnnnnnnnnnnnnnnnnnnnnnnnnnnnnnnnnnnnnnnnnnnnnnnnnnnnnnnnnnnnnnnnnnnnnnnnnnnnnnnnnnnnnnnnnnnnnnnnnnnnnnnnnnnnnnnnnnnnnnnnnnnnnnnnnnnnnnnnnnnnnnnnnnnnnnnnnnnnnnnnnnnnnnnnnnnnnnnnnnnnnnnnnnnnnnnnnnnnnnnnnnnnnnnnnnnnnnnnnnnnnnnnnnnnnnnnnnnnnnnnnnnnnnnnnnnnnnnnnnnnnnnnnnnnnnnnnnnnnnnnnnnnnnnnnnnnnnnnnnnnnnnnnnnnnnnnnnnnnnnnnnnnnnnnnnnnnnnnnnnnnnnnnnnnnnnnnnnnnnnnnnnnnnnnnnnnnnnnnnnnnnnnnnnnnnnnnnnnnnnnnnnnnnnnnnnnnnnnnnnnnnnnnnnnnnnnnnnnnnnnnnnnnnnnnnnnnnnnnnnnnnnnnnnnnnnnnnnnnnnnnnnnnnnnnnnnnnnnnnnnnnnnnnnnnnnnnnnnnnnnnnnnnnnnnnnnnnnnnnnnnnnnnnnnnnnnnnnnnnnnnnnnnnnnnnnnnnnnnnnnnnnnnnnnnnnnnnnnnnnnnnnnnnnnnnnnnnnnnnnnnnnnnnnnnnnnnnnnnnnnnnnnnnnnnnnnnnnnnnnnnnnnnnnnnnnnnnnnnnnnnnnnnnnnnnnnnnagagaaggccagagccctaattctgcgcctgcgtacagtaggagacagtggggcgggagtgggggggacgggaacgcggggagggggcaggctcctggatgtgcgcagccgcagagcgctgctgctgtgcctaatacccatcgctgcgcacttgacagccagtccgcccgtccggagcccggctcgttggggcagcatggcggggtcgccgctgctctgcgggccgcgggccgggggcgtcggcattttggtgctgctgctcttgggccttctgaggctgccccccaccctgtcagcgaggcccgtgaaggtgcgacctcagtcagcagggggtgggggtggggtggggaggaagatgggggaaagtgttaatgaggtattttcacaggtatgcgcatagggcttggctagggtgacctggcctgcagctgacagccccgcgcaggccaggggcagtttcaggatgtgaggatgatgttgttcagggcgccctgcccatccctcagcatctggggcctggtttaatctcgatccacgggtggcccgtggagctgtccgtggcactagggtgtattcagaaaagatatctaagcctgtgatgtgatgaccgaagtgtataggcattgtttcttttcagtgtgacctttggtttgactgcccctgaatgccctacaatactagggatgcttctggttgactttttgcgggcctggttgctttcttagtggtacagtgtgtatatttgtgaattcttatgggtggtgacgtagtatatgggcgtatctttctgtgtacttgtgtgtttctgtgttcatttgtttttattttagaaggagtggtccttgtaccttggggtacatatttcatggtggcttgggtaaactgagtacttgggttcttctacgtgcatccacgagacagtttccttttttttcttcttcttctttgtggagctgtgtcattgcagggaaagaagccatgatgtctctgcattgtgtttttaaagacgatgcatgtccttggttggctcaggtagagtaactgaagatcatttcgccaacaggaatgtacacacaggcacgaaaaaaagaccacttctcgcagtggatatggcagtgttgggttaaaatgtgtgacattttaagggctgtgtgtgtgtgtgtgtgtgtgtgtagggattgctggtgggtgatttccccggcgctgagagtggtgggtgctgatcaagggcacgtggagcagcttgctcctctacctcttcaaagctgttgagagatcagaggagaatttttaaaaccatttgatagcctcgcgccccccataggcattaccttctattttccacccattgagtccgttctttgctttgcagctcatctttaaacgacccattgtttcattcctcctgcttctggaacatccgagaaatgcaatcaagctaggcatctgcttcctgatggtcactaggggtcactaagaagtccttggctttgatagacttaggtcatctgcagtgggattctagaatttgcctttgtgtgtgtgtgtgagattcatttatattgaagtgtacagttatagttaatttattggtgcgcattatcatcttccatgtgtgtatcatgagtatcctactaagtcattgtttatttccgtgctgttctttccttcaccccaccccctacttttatgctgttataaaaatgctgctgtgatgtttcaagaatttacatcctgcaggctgactgtaacacccaacccattcttctcttgagacacaggcaatttctctttcaaaatgatttttgcaaaattttgttttgtttcttgaggtaggatttctctctgtagtccaggctgccctggagctccctttgtagaggaggctggcctgaaactcagggatctgcctgcgtaggctgggaattaaaggcgtgaactctcccacacctggcttatttttgcaagtttaatttccaacagagaaatgttatagtgttattccaaacctggcacctgccccaaccccccccccaaaaaaaacgaagaagagaaaagaaactaacggtaacagcatagcatccagaggattcaggacaagttttgagattgtgtgaatcctagaggtgttctagtggtctgaagtgcccttggagatatttaggggtttcccgggaccttagacacgataggaattttggaggggcccagtgaatgaggtggtcattgaaaatccatggagccccacccctagttgtgcatctctggccagacaatgacgatatttttttccttcaccccatcttctcacaggagccccgcagtctgagcgcagcatccgcgcccttggttgagacgagcactcccctccgcttgcgtcgggccgtgccccgaggagaggcggcgggtgcggtgcaggagctggcgcgggcgctggcgcacctgctggaggccgagagacaggaacgcgcgcgtgctgaggcgcaggaggctgaggatcagcaggcgcgtgtcctggcgcagctgctgcgcgcctggggctctccgcgtgcctcggacccgcccttggcccccgacgatgacccggacgctccagctgcacagctcgcccgtgctctgctccgagctcgcctagacccggccgccctggcagcccaacttgtccccgcccctgccgctgcgccgcgaccccggcccccagtgtatgatgatggccccactggcccagacgtcgaggatgccggcgacgagactcctgacgtggaccctgagctgctgaggtgcggggaccaagggggagggagggcaagggcagagggcttcatgcactgggggtaaaatcactactaaaagtgctgcgctggagcctgagaagtgaggtcgcgggtcctgagtacaaggggacggaagcccagggacccctgactggtgggacaatgcaggagtaagggctccccggagtggtggtggatcggtttctgcaggaagtggtcctggtggtgggcagtttctggaatggaaggccgggacctctgacttcctcggaaagtagtggtgagttccgcaggctcgagtgagggttacaagccatacggaattagaaaattgccttgtccgggttctgaaccacagcgatggcaaatacatcctgaccgcattccgcaatccttgcaggtacttgctagggcggatcctcaccggaagttcggagccagaggctgctcctgccccgcgccgcctccgccgatctgtggaccaggatttgggtcccgaggtgccccctgagaacgtactgggggctctgctacgcgtcaaacgcctggagaacccctcgccccaggcgccggcacgccgcctcctgcctccctgagcgctgctgcatcctgcacgccctggaacccaggagcgccccagcaaccctgactccctgccagcacgtccaaggctgcttaccccagcaacctcccatcccctgagccctcaataaatgccatctgtagcagctgtttgtctgagcgccctgtactagggggccggtgggctgggtgacaatgataatggaatagtggctgtcctactgaggacagcacagtactgtttgggacctgtactggtaaggaatacatgcctgcttcctctggactttgcgggtctcaccgggtgcctgggctacccttctaggcttcactgaggcgggttccctgggaggctctgaggttactttcagcgtctgccaggggtccacagcacttagccaaggggctatggattcactcgtggtctgccaggaccaggcttgttgtgagggccccaggtggatcacagacatccagcactgtatcagcaactgccaagcactgcttacacggggctctgaatattcactccaaccattgcctttgccctggccacttgttctattctcagtatgtgcaagtttttgcacttcatagtcctttcttacccttcctgtcactgtcttgtgttggacaaggaaggaggttgttttgtttgttttgaggtgtatccaaagcacggttgggcagtttctcaaggcttttttttttcctattaaaaaaaaattgatacccagtcttactatgtaatcctggttgtcctgaaactcactcggtacaccaggctagcctcaaactcagagattcatctgcctgcttccctgagagctgggattaaaggtgactgccacacttggctccttctttttaaaaatattcttaactgctgttgggcccggtggtatatgtctttttaatcccagcacactggaggcagtggcaggtaaatctctgtgccttaaaggccagactaatctacaaagtgagttccaggagagttacatggagaaactctatttaaaaaaaaaaatcctaactgctgagttttcaactttgtcttccttttggaagcagtctcactattgtagctctggctatcctggaagatctcttgaacttccagcggggctacatagtaagaacctgtctccagaaaaggcaagaagaaaagaaaaacaaagatttagtataaaggaagctttgaatcctgagaacatttatttaattttgcatagagtttcataaaacacagtcaatgagggatgtcccatgttaccacgtaacttctcaccaaatgacaataaaaagatgtctgtggtaacttggtcggagagggaaatcttattacaagagaattgtcaccttgacatgagacaagggtcaatttgctagacaaagatcttcaggctacagagcagccacagctacacacggctttctggtgtcgggtcttcttgcttgattcggccacagcctcctgggccctctgaatctcatggacaagcagggcaaaggcttcctccacaccttgccgcgtcttggctgaggtcttcaccaagggggcccccaacttgtgagcaaggagggctgcggcagcatgagcatctccagcagtggtcaccaggtcacacttgttgcccactagtaccagaggctgcttgtggtgaggggtccaggtggaccatatctgctgcaactggtccagagacgaggggtcgtcaagagcaaagacgcccagcacaccatcaccagatgccaagcactggtcacgcagagcccggtgaatatcctgcccagatgtatccagaacatttagaatgtagcctccgttgtccctggccacttccttccagtaggaatcttggatagtggggtcatggtctttcacgaagcattggtgagtcatctggatggtgagagcacttttaccaacaccacttgcacccaccaccactgccttgtactcgggtagctgcctgccagcatctttgcactgtgcccaagcctcgtgactttcctctggagatctggtgcatggggtgccggagctcaggtccaagatgctagactttgtaggcaaagccattccccagcagctcaaggaagaggtgtaaagagcaggtgctgtgaaggagaaatcaggtgagactggctggaagaaaggagactccccaggtgccgctgaatcaacatggttaagttaaaaactcttctctccttactttggtggtgggggtggggggtggggggatagacaaggtcctaacccggatctctgccttgcttggaacttgtcctgcaggtcagctgaccttaaagtttcagcaatccccctgcttctgccttcccagagctagaattacaggtgtgtgccaccaagcctcgctaccctcttctttcctatagagctagagggcagtttttcctttgacaagcctagcgatcaaacccccagtctctagtgttaagctacttcttcagcaccaagcagggctattttttttcacgcatgctttttaaatgacaaataactgttagggtttttgttttgttttgttttttttgagacagggtttctctgtatagccctggctgttctggaactcactctgtagaccaggctggcctcgaactcagaaatccgcctgcctctgcctcccaagtgctggggttaaaggcgtgcaccaccaactgcccggcttgtcaaataacttctaaattgcatttattttgcataggggagggttaggtttgggttgatgagggcaacttaacccttccaggggtggggtggtgtaagcgtgccatagcatttgtatgtaggtcaaaggacaagctatgggagtaggggagtcgggtttggtggcaaacacctttatctctgaaccatcttgcctgtcctgggatttttcaagtgctcccattgatatgaacatgaatcctatgaagtccacccttttaggatgtgtgattcggtgaactgtggatgttcggctatagtaactatcactatagccgaattggaggaagtttttaaatttttaaacatcattatctcctggaaaagtatctctaagtcccttagcatctccactgcacaaggagagtgagatttggtttctgaactccaacttggcacagtagcgcctgtctggtgattggctgcttggaactttcccacccaaggggtttatgtcctaaaagaattacgtagaaagataatagatcaaggctgaagatgcatgcatggagccctgagttcgactctcagcgcctcaaaaacagcagggtagctcacatctatagttccaggattcaagtcagggaggaaagatcagaagttcaaggtcacccttggttatgtaacaagttggaagccagatcctatctcaaaggggggggaaaaggcaaaacaaatcagacagtctagtaaccacctcttccgagcagggacatggagatacacaaaaggtaaagcaagactggaggtgtggggtttatctagaccgcttctctagcctgcatggagttccggtttcaatccttagtctgacttaacatcaggcatggggccagcaagatggctcagtgggtaataatgataaagatacgaaataaattaaaatattaaatataataatgataataacgattataataacctaagttcttttgctaagttccaaggtcatgcacaggtttattccagcagaggtaggtgaatctctgtgggttgcaggccagccagggctacatactgagagagacctttactaaaaaaaaaaaaaaaaaaaaaacccaaaaaaacccaacaatagcaactaaaacctcaaaacaaccctgcccccaacaaaactagtcgcaactgctgtgaaccgatcgctttgttctacattttatgttctattccacactctataatctcacattgtttggcaccagataacaagttctcaaaattgggtattttattatttaatcttagctaactttctaaaaactctccctgtatgcagcccagaacaaaacagactcaactccagaggccttcaaaagagattctggttgaaaagagagacaataaatatgataagtaagcaaattatcttgcatagtaaaagagggttcggcacacagcaggtgctcaatttgtgttagctattactagcaagtcattaactcactgaatgcacctccatatcctgttttcactagaaaagggaaggggctcggagggaggagccgcagttcaggggcaggtagtgggttccaggggtcccgaggagattcggcagtgttttggatagtgaggcgtggcgggggttgggggaaggtctcaggtggagggatcctctgaaagggcctccgagagtgcttgcccgcacaagggtgaggagagaagcggccagagaatagaactttggagtacctcagagtttggggacatcgacagggaagagtctgtggaggctcgatcagagaaagaactgggatgacctcagtgaggaggccccgggtagtgaaagaatccaagggcgggtcgagggtggcagtagagccggtgaaaaggagagagaggtcagattccgatatactctggaagcgaacagctccctttcaagatcgaaaggactcttaaatttgggaggagagcagcagcaaatctggggaatgctatgatgggaggtggggataaatataagaaggtcgcctccctagggtactggcggttaaggagaggctgagtgagtcctcggtatggccacactaaaccgggaccggcttcaggcgggcatggtacagacaccacaaaaggcacctcagctttctgctcgagttacagaacccctatgtggagcacccccaaagagctcaagggagcttgaggttttgagcggctttgagctttgagcagcttgaatcagtcttctggacttgcatctctgacccaggaaggcaggagcccaggaaggcacacagaagcaggctgggcacatagggtcaaagagagagggaagggtacggagtcgctccaaataagagaccctgtagcttccttggggttagcttggacaactcgcctggtctctgtggttttccgtgtcagagtcaggtgtaaagctcggggttggagaaggggaagggtaaccctaacctgttcctgtgttccacttcagactcaagttagaccggtggccctagtgctccttcctacctcaagaaagtccgcttcccgctcagcgctagcactcagttaagtgaaccgagtgcaaggctcactcccctcatgaggcagggatggggaaggcggagcccctgtccctggaatcccgcgctgagaaagatgtctgatctaaggaacgccagagccctgcttacctgtgctcccaggagtagcagtctgatgaggggcagtaggcggatctgaccggacagttgggggttaggatgctccctacccccagaggcagcagagggcggagatgtgagcttccccctcccacctgcccgacccctgaccccccacccccaccccgctgcttttcccctcacccatcgcacaatgtaagagcaaatgtgggcgggacctccacctgcccctctctacacagcacacccccctctgccccgcccctccttcgcctgaactgcagtagggttggttccgcttgggccatttgtgtgtagcactgtgtcaggatttaacttggaagacccccactttggagtgtatggtgctgtgtcaggatttgatctggaaggccacattttggaaaccattttgtattttttgatccagggaatttatacaacttcagctgggtttctgggtatctacggggtagattgggtgcattctgaagggaaacatttgcaaaggaagggtttttttttttgttgtttttttgtttttttgaggtcagaaagaacttatctgaagcagaagtgcacgttataaatccctcagactctcttgcagctatgacaatcacaggctagaattctgagcaatgaaatgtaaactggagcatctgtcatgtttcccaaagggactggactgggtttagacattggtagtgcttgctatgcaggcactgcctaaaatgtatgaagtagcacctagctgcaatcccagcgctagggaagtgggtgagaagtgcaagggcagggctggagagctggttcaatggttaagagcacttgctcttccaggggatccaggctaggtgtctactccagcttcagaggatctgtcatcctcttctcgcctccgtggctttcgacatgtatatggtgcaaatacacacacgcagacaaaacactcatacaaaaaaggatgtacaaggtccgagtttaaagttggcctgatttatatgggaccctatgtaaagggtggggagatgccctccttctttttgagtaggtgaatctctgggatgagaaagtggcaatcaacaaaatccctaatcagccaaagcaattttcatgatgtggaatagaattccagcaaagctctccagttctctaactctggttagaggcactgcagttttgctccggctgccacccatagccactagaccttgaagttaaatttgaacccttcctttcctcaccctccccaaacagtcagtgaggtcgatggggaaacaggcccaggaggctacatcctgacagttctcatgtctttttactaagtacttctgactagcctagaactgaccaggctggccttgaactccaactgcctttgtcttccaagtttggggataaagggcacacgcaccatcatgtctggtgagcctcctagttctatgctgggcactcatttgctcacgaattctatttactctccagcagagccaatctggctgcctacttcaattttagttaaattgttttttttggggggggcaatggatagagttgaattgatgaagacctctcctttcttctctcctccctttcttccctcagttgtgctggctaggaatgacgggtttttcaaaataaaaaaaaaaagcactttcttcaggttttgtagcaactccaactttattaaatatgctgacctgctgccactgccccgttgtctccttcaatgtcatccttgtgatctcagctccttcctagggctactaagctgtccctccctccttctgggtagaacagaggtattcctcgagcaggcagtgggcaggggcacatcaacaactgaacactagagtcctttgaaaaggatttgtacttaaataagcacctggcaaagggtattcaagatgggttcaagtgaggccccttatccaaggtacggactgcggtgaactaagctgccctgcctgtggcctcagaagggaaacaggcagtgtggtctgggatttagtgtgagtggggcatgtcctccccaaacttgttctggtgggcagcgttcttcacatcttggagatcctgaggacaaaggaaggacaaggtaggtcaaagtgagggtggctctatttcagccagagagaggctgtcaccatggtagcagcagctttcaactactgcttctcctagactaccctataccctcctgcaaatatctatggggcagccatgcaaaatagtgttctccccttaccaaatggtagaagggatacaggggacgggggacagggctcagtgtgcacgggttaagcaacttgccaggctcacctcgtggtggacataagcctgacagacataacaccaggtagacaggtcaacacagctgaggaccagcgggtgttcagaggcttcatggtggcagaccatatgggcattgacatagcgactgcagtacacctgaggttggaaagtgattgtcacaggtcgcttggcaccagctgaagtttgctgctgggcccaatctctacccaatacccctcttctgttccatacctgatagcaagtcagacacacccagttctcctggactgttccacaggtcttacaaggttgggacacatctaggcctgctgcaggaatggggcatactgccatcaaatggggacaccaggatagtggggtcacagcataaaatacatcctagagggggcagaaaaatggggtaaggaaaggatttcgtcttcccgttatacatcatctgctcctccctgaaggcaggaatggccaagaagcaatagtcatagccctagctccctgagttcacctgggtattaaagtccccaaatccttgtgtcagcatcaagctgttcatgtcctgacctccagcggcttcccctagcaggccctcctcagaatcatgggcttcctggagacacagaaggaaaagatgtatctgagaaagcccagtccttagcccttctacctccttcccagatgtggtggactttacctctgcttctctgcttagctccaaagtgctgagaaccccaagctgtagggactgctgagccgtgactccctgcagaggtgaagcccctgtggtctgcttgtttgtatgcgaggctggaggcgttggctcagtttctcccaaagcctccacagaggtggtctggttagggaagttttcaggagcagctgctgaggcccacaggtccgtcgtggctcctcccacagtctcctttgaggtagccagatccagtgtagttcccttagcagcttgttctgaggactggccctgagcaagcacagccttagccatctttgatttagcctggcctagagtagactctttcccaggtagtgctgctatggtcttcctcacgctttcttcaggaacctttcctttcggtgtggtcatttccttagctgatacaggactggctgttgggggcaacttcttgatgacaagcctagaactagagcattcttccttgtcttccatttctggaacaatgggaaagacgtgtaagtgtggctgccgccccctttctgacctcttaaccccccacccctattctttgagttccctcatctcaggtctacttactcatcaaccgcaaactgcgccagtatttgcgatggacttggatgacctcactgattgaaaccagggctcctgactgtggcggtcgcagcaaagtaagctggggtggtgggtctccaaggagggaatgggtgcaggcagccatagactcagagatagatgccaaattgtatccaccctttgtaaaggagaggaatgggttccatgacgagtcatcagggaatttggagggttagatatcctgactctccaattagttcccctttgtctagggcactcaaagtccagagtgcaggctagtaccaggaacaaatgactgcaacacatttgtaagaagcgcagtagtcactgtgtgaggtggctttgggggggaatgtaaattggtggctgtcacgtgcaaggtaacaatggcagtacagatcagagtattaataaaggatagctcacatttattgcttgctatgaacctgaccttattttaaatcctttatgcatgtcaacacagtcctcacaatgacaggtgttcagtgggtacagatctgtctttccatgtccaagggcccccctggcctcacagtatagaaagcactaatctgacccataccaaagctcaaggcagatcccaaaaggccctgttgtgacctgggataggaacaactagtactctctctgtatgatcccctaacttgactttcttcatacttgctagagacctgtttccactcattttacatgtaaggagaccaaggctcagtcagagcaggagatgacttgtctgaggtcccaagagttgaggaagcagtgctggtatttgaacctgggccgacaaaatagtctgtgttgttgctagcattaccatggaactgatcctaggccctgcgtgccatacaagttctgccactgaatgactggttcttcattgaactggttgatggtcttaaccacaacccttagccttccataagcaatcctgggcaaactgtaaggaggatttctttttctttctttttccttttttcaagacagggtttctctatgtagccctggctgtcctggaactcactctgtagaccagactggccttgaactcagaaatccacctgcctctgcctcctgagtactgggattaaaggtgtgtgctaccacgcccggctaggaggatgtcttgtaagcccgtgagtttctctgtgacttattgtccttgtctatgaaaatggcacccaagctcgctgagggttaagttcatgtctgaaagatggaacagtaggaagacagggtatttttacagtgcacactgtgacagggcatttttagagaccaggaatgcctccgtgattagctagggccatctgtaggctcagaaaacacatgtataaggggagggagtacccatcccttacagaaggtcagtgaatactttgtctctctaacccattagcagcaatttggaagatggtggaaaccagactcagttctgccattattaaatgtgtgatctcaggctacttactgttcctcaaccccctgatttgttttgatgggggaaggctttttgaaacagggcttcatgtagcccaggctggcctcaaacttggtatgtagctgagggcaaccctgctcctcctgcctcctcctcttcctcccaagtgctgggattataggtgtgtgccactgcacccagctagttgatcttgagaggaaaatgagttaaacagactttacctcacagtgctattttgtcgagaaattgtagaagacagaaga

SEQ ID NO: 671 - DNA, 1572 bp, Mus musculus
tgctgtgcctaatacccatcgctgcgcacttgacagccagtccgcccgtccggagcccggctcgttggggcagcatggcggggtcgccgctgctctgcgggccgcgggccgggggcgtcggcattttggtgctgctgctcttgggccttctgaggctgccccccaccctgtcagcgaggcccgtgaaggagccccgcagtctgagcgcagcatccgcgcccttggttgagacgagcactcccctccgcttgcgtcgggccgtgccccgaggagaggcggcgggtgcggtgcaggagctggcgcgggcgctggcgcacctgctggaggccgagagacaggaacgcgcgcgtgctgaggcgcaggaggctgaggatcagcaggcgcgtgtcctggcgcagctgctgcgcgcctggggctctccgcgtgcctcggacccgcccttggcccccgacgatgacccggacgctccagctgcacagctcgcccgtgctctgctccgagctcgcctagacccggccgccctggcagcccaacttgtccccgcccctgccgctgcgccgcgaccccggcccccagtgtatgatgatggccccactggcccagacgtcgaggatgccggcgacgagactcctgacgtggaccctgagctgctgaggtacttgctagggcggatcctcaccggaagttcggagccagaggctgctcctgccccgcgccgcctccgccgatctgtggaccaggatttgggtcccgaggtgccccctgagaacgtactgggggctctgctacgcgtcaaacgcctggagaacccctcgccccaggcgccggcacgccgcctcctgcctccctgagcgctgctgcatcctgcacgccctggaacccaggagcgccccagcaaccctgactccctgccagcacgtccaaggctgcttaccccagcaacctcccatcccctgagccctcaataaatgccatctgtagcagctgtttgtctgagcgccctgtactagggggccggtgggctgggtgacaatgataatggaatagtggctgtcctactgaggacagcacagtactgtttgggacctgtactggtaaggaatacatgcctgcttcctctggactttgcgggtctcaccgggtgcctgggctacccttctaggcttcactgaggcgggttccctgggaggctctgaggttactttcagcgtctgccaggggtccacagcacttagccaaggggctatggattcactcgtggtctgccaggaccaggcttgttgtgagggccccaggtggatcacagacatccagcactgtatcagcaactgccaagcactgcttacacggggctctgaatattcactccaaccattgcctttgccctggccacttgttctattctcagtatgtgcaagtttttgcacttcatagtcctttcttacccttcctgtcactgtcttgtgttggacaaggaaggaggttgttttgtttgttttgaggtgtatccaaagcacggttgggcagtttctcaaggcttttttttttcctattaaaaaaaaattgataccc

SEQ ID NO: 672 - protein, 254 aa, Mus musculus
MAGSPLLCGPRAGGVGILVLLLLGLLRLPPTLSARPVKEPRSLSAASAPLVETSTPLRLRRAVPRGEAAGAVQELARAHLLEAERQERARAEAQEAEDQQARVLAQLLRAWGSPRASDPPLAPDDDPDAPAAQLARALLRARLDPAAAQLVPAPAAAPRPRPPVYDDGPTGPDVEDAGDETPDVDPELLRYLLGRILTGSSEPEAAPAPRRLRRSVDQDLGPEVPPENVLGALLRVKRLENPSPQAPARRLLPP

SEQ ID NO: 673 - DNA, 24526 bp, Homo sapiens
ttctagagtagaagttgtgtcatctgctaaggtcagagacaagtttgggaccaccttttccaattgtgtgactgccactgtgggaactgcagctcatatgaagagactcagcagtccctactgagagttcttctgcgtagcccatgcttgcctccctttgggagatttttgaatacccgagggaaacagggtccccaggaggtgacagttctcctgctctgtcaccccggctggagtgaagtggtgtggtcaccactcaccacagcctcgacctcccaggctcaattgatcctcccgcctcagcccccaagagtagctgggaccacaggtccttgccaccacgcccagctaatttttttattgttgaatttttagtagagacggggtttcaccatgttgcctaggctggtctctcgaccttctgggctcaagtgatccacccacctcagctgcccagtgttgggattacaggcatgagccatcgcgcctagcctaccaatgattttatttaaaaatttattttattatggtacaatacaacatgagatctaccctcttaacaaaatgttaggtgcacagtacagtattgttgactctagatgcaatgttgcacaacaaatctctagagcttattcatcttgtttttttctttttcttcttctttttttttgtttttttgagacagagtcttgctctgttgccaggctggagtgcagtggcacaatctcggttcactgtaacctccgcctcctgggttcaagcagttctcctgccttggcctcccaagtagctggaactacaggcgcatgccgtcacgcccggctaattttttttttttttcgtattttagtagagacagggtttcatcatgttgcccaggctggtcttgaactcctgagctcaggcaatctgcccacctcagcctcccaaagtgctaggattacaggtgtgagccaccgcacccggctgagcttattcatcttgcccgagactaacctttatgcctgttcattaataactccccattttgggccaggtgcaatggctcactcctgtaatcccagcactttgggagaccgaggtgagtggatcacctgaggtcaggagtttgagaccagcctggctaacatggcgaaaccccgtctctactaaaaatacaaaattagctgggtgtggtggcgggcgcctgtaatcccgactactcgggaggttgaggcaggagaattgcttgaacctgggaggcagaggttgcagtgagccaaaattgcgccattgcactccatcctgggagatagatcaagactcttgtcttaaaaaaaaaaaattagccaggcatggtggcacatgcctgtaatcccagctacttgggaggctgaggcagaagaattgcttgaacacgggaggcggaggttgcggtgagccaagattgtaccattgcactccagcctgggcaacaagagcgaaactccatctcaaaaaaaaaaaaaaaaagccctccccatttcctcttcctcctggcccctggcaacgactccatgacactctttgggtctatgaatttgactattttagatacctcagatacgtggaatcatgtagtgtttgtgtttctgtgactggtttatttcacttagcatgatgtcctcaataccagtttaattggtgtcccttttattggagaataaattgggattccctaagtcggaatacagtttccccctgtattgcaatggctctccagcaaagaaaagctcaattcaccctgaaaataaccaaggaccagaacttactcatagcccacttggaagtgttcaaaagggcctcaggtctttggttcctatccatgttctacctttatagtcattgccatgactgtgtcactggaggaagtaggacatggaagaaccatcctggcaatacccttaaagtgaccccatcaatgttggttcagtatcagggtccatttagctctcagatcatggctccttcctttctttcttcttcttcttcttttttttttttttttttttttgagacagggtctcacactgttgcctaggctggagtgcagtggcacaatcttggctcactgcaacctctgcctctgggttcaagtgattcttctgcctcagcctccctggtagctgggactacaggtgccccccaccacgcccggttaatttttgtatttttagtagagacggggcttcaccatgttggccaggctggtctccaactcctgtcctcagatgatctgcccacctaggcctcccaaagtgctgggattacaggcatagctactgctgccagcctaatttttttttctaaagtagatatggggtttcaccatgttggccaggctggtctcgaactcctgacctcaggtgatctgcccacctgggccagtgctgggattacagttgtgagccaccgcacctggccttggctcatttcattagtagctatctcagtaataataaggcatacaaatttttcttaatttgttgtccattcttataagggttcctgtagtgctctgggaatccttttgttgataaaacatttcaaagtcatggactgacccgaaatcatatatgtttatatcagtattaatatatgcacctcctaggccgggcgcggtggctcacgcctgtaatcccagcactttgggaggccaaggtgggcggatcacgaggtcaggagatcgagaccatcctggctaacacagtaaaaccctgtctctactaaaaatacaaaacattagctgggtgtggtggcgggtgcctgtagtcccagctactcgggaggctgaggcaggagaatgacgtgaacctgggaggcggagcttgcagtgagctgagatcgcaccactgcactccagcctgggagacagagcgagactccgtctcaaaaaaaaaaaaaaaaatgcaccttctattttctgtcagctggcagatctaggcaagggcaattaatttagccatatgaactaatttatatataactctctctctctctctctctcgctctctttctatatatatgtgtgtgtgtgtgtgtgtgtgtgtgtgtatgtattttttttttttgagacagagtctcgttctgttgccagtctggagtgcagtggcacgatctcagcttactgcaagctctgcctcccgggttcaagcgattctcctgcctcagccttccgagtagctgggagtacaggtgtgtgccatcaggcctggctaatttttttctatgtttagtagagacggagtttcactgtgttagccaggatggtctctatctcctgacctcgtgattcgcctgcctcggcctcccaaagtgctaggattataggtgtgagccaccacacctggccgtaaatatgtattttttgagacagagtctcactcggcttactgcaacctctgtctcccgggttcaagtgattctcctgcctcagtctcccgagtagctgggattacaggcatgcgccaccatgcccagctattttttgtatttttagtggagatggggtttcaccatgttggccaggctggtctcgaactcctgaactcaagagatctcccggcctcagcctcccaaagtgctgggattacaggcatgagccaccgcgcccggcatatttgcattgttgtgtaagtacagtcatcatccatctgcagaactcttctcatttccacaactgaaactctacacccattaagtgataaactccgttccctcctcccccgagaccctagaaaccaccattctactctgtctctgaatttgactgctctaagtacctcatataagttggaccatacagcatttgtcttgtgactggcttatttcacttagcataatgtcctcgagcttcattcatgttgtcaggtgtcagaatgtccttcttttcaaggctgaataacattttattgtaggtatatatcgcatttgcttatccattcattcatcaaggaacatgagttgcttctacattttggccattgtgaataatgctgctctgaacatgggtgtataaatatctctttgtgttcctgctttcaattctttttgctgtatactcagaagtgaaattctacctactcctagggtatataaaagtaaaaaaaaaaaaaaaaagagctgtgtgtggtggctcactcctgtaatcccagcactttgggaggccaaggcaggtggattgctcgagcttaggaattcgagaccagtctgggcaacatggtgaaaccccatctctactaaaaatacaaaaattagctgggcatggtggcgtgagcctgtggtcccagcttcttgggaggcttagtcacaagaatcacttgaaccctggaggcggaggttgtagtgagcagagatcactgccactgcactccagcctgggtgacacagccagacattatctcaataataataataataataataaaagtttttaaaaagtggaattcctttagttcgtattagttttcacttttattttttgtggagatggagtctcaccatgttgcccaggctggtcttgaactgctggcctcaagcgatcctctggctttagcctcccaaaacgctgagattacagacatgagccaccgagtcccaactagtgtttctttttgagtatgaactgccaacaacacaattaaatcaggagagctgagggggtctctagcaagtgtgcgcagggtgcggctggtttcccagcagaggtaagcaacaaggggctttcatcgcccaggtcattcaggaggggcagagtgttgcagcaatggctagtgatgtgtgaaggggaagcaataatgtttcataggctacgccttggctcctggatctaatcgaaaactaaagtaaataacaggcctccaaagagtcccaggtaattgaggcaatagtcctgatacttgtttagacatatcatcaacaaaaagggaagcgggcatctagaatcctggaaacacatctttttgtagacagttcttataccaggatttgtgcttgattgtgtcataattatggttcttttaaacacaaaaagtctataatcattaaaatacacttatgagaacatattttacttttgcagaattagcatagaaagataagttttctttttgatttgtcagttttttaaaaatctgtttaataagccaaagagcacttataagaattttgaattaattcacatgtgaagcattctagataaacctaattacttctcttgcccttccttttataaggtgaaggagaaatctttagattacctaataaccatttaatttaatttaatttaatttgtttttgagacagtcttgctctgtctcccaggctggggtgcagtggcgtaattatggctcactgcagccttgacctctggggcccaaacaatgctcccaccttagtctcccagagtgctgagattacaggcgtgagccaccatgcccagccctaataatcattttaataagccccaaaatagtttatatagaaaagacatctaaccaattttattctgaatttgggaaaatcagaattacaaagagttgttagaggagtcaaaatatttcataaatacctaagcacaagaaatatttataattactgcagaatcataaagcaataaacaacgtttattagaaacttttttcaaaaataagtacttactgggcgtagtggcccacgcctgtaatcttagcactttaggaggctgaggccagcagatagatgacttgagcccaggagttggagaccagcctggccaacatgacgaaacctcatctctactaaaagtaccaaaattagctgggcgtggtggcacgtgcctgtagtcccagctactggggaggctggggcaggagactttcttgaacccaggaggcgtaggttgcattgagcccagatcgcgccactgcactccagcccgggtgacggagtgagaccgtctcaaaaaaaaaaaaaggtaaagaaggactcttttaaaaaatggtttaagtggccgggcgcggtggctcacgcttatgatcccagcactttgggaggctgaggcgggcggatcgcttgaggtcaggagttggagaccagcctggccaacatagcaaaaccccatctctactaaaaatacagacattagctggtcatggtggcacacgcctgtaatcccagctactcgggaggctgaggcaggagaatcgcttgaacccgggaggcagagtttgcattgagccgagatcatgccactgcactccatactgggcaacagagtgaaactctgtctcaaacaacaacaacaacaacaaaaaaaaaagatttaagaatatgtcgaaaagcacagagagatagattatttttgatgacaaaagaaacctccactgaactaggaaaacaataatttagttatttcatagtaaaaggacacaaattctaattttacatcttttgtacattattcatgtaataatttccagtagagaatttattaatataagtatatgtatgtagttagttatacatggaaatataaatctacagatacaggcctggcatggtgactcacacctgtaatcccagcattttgggaggctgaggcaggcagatcacttgaggtcaggagtttcagaccagcctgggcaacatggcaaaaaccccatctctacaaaaaatacaaaaattagccagatgtggtggcgtgcacctgtagtcccagctgctcgggaggctgaggcatgaaaatcacttgaacacaaggggagtaggttgcagtgagctgagatggcaccacagcactccagccttggtgacaaagcgagactctgtctcgaagtcagtcaatctacacatagtcaataaattaaaaaattttccacagtttcaaaatacaattaacttagtatgataaataaaattatgtatgtattaattataatattaccattaataagctgtaataactttttatttttatttcttaatttttgtagtcttttgtcctcgcccctataacttttcaataaacaaataaaactcatatccattttcatgtatacatatttgtatttatctgtaattctttttacctaggataatcaaccatgcatatcaaatgtttttaatctttaattcctttttttgagacagagtcttgctctgtcgcccggctggagtgcagtggcgcgatctcggctaactacaacctccgcctcccgggctcaagcgattctcctgcttcagcctcccgagtagctgggattacaggcgcctgctgccatgccagctaatttttgtatttttagtagagacgaggtttcaccatgttggccaggatagtctggatctcttgacctcgtgatccacctgcctcagcctcccaaagtggtgggattacaggcgtgagccaccatgcccggccccttaatctttaatttttataagtacatggtgtgtatatttatgggatacatgagattttttttttttgagacggagtctctccctgttgctcaggagtgcagtggtgcgatctctgctcactgcaacccatacctcccaggttccagcgattctcctgagtagctgagattacaggcatgcaccaccacgccccgctaatttttatatttttagtagagatggagtttcgccatgttggctaggctggtctcgaacttctggcctcaagtaatccgcctgcctcggcctcccaaagtgctgggattacagcaccacacccggcctcacttcattcctttttatggctgaataatattcaatgatatggagaaacctcattttacttatctgttcatctattgatgaacatttgggttgtttccactttttgctattataaataatgctgctttgaacatttgtgtacaaatttttgcatggactcttatatacatttaaaaatatggccaggtgtggtggctcatgcctgtaatcccagcactttgggaggccaaggtgggtggatcacttgaacccaggagttcaagagcagcctgggcaacatggtgaaacccatctctacagaaaaatgcaaaaattagctgggcatggtggggaacacctgtagtcccagcaagtcggaaggctgaggtgggaggattgcttgagcctgggaagtggaggttgcagtgagccgtgatttcgccactgcattccagcctgggtgacagagtgagaccctgtctcaaaacacaaataaacaaaccaaaacaaattttattacacattttattacagaaggagtaggattaaaaataaaacaaaataaaaagtacatttaattgattttctttaaaatattcagctggggtttaaattgaaattacatagaaattatatattagtttggatagacttgacatctttataaaatgaaattgcctcatccaggaacatgtattgtgtcttcatttattcagatgatctttttttgtttttgagacggagtcttgctctgtcgcccaggctggaatgcagtggcaccatctcagctcactgcaacctctgcctctcaggttcaagcagttctcctcctcctcagcctcctgagtagctgagattacaggcgcgtgtcaccatgcctggctaatttttgtattttcagtagagatggggtttcaccatgttggccaggctggtctcaaactcctgacctcaggtgatacacccacttcggcctcccaaagtgctgggattacgagcatgagccaccgcgcctggcctattgtaatttttttttttcagacaacagaaaagtataaaggagaaagtaacaaaccattagttacctccccagagataaccattgatgacatttcctccccaacatttttccccctatggatacacatacattttttcaagatcttgtttcctttgatatgtcattttagtggcttgaacttatttctggaacaatatatgggtaaagtctatgcatatatgtatctatgtatatatctatctatggaaaacaagtagatatagacagtaaaataaagacagagacaagacagcggttggagagatgaaaggagagaaagtcatagacaaggagagacatatggggagaggaagacacagagagagctgtgggcacataagggcagaaagataaacacagagagccatggagagatgaaagtattgggctggggccaggcatggtggctcaacgcctgtaatcccagcactttgggaggccgaggagggccgattgcttgagctcagaagttggagaccaacctggcaacatgacgaaaccccatctctacaaaaatacaaaaattagccaggcgtggtggtgggcacctgtagtcccagctacttggcaggctgaggcatgagaattggttgaaccctggaggtggaaattgcagtgagctgagatccggccactgtcctccagcctggaggacacagcgagacactgtcagaaaaaaaaaaacacaaagagacaaggagaggatggaaaggagcatttatggagctcctactgaatgtcattctaaacctccaaggtcactttgagggaggctgtcagtagtaacccctttacgccgctgagagcctgagccttagaatggccaactgagctgtccatggtcacatcacctagattgaacccatctccctggcgcgggccgggcccactgcgggtgatccattaactatttatctaatgaacaaactaaagtccatctcctcccccaggaagagagatgaggaccagacccccattccactccactgagtcaatttttcttacctgttttcctgtctactaaggtaacagtaaggtcggttgccccagcaactgccctccgactgccatggcaaccgccagctctccaccttgccctttgggcatctccatggcgacgggaggtctggtggggctgccagctccccaggctgcgcctgcgtcggtcgggtgggtggggtgggggcggggagggggggcctggttccgggcgtgcgcagccgcagagcgccgcagcctcgccagctcgccccggcactgcgcacttgccagccagtccgcccgtccggagcccggctcgctggggcagcatggcggggtcgccgctgctctgggggccgcgggccgggggcgtcggccttttggtgctgctgctgctcggcctgtttcggccgccccccgcgctctgcgcgcggccggtaaaggtgcgaccccagtccggcgaggggtgggggttgggggaggatgccaccggcgagggttggggttggggctgcgccgcctcacccccgcccgagccggctcccgggacgtgcggagagatcgacgagggtggcccgggctccggccgccggtccgcgcccaggccacgccggcacacctgagacctgacttggtctctgcctgtgcgggtggcgttgtccggggcgccgccggtaaccgtgccctgcccacctctccgtgcccggtgcctgtgacgctgtccacggcactaaggcgctttaagaaagggcgcgcgcgcatcagtgtgtgtgcgtgtgatgtgaggagagcggtgtggaggtgtcgtgtccttgaaagtgtgtgttctttggtttgagcgcttccaagtgtcctagaaaggtgccgtggtgcgtctgggtgtgtagtgtgtgtgataccgggatacttctgtgcgcgattcttttgtgcgtccgattgttttctcagtgacaccgtgtggatatttgtgaatccttattatgtgtgttggcttggcctatgggcgtgtctctctctctctctctctgtctctctctctctctgtgtgtgtgtgtgtgtgtgtgtgtgtgtgtgatttcgtttgtgtttgagagggaatggtcttcgcatctccgtgtgcacattccatagtggttctgttggaccaagtgcctgggatttcgtttgcgtgttcctgagactgtttctctccgtttctttgtggagctgtgtcatcctgaggagaggagccatgatgtctctctgctgcattgtgtctttaaggatggtgcatgtccttgcacctgggtggcttggcgattgtaactgcaggagcagctgcggatgtgaacgtgtgcaggtccttgcatgtggctgtggcagtgttgggctgtatatgtgacatctccaggcctgtcagtcctcatgagtgtgtgtgaggctgtgattgctggtgagtgtgataccccggggtgactgaggagtggtgggcgccagcaagggcacttggagaggcatcctcctctagctcttcaatactgtctgcatcaaagatgggaattaaaaaaaactgttaccttatatccgtgtaacaatgtgtttaatatatatgtacaatgtaaagaatgatgacaaaataactctctcgtgtagcagtcactcagcttaataaatagagcctgaccaagagttagaagcccctgcgtgcccctcgccatggcagcccctgtccccccacagtccttattctgtattttctgtccattgatcccttacttttgtttgtagcttatcacatatgtgtagctctcaaaaaaaatccattgtttagtttttcctgcttttgaacatcattgaaacggaatcatactgggtgactggttcctcgtagtcactaggggtcactaggaagtcctcagggtgtctagtagtctcaggcagtctgcagtgaaattctggaacttgacgtttttttttcccttggctctattctggtcacgagattcatccaagttgatgcatgtggctgtaattcatttatttttattgctgcataatattacatcctatgaggacatcatgatttatatatgtattctcaatttgtcagtggacattggactgtttccaggcttttctttctcccccgcccttttatgctattacgaacagtgctgctgtcatctttcacgaacttgtgaccagtagcgtatgtgccaaagctgctctggggagtgacatcccaggagtgggtcataggatatgtgcatctttttagatattgtcaaaccgctctgcaaaattactttgccagtttaattctcaccagcatagtatgagagttcccatttttctgcattcatatcaacacttcatattatcagactttttgatttgggtcaatcttttggttatattatgcatagtatctccctggcattttaatttgctttcccctgattactaatgaggtttttaattttattttatgtttgttagagacagggtcttcctctgtcatgcacgctggagtgcagtggtgcgatctgggctcactgcaaccttgagcttctggactcaggtgatcctcccacctcatcttcccaagtagctgggactatgggcttgtgccccgctcattttttttggttttattttttgtagagacagggtctcgccattttgaccaggctggtctcaaactcctggcctcaagcgatcttcctgccttggcctcccaaagtgctgggattacaggcatgaaccactacacctggcccaatttttcatatgtttagtaatcatttttgtgaaataggcgatcatgtattttttctatttctgtatgagtttgtttttctcttactactttttaggaattctctgtatcttctgtgtactactctttcattgactatttgtgttgcaggcatcactccttttaaacatatttatatgtggcctgtatgtttcttttccaaaccttcacagtcatttttatgatcttttattccttgctcagattattggtaccctcttttatttctttaaacttgtggaaattgtttgaaaactgcttgaactgaaaatttgtcattgggtaatttattctacagatgaacttgtacacatgccaaatgatatatgaacaagtttattcatatagttcctattgtccacaatattaaatatggaaaaatctataactgtcatatctaccatcactactcttatgaagaaactcggtctccaggagtgggggtggggagggaggaattatgagagtcaccaagggatcactggcgcgctgtggggtgggggtggggggtgtctggggatctttggtggtcttaagtgcgtctggagatatttggtggtttccagtggccttaggggtgtccgggtatatttggatggtcacggtgcttttggtggcatctgggatgtttgaggcctacgaagcttcccgggctgggggtccctgtctcgacggacgctgacaaactcttttcccccacctcattttcccgcaggagccccgcggcctaagcgcagcgtctccgcccttggctgagactggcgctcctcgccgcttccggcggtcagtgccccgaggtgaggcggcgggggcggtgcaggagctggcgcgggcgctggcgcatctgctggaggccgaacgtcaggagcgggcgcgggccgaggcgcaggaggctgaggatcagcaggcgcgcgtcctggcgcagctgctgcgcgtctggggcgccccccgcaactctgatccggctctgggcctggacgacgaccccgacgcgcctgcagcgcagctcgctcgcgctctgctccgcgcccgccttgaccctgccgccctcgcagcccagcttgtccccgcgcccgtccccgccgcggcgctccgaccccggcccccggtctacgacgacggccccgcgggcccggatgctgaggaggcaggcgacgagacacccgacgtggaccccgagctgttgaggtgcccggcagggggtggggaggggtcgggcgcctgcgtccggagaggacgagggcgaggaactgggaagcctgcttaccccgtggagtgcgaacccctaagtcctggggcctaagagggagtgaggtcctggatccagggagtccaggcaaggatgcctggctgactcagtgggggaagtggaccccaggtcctgggaaggggagagggaggcggggaagccacagttttctgggatgaaaggcgatgacggctgtctactgaaagcagtgggctgaggacgccttcttggggagggaaccgtgtccccaggcagtatgtggttgtggatcctgcgttctgggccccgagcgtggggcgggggaacgccccaccgcggacaccgcctcactgctttgcgctcggccctgcaggtacttgctgggacggattcttgcgggaagcgcggactccgagggggtggcagccccgcgccgcctccgccgtgccgccgaccacgatgtgggctctgagctgccccctgagggcgtgctgggggcgctgctgcgtgtgaaacgcctagagaccccggcgccccaggtgcctgcacgccgcctcttgccaccctgagcactgcccggatcccgtgcaccctgggacccagaagtgcccccgccatcccgccaccaggactgctccccgccagcacgtccagagcaacttaccccggccagccagccctctcacccgaggatccctaccccctggccccacaataaacatgatctgaagcagctctgtgcttgtctgtgtgagtggcagtttctaggggctggtggttccccgcggtggtggttgcccttagaccaggagagaggagactctaccctgggtcctgcactttagagcaatcacctgctcagtctatgtctctcctaggggtggaggggaagacatccacatggacaatcgcggatcttgtgtcccccttttaggcctcacttgggtatggggatcccaggctttgaggccactttcagggcctgcaccatcatcttccaagggaccatcctcctgagggccaaggggtggctttgtggggcacgtgagtagagcttgaggtgctggctgggatgtcgcaggcacacatgaacacctcctgatgtggggaagagaaaaggagagagcggagagaaagggagagggcactgagggtcgggaggccccagtacaggcacactctttggcagacaggcacattctggcagggaactctgagaaggctgagaaattggagcctgggtatccaggtcactaataaagtgtatttgccaaagtaggatagggtgtatttcatttactttgtaaagcttgattcgtaatgtctgaacgtttacatatttagttatgtagtgtagaggcctacctgtactcttgctccaggccctggatatactgagggttgctgtggtggcagctgatttgtggccatggtctttgcactggctagtccctctgcctctggatatcttcaggtttttgtccagatgtcacctactctcaagaaggctttcctggacctgtcaccctattccttcacctgcctttaacacgtagcctttatcactatctagcctgatgccatatctataagggcaaggatttttaagtgtcttgtttgcctctacctcccttatatataaagcggagcctagcacacagtgggctccccctgaatttcttgaatgaaagaattctcacaactcaagtaacattctacccagtctcactcccacccacacaacactcggcatggaggcagctttgaaacccaaaacaccatttatttaattttgcacaaaatctttcaacttgacataacaaaagcaacattaggcactcccatgttaccaaaaagcccctcaccaagtgaaaacaagagagatgtccatctttccctagtatacctgatgtgtccctcaaagctagttgcctcaggggtctcatgtcaaatgaacaatcaccctggcctggggaaaggtctacatttcttggccaagaccttcaggccacagagcagccacagtggcaggtggccttctggtgccgggtcttctccctacaggaccttgccatgggctccttcgccatggcctcctggaccctctggatctcatggaccagcagggaaaaggcctcctccacgccttgccgtgttttggccgaggtctccacgaagtgggccccccagctgtgtgcgagggctgcagcagcggcatgagcatctccagcagtggtcacaaggtcacacttgttgcccacgaggacaaggggctgggcggggtgagggccccaggtggcccatatctgctgcagctggatcagagacgaggggtcatcgagagcgaagacgcccagcacaccatcacagacagccaggcactggtcacgcagggccctatggatggcctgccctgctgtgtccagcacattcagaatgcagtccccactgtccagggtcaactccttccagtaggaatcctggatggtggggtcgtggtcctccacgaagcactggtggttcagctggatggtcagcgcactcttgcccacgccactggcgcccaccaccacagccttgtactcaggcagctgcctgccaacatccctgcggcgtgcctgagcccggtgggtttccccctggaaggaagggctccatgtggccaggcccaggtcgaaggtgccaggctttgttggcagctccatgaccccagcaggcagctcagggaagagacgtgggcagcaggctctgcaagtgggaagagaagaagcaagacaacaggggatacgttaggggagaccatttgagggcaaggagacagtggggtgtcattatttcaacatttattgaatgcctattgtgtgctgatcaccttccaatttgcatgctatatatatatgatttatgttgttttctccctgtcccacgtccccccatctctccttccctcctcacgcgaatcaacaactgtgaaggctggatttcccaaacagctttattgagatgtaatttacatcccatcaagttcagccagctagtgtccaatttaacgggttttagcatattcacgaagttgtgcaactatcaccataagtaaattttagaacattttcctcacccagaaaagaatccccatgcccattagcagttcctccccatgacagagggagggcaggattttgccggttttggtcaccattgaaccctagcccagcacagtgcctgccagacagtagggacccaacattcccacccccagaaggtttatgttctaaaaggcagaggcagataatataataaaccaaataaatatgtaaatcacgtggtctgttagccattatcattagaatgtagtctttattaattattcaacatacatttattgggaacctactgtgtggcaaggacatggagttgggcaataaatagacaacaaactgtagccctcatgaaggttatattctggtcggggtgagagacaacaaactaggttaaaaagggggcggggcacaatggctcacgcctgtaatcccagcactttggaggccgagtcgggtggatcacctgaggtcaggagttcgagaccagcctgcccaacattgcgaaaccctgtctctaataaaaacacaaaaaaattagccaggagtggtggtggacgcctgtaatcccagctactcgggaggctgaggcagaagaatcgcttgaacccgggaggcggaggttgcagtgagctgagatcacaccacttgcactccagcctgggagataagagcaaaactccgtctcaaaaaaaaaaaaaaaaaaaaagtgaactatatgtcagtagcgggtgataagcatgcagaaggtgctcagttcatgccaggcttttaaattataatttaatctccattcattaattcaagaatcttccttcgtgccaggcattgtgatatggcagttaacaaaacagaccccagtccctgcccttgtgaggattggattctggcagagagaaagagacagtaacaagataaggaacaaggaagttgcatgttcgaagaggatgggcacacggcaggtggtcaattagtgttagttattagcagcacatccccattcactcagtgaatgcccctcggtgtccttgggctcaggaagtgccctgcttagtgcatcctaatggctgttgccacgactcccctccgaaagcctggcgcagcggcagtttgggggcggatggtggcttcgaggtttggtggagctggagatccggaggtcggagtcggggcaaggtcccaaatggggatgcggccgcggcgtcctcagctctgagggatccctgggaatagtcactggcggcgttggcccagaaggagcgggggcgggataaagagagcaggaagcggaggacggagcttgggggtccccgacggttggggacaggaagaagacctggaggactgcggggaggggcgaggcggcggcgcacgtggagggagaggtcggcttctgggggtcctgtaggggtgcccggccatctttagggatgggtcagaaggcagaggcggggtcgaggctgcctcttaagtcggggtctgagcggctggagtctgggggcgccgacggtgaggaaggaaagcccggggcctggccgagtggcggagcgcagcttccaccccaggtgcctggcgggacggggccacactcgcccagtccccgcgacgcgcagggaggccgcggccctggtccccaaggctccgctcccgggaggagcccgaggcgcagaggcacgtgccgagggcactggcccggggcctcagcccgcgggaggcgccggagattgggggctcggtcctctcaagtggcgcggagcccccggcgggtccccgtggccgcgcgctcagagccgctgggaccaggttggggggcttcgcccagctcaccaaggctggcgcgctaaggggccgggacctggggttagggcggcctcgccaggtcgtgctttcccggacgaggccgggtgaggtgcaaagctcggagtgcggaagggtccccgaaaccaggactccacttcgggctcggtgtgagcagcgtcgcccgggcatcctgtcaagacccatcccgactccgggtgaggcggccccgcttccagccaagcgccgacacccctcccggccggccgagtgaggggccgctcgcccgggagaaggcttggcgcttgggggacgatcccccaaagccggcgcggggatacccccaggcctggcagggccaggggcaccggcgcctcgctcacctgtgtccgtggggaggcgggcgcgctgggacgctctgacaggcctggcggggggcgacgctgctccccggggcaccccggcggcggttgggggagtggacatgcgcagccgccctccctcggctcctcaggccgcccacccccctgcgccgcgcccctgcccctgccactgccccgcccctgcccgtgccattgccccgggggagcaaggggtcgtgcccccccaggcggcttgcgcacaggcacgtgggtgccacagcggcctctaggggtgcacggacggcggccaaacctccccgtgtgtcccctgtggcgcctctcccttgctttcctgttggtggtgtgtgtgtgtgggagagttgggtgttagattttgaccaggatggcctgactttgggaacggttttgtgggaagctctttcaggccacagagcctgtgctgcctcaactcggttttttggtagctctggagaaaagacagtgacagaggaggggtcattctgtcagggaagaaagaccctgattggaggcggctgcctgtcaaactacacatttcccaggctcccttgcagctatggcaaccacatgcacagtcctgatcaatgagagggcagcagaggtggggcatccagagggctcttaaaacagggcagcccctggcccgggagtggtggctcacacccataatcccagcactttgggagaccaaggccagcggatcaccaggtcaggagtttgagaccagcctgcccaatatggcaaaaccccgtctctactaaaaatacaaaaattagccaggtgtggtggtaggcacctgtaatcccagctactcaggaggttgaggaaggagaatcacttgaacctgggaggcagaggctgcaatgagccgagatcgtgccactgcactccagcctgggtgacaagagcaagactccatctcaaaaaacaaaacaaaacaagaacggggcagccccggcccttccccatccctcctcttcttgactcagtaaggctgtggtggtcagcttgggatcataaggtggccatgaagaaaagtcctggaaacctcagatccaactcccttgagctgccaaagcaattctcaccacgtgggagaaattcagctctcagactgtcctccaatttcccacctgtggtcaatggcaggcaccccttctgccaagaagctaccatgaccaccacattcaagttaaacctggacctcccaccatccccagtcaggccaatgagacagtggggaaacaggcctggtaaggatacttcctgctagttttcttgccttctcagcctagggtgtgggtgtggctgggactggctgtgaggctcctatttataaggcaagcacccattttctcatggattctaccattttatatcccgtggagccagtcaagatggctgctctattttcagttagttttttgggggcaatggatgggcaggggattgacctgacagagacccactccctcattccttcattactcatcggctctgctggccagggatgtggggttctccacctgctcaaagtcaaaaagctttctccaggttttttaacagcttgtactttattacatatgcaaccttgccatgcctgccagttaactcccctcccgccaatgttatcctcatgatatcagctccctcttggggccactgagctgcccccctttccttctgggctggagtagtggtgcccctcaagcaggcaatgggcagggggagatccacaattaatcgtcgcagttctcttaaaagtattaacacttaaataagcactcttggggagttgcaaaggatattcaggatgggatgcagtgggaggctacccctcatccaaggtacaggctggaatgagctacagctggtctatcgtgggcctcagaaggtgaagagggaccgtattctggggcttagtgtgggtggggcatatcctccccaaacttgttctggtgggcgatgttcttcacatctaggagagcctgaggaggaggcaagaatagggcaggtgagagagagtgaggacccctctacctcggctgcagggctgcccccactccagccctcaaccactctgtcttctggactatcccacagcccccgccccatgcaaaataatcacatgaggcagccatgcagaggggcctgtggtctccctttacccaatcacagaaggggtgtgtgtgtggggggtgagtgtgcacgtgtcgaagggtctacccagggcccacctggtggtggacataggcctgacagtagtaacaccaggctgacaggtcgatgtagctgaggaccagcgggtgtccagaatttccatggtgttggagcatgtggccattgatgtaacgaccacagtagacctgaggttgggggtgtgagtgtcaggtgggggtcagcatccccctgcagtttgctcccgggccaacctccgccccatccccttcctctgctccatacctgatagcaagagagacacacccaattctcttggattgttccacagtccccacaaggttgggtcacgtctaggcctgctgcaggtatggggcatactgccaccaaatggggacaccagggcagtggtgtcacagcataaaatatggcctggagtgggtgggtgaaactaggtaagctgaagaccccatctccccattatatgtttattcatcacatgctcctacctggagacacaaattggcaagagaaggaagccacagtcccagcctctccctgagctcacctgatcagtgaggcccctagatccctgcatcagcatcgaatcagccatgtcctgacctccagctgcctctcctagtaggttctcctctcctggggcctgagattctgaggccccctggacacgcagaagtaagagatgtatcagagaagcccgattcttgccccttcttgcccctacctgggtgtggtgagccttacctgagattcgctgcctagctccaaggtcctgagactcccaatcagtgtactgggagatatctggggtgtagttccctgcacaggtgaggttgggggggtctggtggtctgtgctcgaggctagaggagtttggatcagctcggtgccccctggagcctcctctgacgtagtctggtccagtgtggctccctccatggctgcctccgaggtggtctgggccagtgtagctcctcctacagcctcctctgaggtagtctggcccagcgtggctcccccaacagcatcctctgaggtggtctggtccagaatggctcctcccacagtctcctctgaggtggtctggtccggagtggctcccccgacagcctcctctgaggtggtctggcccagcatggctcccccaatggctgcctcagaaatggtctgggccagagtggctccccctgtggctgcctctgagggctggtcctgagtgagggccaccacagctgtctctgagttagtctggcctggagtggactcttccccaaatgatgccgaggtgactttccccatgcctgcttccagaaccttcttttctcgtgtggtcatccgctcagctaacctaggtttggctggttggggtgccttcttggtgaccaacttagaactggagggtccttctctgtcttctacctctggaaccagggagggagatccttgagtgtgggtactgtcacccttcctgcctctgatctctgcccctcagccccctccttccctgggttccccccatcacccccaaatccactcactcatgacccgtaagctgcgccagtatctgcgatggacttggatggtctcagtgattgaggccagggcccctgatagtgggggccgtggcagggtcagcaggggtggtgggtctccaaggagggagcgagtgcaggcagccatggactctgagatggatgtcaggttatagccaccctttgttaaggaaaaggggagggaaaggtatggtgggggttcattggggaatttggaggacaacatgtcctgcctccccaatcctccctactgagccctgcaagtctggagagggagggggagtactgagaacaagtgaacagaacccacacctttaagataggcagcacccactgtgtaaggtggttgttgtggggagtaaattgtgatgtaaagtgcaagataacaatactgataaaagcattagtaacagctgacatttattgtttgctgtgtgccagacccgattttaagtacttcatgcatattaactcaatcctcacaaccacaggcgctcaatctatacaggaacttgccttcatgccatacagaaatccgtcttcacactgtccaggaacccctggcctcacatcatacagtaaccactgacctgacctgcacaagacgactgctgtgaacccatacaaaagcccctgccctgacctagtacaggaacaactggactctttctccacatggactcctgtattgactttttttacactctacaggaatcccagttgctattctttttacagataaagaaactgaggctcagagtggttagatgacttgtccgaggtcataacagctgaagaggcagcactggggtttgaacttgggctctctgatggagtcatctgtgttcttaactcccaccgtgtcctgtcacaagcagtactgggcacatagtaagtgcgactttttgcaagccaattaatttctcagtgacttattttcctcatctgtaaagtggtgaaaataacagcacaggctgggcgcggtggctcacccctataatcccagcactttgggaggccgaggcgggaaggttacctgaggtcaggagtttgaggccagcctggccaacatggtgaaacccccgtctctactaaaaatacaaaaattagccaggcgtggtggcatgcgcctgtagtcccagctactcgggaggctgaggcatgagaattgcttgctcgagcctgggagatagaggctgcagtgagccgagatagcgccattgcactccagcctgggtgacacggcgagactctgtctcaaaaggaaaaaaaaaaaaaaaaaaaaaaagaggcaggtatggtagctcatgcctgtaatcccaacactttgggaggctgaggcaggtggatcacgaggtcaggagttcaacaccagcctggccaacatggtgaaaccccgtctctactaaaaatacaaaaaaattagctgggtgtggtggcaggcacctgtaatcctagctactcaggaggctgaggcagagaactgcttgaacccagtgagccacaatcgcaccactgcactctagcctgggcgacagagcaagacaacgtctcaaaaaaaaaaagaaaaagaaaaagaaaataagagcacagaaggttgctgagtgggttaatatctgaacaacgcataacagtaaccaggggccaggtgcggtggctcatgcctgtaattccagcactctgggaggct

SEQ ID NO: 674 - DNA, 1044 bp, Homo sapiens
agccgcagagcgccgcagcctcgccagctcgccccggcactgcgcacttgccagccagtccgcccgtccggagcccggctcgctggggcagcatggcggggtcgccgctgctctgggggccgcgggccgggggcgtcggccttttggtgctgctgctgctcggcctgtttcggccgccccccgcgctctgcgcgcggccggtaaaggagccccgcggcctaagcgcagcgtctccgcccttggctgagactggcgctcctcgccgcttccggcggtcagtgccccgaggtgaggcggcgggggcggtgcaggagctggcgcgggcgctggcgcatctgctggaggccgaacgtcaggagcgggcgcgggccgaggcgcaggaggctgaggatcagcaggcgcgcgtcctggcgcagctgctgcgcgtctggggcgccccccgcaactctgatccggctctgggcctggacgacgaccccgacgcgcctgcagcgcagctcgctcgcgctctgctccgcgcccgccttgaccctgccgccctcgcagcccagcttgtccccgcgcccgtccccgccgcggcgctccgaccccggcccccggtctacgacgacggccccgcgggcccggatgctgaggaggcaggcgacgagacacccgacgtggaccccgagctgttgaggtacttgctgggacggattcttgcgggaagcgcggactccgagggggtggcagccccgcgccgcctccgccgtgccgccgaccacgatgtgggctctgagctgccccctgagggcgtgctgggggcgctgctgcgtgtgaaacgcctagagaccccggcgccccaggtgcctgcacgccgcctcttgccaccctgagcactgcccggatcccgtgcaccctgggacccagaagtgcccccgccatcccgccaccaggactgctccccgccagcacgtccagagcaacttaccccggccagccagccctctcacccgaggatccctaccccctggccccacaataaacatgatctgaagcagctct

SEQ ID NO: 675 - protein, 254 aa, Homo sapiens
MAGSPLLWGPRAGGVGLLVLLLLGLFRPPPALCARPVKEPRGLSADPLAETGAPRRFRRSVPRGEAAGAVQELARAHLLEAERQERARAEAQEAEDQQARVLAQLLRVWGAPRNSDPALGLDDDPDAPAAQLARALLRARLDPAAAQLVPAPVPAAALRPRPPVYDDGPAGPDAEEAGDETPDVDPELLRYLLGRILAGSADSEGVAAPRRLRRAADHDVGSELPPEGVLGALLRVKRLETPAPQVPARRLLPP

SEQ ID NO: 676 - DNA, 22103 bp, Mus musculus
ccccagctggtagcagtgttttgggagggtgaacctgtagaaggcaaagcctggctaaagaaaggtagtttagcaatatcattgggaagctccccccacccccaatttcaaattagaaaaaaatacaatttgaatacaattcccaagaaatgtcttactgtacaaaacacaaataagctacaaaagtataagtatttcttttcagttacagttcccatatacagtatatcatagtatatattagcacaacacaaaatctcagccagcaacacccttacatttactatctaccattatctttgtattctatgggaaatatatctcactgacttggggttctaatgcagtgaagggacaccatgaccatgacaactcttatataaaagaaagtatttccttgggacttgtttacagtttcagaagtttgtcatcatggcggtggtgttgagatatggcagtatgtagactgacatgatgtttgagaagtagctgagtggcttcaaaggcagcaggaagagacagagccactgggcctggtttgggcttccgaaaccccaaggcccacagatttcttccaataaggccacaccttctaattcttctttgtagtcccagtctgagaactaagcatccacagacttgatcttatggggaccattcttattcaaatcaccacaccttcgcatgtttcattaaccctgtaaggtaaggaattgtggtttacaagaggtacagctggcttctgagaacacaagggaaagaaaagatagtagtttatagagggctggggaagggtgacaaataattatgacttgagactttttgctttttacattacattgggtgaaacacttccacccctcaccccaagtaaatagaaaattcactagagaagtagattttgatacataaaattaattttgatacataaaattactcagaaatttctatggtcttttttgtgggtgtgtcacaatgaaactttatcaaaatgactttaaaaccaataaatggataagcacaataaatacaacagtagtctttaaaagaatgcacaattggggctggagaggtggcttggtgctactctccccgaagtcatgacttcaattcccagcacctatatgattgctcacaactatctataatgggatctgataccctcttctgtcatgcaggcatccatgcaaatagagaatgcatatacataagtaaataaatctttttacaaaaagaatgtagagccgggcatggtagcccacgcctttaatcccagcactcgggaggcagaggcaggaggatttctgagtttgaggccagcctggtctacaaagtgagttccaggacagccagggctacacagagaaaccctgtcgaaaaaccaaaaccaaaaccaaaacaaaaaaagaatgtagagggatggcgagatttctcagtggttaagtgcactgactgctcttccgaaggtcctgagttcaaatctcagcaaccacatggtggctcacaaccatccataatgagatctgacgtcctcttctggtgtgtctaaagacagctacattgtacttataataataaataaatctttaaaaaaatgtagattgtatagtgagtccttttctgttctcttaatttattatatcataggtgaacacaattttccttgtattccttggtactccttggggttttctttgttgtttttttgtttttgtttttgtttttgtttttttgagcctattgaacagcattccaaataactaggaagtcaaagtatataacatttccattttaatttctgggcccatgaggaaagaaaatagataatagaggaagaaaagggagaagagaagatagaaaaggagcaacgaaggatatggattggagagagaaggggaggggacatcccccctgtttatggtctagaagatacactccagaatggtgttttcaaagagagtcaaataaatgtcttatacttaaacaaataaaaaatagatttttgactaaacatggcattaggtagtaatatctcaaacattctatttgctagccagggaggcattacacaaatagtccaaagaaatgtgaaacacttgaacgaattggttgaatgtatggaagttatggtcccagcagtaggtcaagaactacattatgaaagcagctgaactggctgttagaaaggcagcaaatttgcttcaacttgtatataatgaagtagaatgtgttgcctgaaattaaatggaaaaaaaaataaaacaccctgagaatggaatgaacaaacactaaaccttggcttcggatttcttaatttaaaacctatcacagagtctcaagaatcttcaatttggaatagttccaattggaattctgcatcctaaagcctatgattcagataatccccctctggtaaaggaagagacgaaataagactgatgtgtttaatatctggccacagtattctcggttttttttcccctcttacttaacagatatttttgctaagctaatcaaaggttgctctttctaaaaacctagatccaattactacataaatcatttcagcaatcctgcttagatttgaaactagtttaaatcagaattggaaagacatttgagtccattctaggagaaatcaaggggtcatttctatggataccatgtagtactaaataaatatttacaacaaatactgctgaacaaattatgccacacatgagtgttgttataattctggccaagataatcgctcactttgcaccaaatgaaattacacatggcactcagagttttaaaaattaaaaatgggtttccttgtttaatattttttccaggaacaaaatgataattagaacaaaatcaaggtacccattaatggcatactcataaatttatttccaaatttctagtaattgtggtatcatttaggagacaaagaaattgatcatatgttccagttggattttgtactgctcaagactaatgctgacacaaaatgcaatctttgcaagctaattggctatgaaaatctgtgcaacctagctaaaagcttacatagacaacataggtctctgatcagattcagggaagataggaaggcatagggagacaactcaactaatgtactcctttaaatttttaggtttagaaggagagagattacaaaaagaatacccaatatgagatatttttaagtatttccaatcataagcgatcaatcagaatgacaaaggtgagtatccatgcataaatgtgctatacaaatgattacttagaaatagattttagggagttatagaaaaacattcctttaataggatcaccttcaagaatgtcacctctttaacactaagatccaagagccaataaaaatcagaattttctttctatggtagtgaagattgaacatacaatctcatacaaatcagttaagtgctgtaccactaaagtacacgcctagcacaggggcccagcctttagtcccagcacttgggaggcagaggcaggaggatttctgagttctaggccagcttagggatacacagagaaaccctgtcttgaaaccactgataagtctaggggtttatcaggatgaccaagataaaaggaatactacatccattctttggctgtatttaattgagcctactttcttgccccagcccaatgtcaaattcttgccaaattcctagaagtggctctccaaaatcaagcataacatatatgcaggaaataatcaatcaaatgtgtcagtctgacacattttcacaagttgaacatccccatttgacaagcatctaacaccttgctgaagaaacatcatcatgtcattgttatttagttattgtagatttcattgtgagacacagtcccaccatgtaactggagtggcctgaagctctctatgtggacaaggatggcagacctgttttgttctttgttgttgctacttagtttattagctttctagtaatatttcaattcaagtttttttctttaacttggcaatttcattttatgagtcttcctaaggatttattattttcctatttttatcaaaatcttctatagttattacttcttttgagtcacactttttttacagacttatataatttatttactatcaatttcagcctattaattttgcatattacttttgcttcttactcatgattatgagattagcctacacattctatctggacagtataataaaatatagatgaagtctctagattatagcatctaggttttgtttctttcattatttgagtcagaaaaataaatactgtataagatacttactgatgggacatttgaaagtgtccattgggtaatatatttataacaatatagtctcaataaaatgcaaatgatgttagagtttgatcatgtgaagtaggtaattaattcatctttgcttcctattttaagtttatgttacatacttttaaactatgaatttgatttcaaagaggaacgttctcattgtatttacttatttatttatttatttatttaagctccaaatgctgtccccttccagtccttcagttttgtttttgtttttgtttttgaggggggagtgttgttctttttttttttaagtggatcttggcatttgaagaaactaaataattaagtttattttattgctttaatttttttcttttattttttgggaggtataatatttcatcatttccatctttcctttctctctcaaagtgctcccatatcttttgaattcatgggctctttttgcataacttattgctacacacatataggtatgcatataaaagttcctatttggtatttttaaaaagttacaacaggttttgcccttctttttacctgttatattaaaatttaatgtatcattatctacgtagaattctcaaataaatagaattgctaagaacaaaaccaaagttattcattaaaactgtaagttttcagctgggcgtggtggcgcacgcctttaatcccagcatttgggaggcaaaggcaggcggatttctgagttcaaggccagcctggtctacaaagtgaggtccaggacagccagggctatacagagaaaccctgtctcgaatatatatatatatatatatatatatatatatataaatatataattaatataatataaataatatatatattatattattaatatataatattatattatatattatatattattattaatatataattaatataatataaataatatataatatattattaatattatatatatatatatatataattttccctatactcagaatttctgccatgacactgttcctgttttatttattttatatccacagaggtcagaagagtgtattgaatccttcttgagctagagtctcaggtagttgtaaatcacctcatgtgggtgctaggatcagaacttgggtgctctggaagagtagcaaatgttcttaatcactgaactatctctccagcccctatttctagttcatatatcatgtaacagtggttgatctgtaacactacaaaaatattctctaactctataagaaggaaggtggtcattaccgtgagagctcagtagaacacttagcaagtttgctcatactattctgtcttctggatcttggtataattaacaggattcatagctgactggaaaaaaatacgccaaaaatactaaataatgaattgatatccctctgaaggagctctccagatgtttaatcccactttgctctttgtacagtactcactggtacccattaccagtagtttggatgaatatagtgaacagttaacaaatgtgtaggtaatatccaagtgtaatagagcacaaaatcagaattcaaactactgaaacatgctgaagtaatgatccaaaatctacttaggtaaaagtaatagaaagttttgtattttggtccacaaaatctcttctacttagtaataggatacacaagttttgttgcatatacagcaacatataaatgtaacctaaccattaaaacaagtcccttaaatgctaggcagcattctaagaagtttttatttgttgcgtagtaaaagagcattgcatctggcactggagaattaggtctagaaaagttaccatttacaataaaataggtgctttcaccactcctttttgtcccaggaaaggtggtacttggaatgaggtccagatgtgaaacttgtagacatgcccaaacaacttccaaagacagtgaccaggacgagctcaacccaaagcatgaatttgttacaagaactgaaggtaactgacttgagatggagtggactcagggagaccactgctagactcacacgccagcctctatgtgcttcaagactttctgaagagctctaaaaccattgacctgataccagaggatggaaagcacaaaacgtaggcaagggtgaccacttggtggagatgttgtgagcaatttcaatacaagcagaaggttggactacatggtctttaaagggagagtgcaaatgtcatatttccagaacagttttcatgaagatattgcttctaagttttgtatcagtgtgatcaaaactctcctttgtcttggcttgggggcggtttctagtcttaaattcttactttctgtccaaccccaagccagacctttttatttcttcattccttcttcttccaccagttcacttttgctcacaactttgctttgcaatttctgttcgcctctaaaatgccttgttctcctaagccatcaaagagacgcaacaggaagggtaatttgcgaattgactgaggtgggggggggggttacagggggatgatgagccagtcaagcatcacttcctggttactgattaaagaagggattctaccattcagcatttaagagcttctcagttagagcttaggacaacgtagaggggatgcaggatctcagaccaggcttctaacaggaatctagcacgctggttagaaaaagagagaccttggcgcctcacctgaagtcagtactcaaaagccatttactcaactgatcgttactagggttctctttaggcaaaaggaatcctggacaggtcgctgggagctttctgtcaattccagatcgagatagggaaggtgcctggagcaaccagagaagctgcctagtttttactgggcctggcccaacccgtttagtacccatgtgacccccggaatcgttctttattttttttacagccttgctttaggagaaaactggctgcaggccggttgccagggacgcctgccattagctcttcagggccagggtgaaagaggacacttggggggaggggtttatggcttctgactggctagggccaaaaattcatttgcataagtctctcagaagctttctgattggctggggcaagaagggtggcgatggggtgattccaagggcccggagctctggcctgaggaccttttcgttctgaagttacccggtgggtgtgagttattgtgtgggcaggggggagctgggaggcccggtttgggaagttttgccggcaggtgcatgagccattacctggcagagttttagaaatgtgtaagaacagcaaccgagagtcaagacactagaagatccaagcagaaggaaggaaattgatccagatgaaggatggaggccaaagggaaggggctagaggctttctccacggcttagctaattttcaaagtgggatgcctttactaggcagttgggatttccgttttctgggagctgttagagaaaagaaggcaggattccagcatttaataacccaaagcaattccaaattttcattagggtgcatacttaaaatatccagagggtctgggtctcagaaggggtcaaactacattttaagttatgagaaacatcaactactggtaaccaggtaatgtgtttttctaaagctctcttccttggctcttgtctgccataagggttaaaacaagcctggactgttttgaacacctctgtgcagaagaagtggtaaaggtgagggtgaggtcctctctggttcatcttagcctatttccctatttttaagggttcagactcttggcagaaaatgcctctaaactgtgatgaagccctaagtactttacagtgtacacagtgaagagttttaccgccgatacctcattgaaccctaatagaaccctttgccatagcccaagaagaagttcctttttattgctaaagcaacactggaaatttttctctcatgggagacactccattttgttgacaaacagagggtggaaaagttttcaaatctgggcataagaagagaaaggctgaggttattgttatgtgtcaggtttacacaatgcatgtttcccatctacattcttctttccactgatctccttagctccacggggcagataacaaacattatttcatgtttaaaagaacatgggacactgaatcagaaggatgagtagctgtcgttccaaatcaagctggctggctggctgggactgtgtctccatacatacatacatacatacatacatacatacatacatacatacataagaaagcattggaagcatgggttatgatctagaaccagtaaaccagagggagatggagatttgccagtctgggttctagagttaccaatgacttttctgtctgttatcagctcttgttcccttcaaaattgaaaagagacatgattttcggtagacagtaccagtccttcaagaaaaaacaaacaaacaaacaaacccacatgcataagtgtctctccttgtttggggcgcttttttgtcttgcaggggaatgccatactaaaacttccccccgaagactttagtgggaagaaatttaaaattagaagcctgagtcatcttatctggaggaatggaagagctgactggaggttgagggatgtggcaaaggaaatgagatgggaaatgagtatgggctcagggctgggaacctgaaagaggagtttcaagtgtaaaacttgaaaggtagatccagggctatggtacacagcttaggcttattaagtaacccttgcttaagaactatcttttgaaaggagcacttgacacacactccagaaagttattgggtatactcccattttttttctttaaatgataagatatacccaacaccagtcctaacttctgccaccttctcctagtctttttgatagccaaaagggccacaaggcccaagttcacactccattgccatgctcttatctcttggtgggggacacaaaactatagatcagatgaccagggtgctcttcatacctggcagcagtagtaggaaagaccccgccaggagggaagcaaatgcctcagtgttcccatccccctgcagctgaccacgacctgggccgtggagggagcaccccatgtccacgtgcatccggcatgtcctgctaactcttcttacataagattcccaagtatggagtcagggcagctgtgaatccctcttacccgacgtctaataataaatcgaggctaaatttccggactgcagtcactctaggttcaggattgaggggctcttttgcaacccggacacacaagcattccggtcatcccacccggagagtgcgcgccaagcccgcccagcccgcgcgcgccagtccgccctctggtttggacggcggctccttgggctcagtgcctcgccctccctcccccaaacagcttgttctgggtttggtgctggggtgcggccgctccatcctcccagccctaccctgccttgccctgctgggccgccctgccttagcccgggtatcaggcgagaggcggagccacccggcgtgccccgcccccgcggtagaaagggttgggcgagtgttactcgcggtcagggctgggaccttttatctgtgctgctggaggaggtaggaggaggagacatcaggggtggtcctgggcgcctgggacacctttcccggactataaattgagcacctggaatgggcagggggccggagcaaccacagtcgcccttactcacagtccgatcagtgaccgcagcagcgcccttgggcagccaccgtccgcaacgcaagcactgagaaccaggggatttcgcagtgcaagaggtgggtgtccccgccctttggcagcccgggctaatatggttgctttcgcttaggttttagaagggagaaaccagagagtccgggatgggggagatttttttctccttttttttcaaaggtcttctgctagtattggaggaggtgataccggctggtcccaaggaaccacccttgtgccttctctggccagccttggtcagggtgggagcatcgcgcggaccggatgccgggcatcctaaccgggtgggtaatttgttcttttcgtctctgtctcccaagcagaaaaaggctagacccagccacccaccgtcaatcctgagccaaagataagagcagccgggcctcacgaagggctgagctgagaaagaagcaagttagagagggcggagaaggatctgggaatcccgtcacaccggcttcaagcaggctcccggcatcagcctctgagagcgcttgaaggcggcatcgccagcggtctatctccgtgtaccagcgtccctgtgtttccgcgcccgctcggccaccatgatgcaaatctgcgacacatataaccagaagcactcgctctttaacgccatgaatcgcttcattggcgcggtgaacaacatggaccagacggtgatggtgcccagtctgctgcgcgacgtacccctgtccgagccggagatagacgaggtcagcgtggaggtaggcggcagtggcggctgcctggaggagcgcacgaccccggccccaagcccgggcagcgccaatgaaagctttttcgcgccctcccgggacatgtacagccactacgtgctgctcaagtccatccgcaatgatatcgagtggggagtcctgcaccagccttcgtctccgccggccgggagcgaggagagcacctggaagcccaaggacatcctggtgggcctgagtcacttggagagcgcggatgcgggcgaggaagatctggagcagcagttccactaccacctgcgcgggctgcacaccgtgctctccaaactcacccgaaaagccaacatcctcaccaatagatacaagcaggagatcggcttcagtaattggggccactgaggcgggggctgtccccgctgcccagcaccctctctcgggtcggctctaccacccctctctttcctccaagctattttcttcctggttgtggggcgcgaagggcacactgtaaagttgggctgtgtacttggtggggttagtgtggagaagagggcctcatcgcgagagcagaggaaaagtagtcgccagagaggggggttcaaagacccccggagggggcctactctgtgttggtgggaatggaactgggccgatgtccttcattcagcctgtgcctttcttggggtttcttttctgtttttctttccggaagagaagggcctgagaaagggccatgccagggcacagtgctgggttgccacacatgggagggcagcttctagccgggtgcttgggggaggcggggctcagcctcctgctgccctgccttgagctgccagaggaggccttggcgttgctaggattgcgtcagttttcctgtttgcactatttctttttgtaacagtgaccctgtcttaagtctttcagatctctttgctttgaaacttcgtcgattccattgtgataagcgcacaaacagcactgttggtaaccggtactactttattaatgattttctgttacactgtacagtagtcctgtggcaccctatccctttcacgccacccctcccccgcccgtgtgtgtaaactggcgatgtgccagctaggatgaagcttgccactcggctagcgaaaataattaacattattatgagaaagtggatttatctaaagtggaaccagctgacattatatctgtatcgtatggagaatgatgaagggctccactgttgttatatgtcttgtttatttaaaactttttttaatccagatgtagactatattctaaaaaataaaaacgcagatgtgttaacaaaactggacaagtgtgtgttgctctttaatccaccaatgagtggccaaatcattaaaaagacgtgtcctttatttccctgacattaagtgttatttttctctgatatttccaggtggtggctagtcatctctacaactatttccttttgacaagtagctactagggaagctttctaacagttcattttcaagatgggatcaaatatcccaagaagaagttaataaatattgcaaggatctgtgaaactacatagagtgtctttcagccaatttggctagcttatagcaatatttagttagtggaagtgttttgaagccaagactctaaatttcccttgactatggagaagtgaaaaattaacaacatcaaaagaaaaaaaaatcccatctaatagcaatgcactcatcttgcaggtctttatataaaaatattatatggaaatcatggtcgatattttaaaaggttatagcataaatataagcagtgcccttcatcaggagtccccaagcattgtctagattttcagtgacccattcagcatttgtggatagcagatctgatcaaggctgccctaagtctcttaggaatgctttttaagatagcattcctgggagaagtcagaacaggtgaaacaacagtctgcattttctttatttcattgggttgggggatgcatgccaggtcaacctcagttttcaccagaagtcatggggccattctttaaactcataggacctgattttaaaatccacacgactttgcagcttttaaaaaatatcaattgtgtgtgcacgcgtgtgcatacacattacaggccaggccaggccagttcaagtccattatcagcacttcgcagcagaaaaaaaaaatcggggaggggggagggggaggtctccagactgggatgcctgcctgttgccagtgaaagttaatcgttaataaatgcagataagctagccagcaccaaatgtcagctatacccacatttgttttctcttccctttgaaatatcaaagtgcaaataaaaattttaaaggcaactccagaagcaatgagggtagaaagaaacaaaggctgtggcactagaaaattgcctgttcctccggattgtagctaaatgtaattgtcctggtaccacacttgaagtccggcataggacttaagatgcttcctgggtttgcagtggggacagggatgctggttacttagaagattctttaggccccagagaaaatcgcttttaggtttctctcttactctaaatggattttgtgcctccatttcctttcctgctctgtattctttatgaaaataatgaggctttggccagatgtctactgctggaaggaaactattattttaagtaacatacaaaactgattcatccatttccccaaagtcctgagggagagcctgattaaaatcaagagagaaagtgatggtaagagctttatgggacactaactgaaccgtatattcagaaaaggctggcagaagaataaactagcaaaagtactaatttcattttttttatttttaaatatttttatataagcatgtgtatataagcatatgcatatatgctaatgagtctcaactaatattactatgatttgctgttaaagaacatttgataacaatttcctacacaagatctcacactgtgatcttttgagaacctggttttgcccaccagtttgcagctttgctcctgtggagagtttcatgttttgcatttgtctcttccttagcaagctgcctgatgtattcctatccctggtatcagagaaaaaattgaaagtttggctgatttgcatatgcttccttgttttactttttgttttgaacagaaatcattctttttttttttaattttgcaatcactgtttaatatgaattagggttagactgtactctgggagaaaggccccttggtcttgcaaactttatatgccccagtacaggggaatgccagggccaagaagtgggagtgggtgggtaagggagcagggtggggggagggtataggggactttcaggatagcatttgtaatgtaaatgaagaaaatacctaataaaaattggaaaaaaagaataagatagcatttaaataaatacaaatgaagccaaaatcaatcaacatttcagaagagctggcaaagtaggggtcaaaaatcattcttaactagtgttttctgtcctctttctctacctttcacggctccatctctccctgtcttagtttaatatccccaacattttctttttcgttttttgttttgtttttttttcaagacagggtttctctgtgtagtcctggctgtcctgggactcactctgtagaccaagatggccttgaactcagaaatccgcctgcctttgccttccaagtgctgggattaaaggtgtgcgcccccactgcccggcctccctagcattttcttaaatgtttatacatagctccaattgatttagggcttaaattttataccataaacctttatgaacaaatttatctttttatgggttatctagtaaattttactcaccacgacatccttgcatggtttgttttaaaaagagttttaaataaaataatgaaaggagcactttctttaaaaatttggaggtaacgtcttttgttctcaactaataaaagcataaggttggtcttttcaaataaaatgctaggggtttctttctgtcgaaaagtttaagttttgatagaataaaatgctttatttattgagataatttaagctaaaattaatttttaaagatcatgtccactttaaaaaatagctcaagggaataaaaggttgttctttattactccaaattcatgacctgggcgtctaggtcacatggggttgtgtaggacacactgagagacatagatagcctattaccaacaagtgctcctttttttctgggtttcacaataatctttttaaggttgtaatttaattctaatatttctccctttcttccctccaaacccttccatatactcctgctttccttaaaattcatggcatctttttaaattaacaaggattggatgcatatatgtatttgtatatacacatatattgctaaatataacctgttgagtccatataatgttacttgtattatgatttcagggctgactgacactggacaaccaattgatgtgctcttctgtgaggagtgccacctctttttactcaacttgactcagttttctcaagttttctatgtagagttgaggactcatggactttttcctgaccactttggcatgtctgttggtatcatctttgctcagtttatgaacaaccttcttgaactggaagccagtccctccccttccttcatgcaatcatttctcttgccattgactcaccattgtagagggacttgacactgtcttgccactctctgtgaagcaaggagtccttagggccaaccaaatggtcagaactcatgacactacttctggaccacaatccggatgcttagactaccaggattccctgtgcatatgacccgaagcaatgtgcttgggctctatgtgtttgcacccagggctgaagcttggcagggctatgcagcaaggacttggatgcacatacagggctttccatagctttctatcaaaggtcctcctcattgcaaggcagttcttgaataggaagataaagaggtagaaagaaaattaggggtcccatttgttccattgctctgccttcctcctgtccctcaggaagagaagtgaaggcagaagaatgcagagtgagcttcaaggcttccacagtttcagcaaatgaagagttcacagcttttctccctattttccccatcacttaggaatctccttgctccattgaagaaagatgctcagagagtaacagataaggcaaaggaaactcacctgtggctgctccaatgttggtcaatgtagcaaagaaatttccttatgactcagacggacatctcttccatgaaactgaagatttcacttctccagttcttccatccttttatattgaactagatgtcttcattttgatgtcaaaggtctccctccagttaaagcatagaagttgtgcatctgtctaaatgaagttcgctaaagccacagctatctcttcagcctctcctgtttcggtattctctattttaaaagagcattcattcttttgtatgtttttcatgatttgtttttttatcctttttttttcctttgcatctcttgcctagcaatctcaatatatctaccacagtgtctaacttgaagctggtaaaaatattaatattagaaaatcctcttaccatttatgaacatctttttgtttgttttgtttttcgaggcaaggtttctccttgtaatagccttggttgctccagaactcactttgtaggctaggttgcccttagtgctgaattaaaggcctgaaccactactactgggttataaacatcttttgtttgttttgtttcgtctttttggtttttttttgttttgttttgttttgttttagttataaacatcttagtagatgataactttctggtcttaaattgtcaaggaaaagtgttttctaacaccctagataggaaaagctgggaaaatacttgcaaaacataaaggccaatttatttgtttgtttagtactgaaggctaacccaaggtctttttttatattttgtttccaaatagggtctcactaagtccaagtggagctttttaaactaggtctgtagcagaggcagaccgtgaccatgtgattgttctgcctcagtctctggaacagctagaattgtggcttgcatcacaaggcccaactcacctctttattctcacaagttaaacagtgttgaaggtggggcattttctgcattgtattttacttctcaatatccattttcctagtatcgatatgaccatatctatcaaggagcactctgctaagaactggatgtgattcatttgaaattttcaaaagcaaaaactaacttggtagtccctcccccaccccctttgaataccacactgctgaggtaaagaatgcagtagcttgtgggtgagctcaatagggccaattaaaacctgactacacttccaccatgttgaaatcctcacagaacttgctatgtccttggataatggcccttttttcttcttccttagcagacatctaattgaggagatttcttggttggtagttaaggaaagaagcaaatgaaagggctacagtactggttcttgccaagatatttaagtgctttccaattgtcctcaagaattactagtttaagccttgtttttaaaaaatgagaaatacattgtgaaagaagaacacatgtgttttccagagtagtcaaagtatgcgtagaatgtaagaagtgaagttagtatagattagtcattcgaaagatggtgtggttctttgtggtatataattagaattgcaaactgcaatttatagatgctttaggaatgtgtgtgtgtgtgtgtgtgtgtgtgtgtgtgtgtgtgtgtgtgtgtgtgtatgtgtgtgtgttaagtagttgataatttcttcatatcctaaatagctgaaggacaactgccaaacatttaaatgatttactccagtgctgggttctgggagaaatagtgcattttgctaatgcatttaagagcacaacaaatgcctgctctcaggttggtcccatgtggaatacaggagacatcaagagaagaatacctaatttcttttttatttgttggcttactcatttgtgtataatgtactttatgaatgtgtatacgagggtatagggggacatgtgtgtgtgtgtgtgtgtgtgtgcgtgctcgagcacgcacatggaggccagattcctttatcactctgcactttccttccttccttccttccttccttccttcctttctttctttctttctttctttctttctttctttctctttctttctttctttgagacaaggtctcttgcttgtttgagctcaagagttcaaagctcaacagtttggcaaaagcagctgaccagagagctccagggattctcctgtattcacaccccaagtattagtatgacaggtgtggcactacaaatgcttatgacattctttctggccatatatcctctgccacaatctttccatctcctatcaagagagaggatctctgtctcctccccttgaatgcaggcagggcattgttacaaccttaagtatatgtatggcacttttactctcaagactcaggacgtagaaaatcttcgagcatgaaatacacagccatctctccagatgtttgcaatctaactgccatgctcataggaagcccaagccacacggagagctgccccataggtgttccagcccctagaactgctgacattccacccggcaggatcaatcaccaggcacataagcaaggcatcaagatgattccacccagcctttaagcctgaccagttgatgccaagtagagtgcagacaagctgtcctcattgagccttacccaaattttagaattgtgtgcaaaacatttttgttttcttcatgccactaagtggtttgttatacagtaatacataactggaacagagacccttttccccaaatttaaacagatgaaaacaattgagagcacaaatagaattcttgggacagaattgcttttaccaaatttacctgagaaacagcttggaatagaccagaaatatttgaaatatccacctcacattgactgtagagacgagaaagatgatgctttgtataacattttacagctctatgaactcaggtgggtatgcataatagtacccttgccccacaggttcttctgcctaattcactagaccccatagaatatgtcagtttgtatagtggtggtggggagtgaggagagttggggaaaccaggctaataagataagatgcacctgaattaagatggattaagaatgcacccaatagccgggcgtggtggcgcacgcctttaatctcagcactcgggaggcagaggcaggcaaatttctgagttggaggctagcctggtctacaaagtaagttccaggacagccagggctacacagagtaaccctgtctcgaaaaccaaaaaaaaaagacaacaacaacaacaaaacaacaaagaatgcacccgatagtcggattgggcagacttggattatatgggtgggctcaatgtcatcacaaagctgtaaagatgcaagaaggtactggggggggggcgtctagaagttagacatatcttggactgacatagaaagtgaaccccatcaagacccctgtgactgtaacatttcaccagacacccccccaaaaaaatcaggattttcttccaaactggggaaagcaaggatgctccagaaggaaggaatagccctgctaataccttggcctcagcccacctctaatctctagaactttaaaaggatagttctatgttgttgttgttttgttttgttttgttttggtgtacattcatgttttgtttgcctgtatgtctgtgtgagggtgttggatctgctggaatgggagttacagacagttgtgagctgccatgtgggtgctgggaattgaacccatgtcttctggaagaacagccagtgctcttaatcactgagccatctctgcagcccctctgtattgtttgaaaggactgaatgtgtggggattttgtctggaagcactaggaactgaaaatattgggcttctagcatatggccaggaagatgtgaatggacttgcttagactatcccttatttacctcaacagcattgcatcactgaagctttcattaaatataacaatattttatctctgtatttgtggttaagaacttaatttcatcctttcttttcttttgctccctttctaagttttctttttccaaaagattttgtgatattttgggggaggggttgcaccgagtttcgtcatttttattatcatataatttcatgtaataaaatgcacagacattaaacattcagctaaaaagtttagtaagcacattaagtcttactcaatatctccagcaaggtacagaacataaccatcacctcagaaagttatcccaccttacctctccatcaaggacctctcccgcaggcatccactttttttttttttttggtttttccaaacagggtttctctgtatagccctggctatcctggaactcactttgtagaccaggctggcctcgaactcagaaatccgcctgcctctgcctcctgagtgctgggattaaaggcatgagccaccacgcccggcggcatccacattttaatctctatcgctatagaattagttttgcccattcttaacctttgttgaaaaagaatcatagtgttctcttttgtatctggccacatctgagattcagccacatgtctgaatatattattaacagatatccattccgttaaaccacactgtgtgtgtgtagcttttaagaattagtcctcagcctggcgtggtggcacatgcctttaatcctaacacttgggaagcagaggcaggcggatttctgagttccgaggccagcctggtctatagagtgagttccaggacagccagggctacacagagaaacaatgtctagagaaaccaaaaacaaccaaccaaccaaacaaaaaagagttagtcctctccatcccatgtgcgttttaggaatgaaactcaattcttcaagtttgccaagcctttttacccactgagtagtcttgtgtgttccattgttccttctagttgcttactggtataccactgtataaatgtccgtgatttgtctacctagtctcctggtgagcactgaagcttacttatgaatttattgattttaattatatctgaataaaaagcaatctgatttaaacctttttaaaaataataaatacacaagaatgaaattgccagtacatagagtggatccttatcaaaagttgccaaagtgttttccatagtggttatacatttaaccctttcaccagcaatgaatgagagatcccattttccagtccccttttgatgagtggaagctgcttaaagctctttgctctcacagaatggtaatggttgtttggcttctgaccccaggataagggtctgaggtgcatcttttacataccaaagcagacctggcctccaggttctcccagcatgcctcagtccctacctgacataccctgttcccaaccctgaactttgcagcccagggagtgggttgcccttcccccaaagcctcttcactgtgttctctctctctctctctctctctctctctctctctccttcttcctttctctctttcctccccttcctcccccacccctcttctgcgtgcacagccctttctcactttctcctcagatccacttggcagcttccctggtcttcttctttggggccaatgaactcgcctgctggagggcaatttctcaataaaccttcctttaatataatctaatctggcttgaattggctcagttcaccagtggagaaataacctatcaatgcttacttagtactgagatgcagcataaataaaagcttttcatgcagcgtaaatgaaagctcacgatgagggtatcagaaatacaaaggtcacaataaaggaggtggttgtggcacaaggaagtagagggcaaggtggcactgagcagtaagagagaatccagtctttccaggcagaaaaattgaagtcaggcaggctcctctgttctttttgcttcctgggagagttaatcacattcttagcgcctcacttttctcttttgtaaagtaaagacttcttaaagggctgaaactccaattcctacaggcctgcagggagccgggaggctcccaaaagaactgtctgtattgtttcccatcccccccccccccccccccgcctctccctattgtggtttttggaagcagaataaacaggaagtggagtctgagggggaggagtagccgagag

SEQ ID NO: 677 - DNA, 1824 bp, Mus musculus
cggagcaaccacagtcgcccttactcacagtccgatcagtgaccgcagcagcgcccttgggcagccaccgtccgcaacgcaagcactgagaaccaggggatttcgcagtgcaagagcagaaaaaggctagacccagccacccaccgtcaatcctgagccaaagataagagcagccgggcctcacgaagggctgagctgagaaagaagcaagttagagagggcggagaaggatctgggaatcccgtcacaccggcttcaagcaggctcccggcatcagcctctgagagcgcttgaaggcggcatcgccagcggtctatctccgtgtaccagcgtccctgtgtttccgcgcccgctcggccaccatgatgcaaatctgcgacacatataaccagaagcactcgctctttaacgccatgaatcgcttcattggcgcggtgaacaacatggaccagacggtgatggtgcccagtctgctgcgcgacgtacccctgtccgagccggagatagacgaggtcagcgtggaggtaggcggcagtggcggctgcctggaggagcgcacgaccccggccccaagcccgggcagcgccaatgaaagctttttcgcgccctcccgggacatgtacagccactacgtgctgctcaagtccatccgcaatgatatcgagtggggagtcctgcaccagccttcgtctccgccggccgggagcgaggagagcacctggaagcccaaggacatcctggtgggcctgagtcacttggagagcgcggatgcgggcgaggaagatctggagcagcagttccactaccacctgcgcgggctgcacaccgtgctctccaaactcacccgaaaagccaacatcctcaccaatagatacaagcaggagatcggcttcagtaattggggccactgaggcgggggctgtccccgctgcccagcaccctctctcgggtcggctctaccacccctctctttcctccaagctattttcttcctggttgtggggcgcgaagggcacactgtaaagttgggctgtgtacttggtggggttagtgtggagaagagggcctcatcgcgagagcagaggaaaagtagtcgccagagaggggggttcaaagacccccggagggggcctactctgtgttggtgggaatggaactgggccgatgtccttcattcagcctgtgcctttcttggggtttcttttctgtttttctttccggaagagaagggcctgagaaagggccatgccagggcacagtgctgggttgccacacatgggagggcagcttctagccgggtgcttgggggaggcggggctcagcctcctgctgccctgccttgagctgccagaggaggccttggcgttgctaggattgcgtcagttttcctgtttgcactatttctttttgtaacagtgaccctgtcttaagtctttcagatctctttgctttgaaacttcgtcgattccattgtgataagcgcacaaacagcactgttggtaaccggtactactttattaatgattttctgttacactgtacagtagtcctgtggcaccctatccctttcacgccacccctcccccgcccgtgtgtgtaaactggcgatgtgccagctaggatgaagcttgccactcggctagcgaaaataattaacattattatgagaaagtggatttatctaaagtggaaccagctgacattatatctgtatcgtatggagaatgatgaagggctccactgttgttatatgtcttgtttatttaaaactttttttaatccagatgtagactatattctaaaaaataaaaacgcagatgtgtt

SEQ ID NO: 678 - protein, 182 aa, Mus musculus
MMQICDTYNQKHSLFNAMNRFIGAVNNMDQTVMVPSLLRDVPLSEPEIDEVSVEVGGSGGCLEERTTPAPSPGSANESFFAPSRDMYSHYVLLKSIRNDIEWGVLHQPSSPPAGSEESTWKPKDILVGLSHLESADAGEEDLEQQFHYHLRGLHTVLSKLTRKANILTNRYKQEIGFSNWGH

SEQ ID NO: 679 - DNA, 22951 bp, Homo sapiens
gcctcaggagctttgcagtggctattcccgctgcctggcctgctctttccccagataatcttcatggctcatgttctctcctccaatttataaattctttctaaatgacttgttcttcaaatgccacttttatcagcctatatagtctgagagatttaggctacaagtgttacaaatgttcagattatgtataattagaaatttgtggattatttaagaatgtgtgctgacatataaagtttccaagaggctacagtgagggcctcataaagaaagggaaaggaagaaaggaagaaagaaagacaaaggaagcaaggcaggcaggcaggaaggaagggagggagagaggaagaaagaaagaaagaaaagaagaaaggaaggaaggaaagaaggaaggaagggagggagggagggaggaaggaaggaaagacagacaaaggaaggaaggcaggctgtacctcatgtatccccaagtggaaaagtgaaagtagaaaagattcaaggtcccaatcatgattccacactacaaaagatagatgagctgcaaaaatatatagatatttattttcaatcacagttctcataaacagcatcatgatgcatattaatacaatatacattaaaaacttatcccagccaggcaacatattaatatttactgcttaccatgcacctgatattctacaagaagcacacctcatcttcaatttttccataaactctgcaaggtgaagacactgaggcttgcagagtacatgtcttctctgagctcacaagttaggaagtggaagagaggtaatttacatgggggtgaagggtatgggggatgggtctgactccagacattttgcttttttaattacactacgtgggctgccaccccatcctctcaaataagtagaatgtctgttagagatgatttacttctacctaattttgatattttaacacaaatctactcagatgttttatggcctttatatgaatgcagtcataattctagaattagtcacttactttggtgggtccgtttattaatttttttgttaatttattatattgccttagacagtatcttgtaggtgaacttgacctccttgtacatcttgcttttttgagtagattacagagcattccaaaataattaggggcttgggagtgcattatcttcccattcctcccatttcaacttttggcctttttgatggggaaagagaggggagaagcaaggaaaactgtttcaggaaggtagattgaaggtcatattctagaaggaaggcaaataaatacatcgtgcttgaataaataaaaaatagaattttgaatgaacgtgacattagatattaaaaacccaagccttctgtttttctgtcatggagaaattacacaaatggtacacagaagtgtgaagcacttgaaccaattgtttgaacacattaaaattatggtccctacagtaggtaaaaaacaacatttataaaagcagctgaactgaccatttttaatggcatccaatttgcttcaacctggatataacaggcaagaacaacatttataaaagcagctgaactgaccatttttaatggcatctaatttgcttcaacctggatataacaaagctgaatgtgctgtctgaaactaatttaattttttaatttaatatttcataaactcccaagaatcatcaatttggaatattctggattcttcctccaatgatttagataatctccttctagttggggagactaaatgagagtgatgtgttttaatacctggctatgctgctctttttctcttttacttatcagactttctttttctgcttcatatgatctgcaggaatagactttttgttaagtaaatcatggttgttctttctaaaacccaagatctaattactatgtgaatcacctcagcattcgtatttacatttactaatagtttagatcaagattggaaagatatttgagtctcttctatagaaactaatgaggtcattttgatagacaccatgtagcctcaaataaacatttatgacaaatattactgactgaaccctatgccacaaacaagcaccttatacttccggccaaggtaatcacccactttgcgcaaaataaaattatacaagacaccctgtgccttagagatggaaaatatatgtttccttgtttaatatattttctagaaagaaaatgatagttataataaagttcaaggtgtctattaatggcacacccataaatttatttccaaatttctattaattgtgaaaccatttaggaaacaaggaaattaatcatgtgccccatttgaattttggactgcccaggattaatgctgatctaaagtccaatctttgcaggccaaattgttaaagctaatctttgtacagtagtgtggttaaaagaatatacactatagataagcaagtatacctctgaccagacttagggtatagatgagggcacagggagactcctacaactccactaacatgattttttctacctttagtaaagagctactacagacttcgtagaaagtagagtagatataagttttccagatattttgaatcatcagctatagatcataataacaaaggtgaatagccatctatatatgtgctatgcaaatatacttttagaaacaatatttaggggggttacagaaaaacattgttttaatagaatttcctctccaagactaaagcttggaagctcccaacactggatttcttaaactgcagttgacaggagcagagagcaaaaacaatggtttctgccccaagggtccaaaatttggagagcttactactttcctattcccatttaagttgggttcacaaacgtttttatgcaaaaattactgagagcatttaattccaaaccaggtcactgcctcagactgttgactctctcaccccctctcttcacaccccctagaattttatgtgaatggaatttcaaaaaatttatttaagtataagatatatgcaaaaaagttcaaacataagtgtcagctcaacaatttttcacaagatgagcacacctgtgtaactagcgccttgcacccagatgaagaaaaagaacattatcatacctactactttaaatgaaatgttaaaattaattttacttgaaattacactgaaagaaatactgaactttagaaaacagactctttgctatggaatgtattagttcctaaaagatctctttaaattgagaaaaaatattttgtaaagttttaagatgtttgtgtctttagtttttaaatggcacaatttggttttaggcatcattgattgacctgctgcaatgaaagttggttagctctgctatttttcattcccccatcttccagttttgttgcttgcattattttttcatcttcagggtttaaaatatttacgttatattctgcaaccagtatccacactgttttaccttacttctgcatttaaattgattcaaactcactatgaatctcttcatcagggtttctccattcctggattactcatttaaattaattttttttgttgttggcaggcttctaccagtaagtttctcaagaaaaatcctgagttcatgtttgagaatgtctgcttattgttttttgcttgagtaatataatacttttgaatcatacattctttcttccagctccactgtctcctgtagtggaatgtttttgtaaagctggttggattctctcctcccctgagaccaccatctttttggtgacttcttttcctgcttggacacttgaaggctttttttcttcttctttgaagttgaaaaatacaactagcttgtttttcaactgttctgcataattttatctggtatatagtatgcttattaaatctgcagatgaatgcatcttgtcaaggaaaattttctatgttacaactgaatttcttctatttcacatgttgaggtctctttggaaacatcagttaagcttatattgtgtgtgtgtgtgtgtgtgtgtgtgtgtgtgtgtgtgtgtgtatgtgtgtgtgtgttttgagacggggtctcactctgttgcccaggctggagtgcagtggcatgatctcggctcactgcaacttccgccccctgggttcaagtgattctcctgcctcagcctcccaagtagctgggattacaggcatgcacaaccatgcccagctaaatttttttgtatttttagtagagatggggtttcactatgttggccaggctggtctcaaactcctgacctcaagtgatctacccacctcagcctcccaaagtgctgggattacaggtgtgagccactgcgcctggcctatattatgttgtctttgtcttctctatccaacatttcctctccattttctttcactcttttgtgtcttttcattgggattacctgaaccttttgccctatgccagtaactgaattttctggcatgcctgttttgttccttgtttggaattacatttattgactctctagtgatgtgtttggttcaaattttgtttcttttgctctgcaatatcctttttcaaatcttcctaattgtttattatttttctattcttatcaaggtcttctatagctggaaggacttgtaggttgtatttgcttctagatttacatcttttgtgtactaactctgtccagactgtctaatatgatgtaggtgaattcgccttgacttcattgtaccttgtctaggtctagtttttttattattaaggttggaagagtaaattatggaagacttgggcgtgtaactgttgaacccgtccattggataatgtatttatgacactgtagcttcaacaaaatgaagctacaacccatatgtatatgtatatatgtggatttgtaattaggacttgaacatatgaaatattgataattatgtgttttctccctaatttggtgttataatttgtaaactttgaatctaatttcagaatttaaactaaccaagctgacacattttaacaggatagagtgaagaaagaacattctcattcttccttctatgctgatggtacaagaaagtcctggaatcctaaggatctaggaaaaatcaacttgagaagtttctatgtggtaagaaaagctatgatgtgtcttgcccttttctcatctaccatattgaaattgaatgtacagttctgtatacggttcagagttcttaaagatgtagaaatgatgagaacataacaaaaggtattctttagtattctcaactttccctgtgctctacttcttccaaacgcaaggctaaagacgctttaaaaaatgagattgtgacaaaatgctaactacgacatattcagacattccaaaacctgaaagtggatctgaagccagcagattcactactcactgttcttaggttttggcatttttctgtctaccttctctcaactaaaccttcatgacggtttttcctgtaaggacaattacaataagatacactcccttccccatcttaactcagattattatgatgctatttctgcatttttgtatcatgtgatggtggtttctttgtggtatatgacaaaaatgcccttcttcttgactccacaggaagaaaactggctattagcttgggacttcagcaaggcacttagcaaggtctctcataatatcctgtggtcaagaagaaaaatataggctggatgactgtacaattaacatgattcatagctggctggaacaacttatgccaaaaagtgccaattaatggacggatatcaaactgaaggagctctccagatgttctacagcaatttgcctcttgcccagtggtgcctggtacctattatcaataacttggataaatatatagaatagttatcaaatatatgggtaagatccaagtgcattacagcacagaatcaggacccaaaataataaaacaggctgaactaatgggccaaatccaatgagataaagtttaagtaggataatataaagttctgtactttggtccaaaaaatccccactactcaagtatagggtacacaaaattttgttatatagatggcagcatatagatgtagctgttaaaataagtccattaaatgttaggcagcattataagcagtagctatctattgagtagtagaaagaacattggatttggcattagaaaactgggtcaaatcccagttctgacagtttggcccttaaactctttgatccttgctttcttctcagggtggttgtgaagttaaaatgagttaacatgtcttttgagttaacaagtctaatttccaagcacttgtgctcaataaatatgacctagaaaaattaccattcacaataatataagtggctgtgccactccattttgtcctagaaaagatggtacttggaatgagaggggccacactcaaaagcaaaccagagctacttctaaagttagtgactaggatggatgagcgactcaaaagagaacatgaagaatggctacaggaactggggataactgacttgaagaacagtagacttaaggagaccatatctaccttcaaacatctgatggtgtgcttcatggccttctgtagagctccaaaagatagaagaacactggagaacggaaaatagaagaatgtaggcaagggcgaccacttggtggggatgttgtgagcgatttcagcacaagtggatggttggactacatggcctttaacacgagagtctgactgtcatatttctaggacatttttcatgaaatggatccttctaagtctgtctcaaaataatccaggatctctgctatcttgggttgggctggcttcttgccttaaaatatcatctttcttccagttctaggccagatctcttctttatccagtctgactttcttgcaccagtttactcttgctgactactttgttcaggaatttctggtcacttttaaaatgtcattccccccccccaaaaaaaaactatccaagggacacagtacaaggataatttgtggacatttttggggagatgagccagcaaagcatgctttccaggttgcttaattaaaagagtgggaattaagaaccagaatttaagagttccggcagggcgctggtggcttacgcctgtaatcccagcactttgggaggccgaggcgggcggatcaagaggtcaagagatcgagaccatcctggccaacatggtgaaaccccgtctctactaaaaatataaaaattagctgggcgtggtggtgcgcgcctgtagtccaagctactggagaggctgaggcaggagaatcacttgaacccgggaggcagaggttgaagtgagccgagattgctccactgcactccagcctggcgacagtgcgagactccgtctcaaaaaaaaacaaaacaaaaaaaaagagatccagaattccagaattgcaactgtgaaccaagaagtggggatgggtacctcagacaaggcttttaccggaaatttagcatataggatagaaagcagagaccaaagacctcttgctttgaggctgttggcgtgctacaaggactcgaaagttatttgttcaacggatgacttctgttttctggaggcaaactgaattccgggcaggtggctcagcacctccagcctgttccagatcgggacagggaaggtgcctggggcaatcagtgaggtttccaaccttccttaggcctgggccagcccgctcccctcccatgtgaccccaggcaaccattttaatttttttacagccaagcgtagtggagaactggctgcgcgccggttgccagggacgcggcagccagcttggcggggctggggtgaaagaggacgctgcgtgggggagggctccgcggcttctgactggctggagcatcaggattcatttgcataatattttctgacggcttctgattggctgaagccagaggggcggtggtggggtgattccaagggcccagagctctggccggcggaccttttccttctggagtttccccggcgggtgtgagttgttgcggggtctgggggagctgggaggcccggtttgggaagttttgcaggcaggtgcatgagccatctttctctgaaagtgtttaagaaatgttcaagaacagcggccagagtcaagaaactgggggatgaagggttatctcgagactagacggaaggaaacgtatcaggggaggggtggaggccagaaggaaggagttaggtaggggccctctcccaagctggcgtttttgctgggtggaatccttttgctagatcccttggatttccgttttccgtgtgttatcacactgttggaactgggaagaagagaaaaagaggcaagattttggcatttagtaacttaagtctgaataccgagttttcatccgggtgcatacgtacttaaaataccaaatgggtccaggaagggggacaaagtacgctttaatttatgagaagatcagctactagaaactgtatatctgtttttctcgagttttcttcttgcagtgctctttcaatctcattggacatattttatattattttcctgcttaagcactgggggttgggtggaaggatctgtggctcatcataggcaatttccacacttttaaggtttctgactcttcacataaacacctctcactatgatgaggtcctgtatcaagtacaattaatctttgtactttacaatttacatagtgatttttatttacattatcatatttaaacttaatcaaagtccttggcacggcccatggaacaagctccatttttttgataaagaaactgaggctagaaaagtttctatgtgtgcagagaaggaaggtgaaattattttaatgcttcaaagttatataatgcttcctgcctccctgtatttttctttccattgatcttccttcaaaaccctgataggtctatcccagttttgcaagtaagaaaacatgggctgtgatgtagagctaatacgttttggggtagtgggtcctcagacttaggtctgtctccaagggtcactgactttgttttgttttgtttgttttttgtcaacagattagtccttgtggcaccaagtcagaatttcattcaaaagacaattaggaagatggttttctatggaaaatatttaagtgtaggtcttaatgtgaaagaaagagggagagaaagaaacccctttattatgttctcccttccttaggcattttttgtcccgtgggaaaaaactgtactagggacagagacctctgttaagttttagagaaaagggatcttttttttttttatttgagacagagtcttgctctgtcgcccaggctggagtgcagtggcacgatctcggctcactgcaactccgcctcctgggttcaagcaattctcctgcctcatcctcccgagtagctgggattacaggcgctggccaccacgcccggctaatttttgtatttttagtagagaccgggtttcaccatgttggccaggctagtctggaacccctgactttgtgatccgcccgcctcggcctcccaaagtgctgggattacaggcgtgagccaccgtttcaggccgagaaaagggatttaaaatgagaagcttgaatcttattgaacataattgtaggactgccagagaggactggtggatgaggaatatggcaagggacatgagatgggaaaaattaaataggctgtggtttggaagtctcaaagtgaaattcaaggtgcaaggctcttaaaagttaaatccagcgattcggtacatagcttaggccctattaaatgacccagtgctttaagaactatcttttgaaaggaacacttcacacaagcaccctcaaaaataattagacacctccccatttctctgttaaatggtgaaagacacccaagactagacctaactactgtcaccctctcctggcctcttggcagccaaaaggccacatggcccaggctctccagcatcactgtgtagccgacttggacaaaaatggacttctccccattgccacttgcagatctcttcaaagaatcagcagatctgatagtgtgcccctcttcatccccggcaaccactgttaaaggaaagattgggaaagatcccaccccgccaggagggaggcaaaagcctctgacgctcccctccccccatagctgaccaaggccagggccactgcgggagcaccgcgcgtccacgtgcacccagcatgcccggtcaccctttattacgtaagagtcccaggatggagttgtacctgctgccggcccctcttccccgacggctaataataaacccgggttcctgtttcccggccgcggccactccagattcggggctgaggggctcactctgcaaccaaggcacgtgcattctggtcatcccacgcggggagcgcgcgcaaggcccgcccagcccccacatgccagccccaccctccagtcggtccggacgccgacgcctttttgaccctcgctgtgcccggccctcctcatctggcctgcccagggcttggtgctggcggggtccagctgctccaatccctcctcctctgctctgccctgccctgccctggcctgccccggcgccctccctcagcccgggtatcaggcgagaggcggagctggcccggcgcgccccgcccccgctgtagaaagggccgggcgagtgttactcgcggtcatcccggcctgggccttttatctcggtgctgccgggggaggcgggaggaggagacaccaggggtggccctgagcgccggcgacacctttcctggactataaattgagcacctgggatgggtagggggccaacgcagtcaccgccgtccgcagtcacagtccagccactgaccgcagcagcgcccttgcgtagcagccgcttgcagcgagaacactgaattgccaacgagcaggagagtctcaaggcgcaagaggaggtgggtgcccacgccccatcgctgccccggccagcttggttgcttgagctcaggcttttcggagggagaagttgtggtggtggggggacacccttctccccgcggccgtaggtgggcgaggaggtgggactgcccagccgcggggagccacccaggcgccgtcccggacgagctgtagccagagaagggggtgcgcgcgggcaagggcgccaggccccctagcagggtgaataatctaatctgttctttcgtctccgtgtatcaaacaggccagggctcgacccacagagcaccctcagccatcgcgagtttccgggcgccaaagccaggagaagccgcccatcccgcagggccggtctgccagcgagacgagagttggcgagggcggaggagtgccgggaatcccgccacaccggctatagccaggcccccagcgcgggccttggagagcgcgtgaaggcgggcatccccttgacccggccgaccatccccgtgcccctgcgtccctgcgctccaacgtccgcgcggccaccatgatgcaaatctgcgacacctacaaccagaagcactcgctctttaacgccatgaatcgcttcattggcgccgtgaacaacatggaccagacggtgatggtgcccagcttgctgcgcgacgtgcccctggctgaccccgggttagacaacgatgttggcgtggaggtaggcggcagtggcggctgcctggaggagcgcacgcccccagtccccgactcgggaagcgccaatggcagctttttcgcgccctctcgggacatgtacagccactacgtgcttctcaagtccatccgcaacgacatcgagtggggggtcctgcaccagccgcctccaccggctgggagcgaggagggcagtgcctggaagtccaaggacatcctggtggacctgggccacttggagggtgcggacgccggcgaagaagacctggaacagcagttccactaccacctgcgcgggctgcacactgtgctctcgaaactcacgcgcaaagccaacatcctcactaacagatacaagcaggagatcggcttcggcaattggggccactgaggcgtggcgcccgtggctgcccagcaccttcttcgacccatctcaccctctctcattcctcaaagctttttttttttttcctggctggggggcgggaagggcagactgcaaactggggggctgcgtacgtgcaggaggcgcggtggggctgcgtggaggagggggccacgtgtgagagagaagaaaatggtggccggagatgggagggcccaaggaacctcctgggagggggcctgcattctatgttggtgggaatgggactgggctgacgccctgcattcagcctgtgcctttcctggggtttcttttctgttcttttcggaggagagggcccgagaaggggccataccagggcgcggcgctgggttgccacacttgggaaagcagcccggagctgggtgctggggaaggcggggcgcgtagcctcccgccgccctgcggttgggccggtggaggcccaggcgttgctaggattgcatcagttttcctgtttgcactatttctttttgtaacattggccctgtgtgaagtatttcgaatctcctccttgctctgaaacttcagcgattccattgtgataagcgcacaaacagcactgtctgtcggtaatcggtactactttattaatgattttctgttacactgtatagtagtcctatggcacccccaccccatccctttcgtgccactcccgtccccacccccaccccagtgtgtataagctggcatttcgccagcttgtacgtagcttgccactcagtgaaaataataacattattatgagaaagtggacttaaccgaaatggaaccaactgacattctatcgtgttgtacatagaatgatgaagggttccactgttgttgtatgtcttaaatttatttaaaactttttttaatccagatgtagactatattctaaaaaataaaaaagcaaatgtgtcaactaaattggacaagcgtctggtcctcattaatctgccaatgaatggtttcgtcattaaataaaaatcaatttaattgatttactagcaaaagtaaattttgtgttctctctggtatttcatggtggtggatattcatctgtgcaagtatttagctttgtttgggaactaggtactgacaaaatttacttccaaactttatttctaattcagtaccaagataagaccatacatctcaacaaaaagttcagaaatatttaaaatatttgggaaggtacatatattgtatctttcaaccaatttggctaacttattggagtgcgtaattaacattttgaattttttaagaagctcaagcacaagctaaagtgttttgaggcataaaaacaaggctgaaatttcacttggttactgagaagtgaaaattagaagggaagaccagctaatcctagtgcacacaccttacaggtttttatgtttatctgagtagacatttaaatgcattacaacatgatcgatgacttctttcactagttccaaaaagggctaagctttgttgagcggcgtccagtaatgcttccagtttttcagtgagccagtctgcaattgtggacagcagttctgatcaaggctgctgtggagcccttgggaatgcttaggtgccattatgatgctctgctgggatggtgggaaaggtaaaagaatgtgctctgcatattctttatttcattatttgttttggggtataaatgtcagatcaacttgttgaagtcatgaggcattctctaagctcgtagggcttgaatttaaaatacatataagttagcggtcttaaaaaacaagcaaaatgttttgtggtgctggcgggcaggggcagttcaagtctatcagcttttagcagcagtgaaaaaaaatgtggaagtgtcaagatgggtgcttgccagttgccagagaaagttaatctttaatttgtataaagataagctaggcagcaccaaaagtaaggcatacagcctcttgtctcgtgtcccctttaaaatatcaaagtgcaagcaaaaaataaaggaaactgaaaaaaagaaaaaagctgcatggtagaaacacaaagactttcaaagactttggagccagaaactgtgcaaatcctcttgctactaattgtgtgcatttaacttcatgcctgttgccacattagtaatcaggcataaaaataactacactgcttcatggagttgcagtgagaattaaatgagattatatataaagtgtttgaggcttaaaattttctttaggcactgctgaaatgctttacaagtttctctcttttttgatgtttacagtgattacatttatctaagcaactttcatacatgttcagttttaacatattgactactctgacaaatatgcttaaaaaaagcaataacattatagagttaatgcagagtcctaaggatagtctagtagccactaagttttttcttaagtcttcactttagatgctgttatttctagcacaagcaagcagagtctttcatatgcttacaccctggagtctttggttgctaccattatcagctggcttgcaaaccagaagccaaccattttaggaatgctttaagtgaacaacatgcaaaccccagggatggaaaaaaccctaagaatgcccaattatgagcatttacaaccatcacaactgtggctgaagactatgcccttctgaaatgagatcttaaagcagtatagtttgaaacaaaaggttttagcaaaaaaatgacatatgcacaatttctccaccactttgtgtgagtcaaccatttagttaacttttccacttgaaaaaatgcaatagaaaaccggacaccatgtttcactatctcagttaatattcacaattacagtggctacaactcggaaacggcatcaccaatgctgcccagagtcactttatattgaaattaagttctttacaccaattaaatggttgtttacaaccactggctagtgtacacaggaaataaaatttctagattggggggggaaacaaatgctgctccaatcatctcctctgctgcttctgttcctcaattcatgcttaaaaacctttcatgttactcttggttttgtccgtttgcttgcctgtgggggtttgggcctgctgacctgcacatttctctcttaaactaaatgttgtttcgtgtctccatttctgcccccaccctacattcttcgtgaatatatgaggcttaggacaatatgtccattttaaggaaaagcataattttaattacatacgtgaagcaacaagtaaattatttcctttctcaaagccatgaaggagaacttgacttaaaaccaaaaataaataaataaataaaaattaaaaaatcacagtttgggcaagtgatagcaagaactttggggacattcactgaaagttgtttttggaatattattgcagtatatataatacagaaaagtacatgtagatagaaaaactaaactctaaagagttatcaattattaactttatttttgaaaatatttcttcatgtaagagactttttatatataaacagtgattctgacctaggagtaatgatgctcgctgttaaaagagcattgggatatttatgaaccaataaggtttccgggcccagtaagtactattccactagtggtaactactattttattccagatcagtttgtgaaacaaaattaggacaaattcccaaaagatttaccagttaaaacttcgcaagctattgaaaattttgcttaacctctgaggtaaacaataagtgacttcatattttcagaaggtctttcctgaggaatctcaaagtcacttatagattttacgagttgaataaagttgaattttaagaatcgaatacaatgtgtggcatacccctcagagagctctcagagatactgttgctctctgacagtgcccatctccatggcagtttatgactaaagggaaggcacagatagatgaactgggcaaaaaggaacagcttagattgcaattgattaccctccagatatttacatttgataagaatgtaagaattttttacatcaaaatcttgtaccaaagcttctgagaaggcctggttttgcccctaaacacagctttctgctttgttcacatggggaatttcatgttttacatttatacaatgtttcttagtggtctggcctaatttactctttctgtgaacctgaaaacagtttgttagagagcatgccataattactcttttgaccaacttgaaaactagcctgctgttgacaatttttttaatttttaaatgaaggttattggcatttgcatatgcctcatcatttccccttatttttagttactgagcaaaaatcatttgaaaaatagtgcctctcctctctccctttctctctctttctctctctttgtctctctccctcccccggtcccttcctccctctgttctgcattgccaatggttctcagatgtttgcaaattggacacagttctggtggattcagagctcaaatctcaaacaatgtacctttttccccaaagctatttatcttttgatggtacatctagtacatttttaccaatcattgcatctttctttgatttattttgaagagttttggatacaataatgacagaaggaatgttttcttttaaagttttggagataatgttttgctcccaactaataaaaaaacttgattgcaagtttttgaaaactctaaagatgtagcatattggatttgtttcttaaaattaattactagtctttttaaagttgataagtttatgtagcttctaatcaaggctaaattgcttaattactaaaataatttaaacttaaaattatttattttttcttttaaggccaggcatagtctttttttttttttttaataactcaaggaaatgtaaagattgttcttgagtcacttcaaacactttcactaggcctctagctagtttacttggagctgtgtagtactttctgataggtggtggacatgatggtaatgtattaccaacaactgtttttgtctctgaaaactagtattatcttttgactcatgcaaatctcatgcccaggactctccactatacaagaccccaactctgactgtcgtaaggccttgccactctccatggggcagaaaatcctcagagccaaaggaatgtccagaactgtgtcccgacttctagaccacactctgggcacttggatacccagagttccctgtccaaatggctctgatcccattccagggatttcataggcatctgtcctgggtgtattctccagtggtagatgagctgctgacgtgtgcacccctaggcctggggcttggtggggagctgtggatggagcttggacatgcagactgggctgtccatatttgtgcatacaaggccttttgtggtgcagaatggatcttttggtaggaagataaggagatggagcagaggctggagattcctgttttgttctcttgccctatctccctgagtttcaggacaaacaaaggggttgaagactgcagaaaggaaacaagagcagctcaagctttaaggtcttttttggtttcaacaaatgaggattccatgctttttctccctattgcccacatacctcaggagtcaccttgctccactgaagaatcatatttaattaataaaatgttgattgaggaaaataaaacccacatctgtatacagaactcttccagctgctattcagtgcttgaatagtggtgattgcagcaaaggtagttattctggactcagatacatcttccctacaaccacgaggatttcacctccccaaatagtctttcatcttttttctttttttcttgattgagttagctgttttctttttgtgttaaaagtcttggtcaagttaaagcagaaaacggagagttgtgcatctgtctaaagaaatcccctaaaaccacgactatcttatcaatccttcctgttttggcattctgtactttaaagagaaacatttttttttgtaacttccactgctttttgttatattttattacttctttgtctattcttccagaatgctttgcctagcagttttcaaaacatatctgccaaggtgcccaatttgaataatcccaaactggtaagaatttggattgtagaatatcctaatcacctagttaagaacaggattgcacatgagaactttctgaccttggactgtctagagaacactttctccaccatggttacatgcacggtagataataagactaggaaatcactagcaaaacatagaaaccagttctttattttacctagcacaataaacaatgttggaggtggggcattttctaaaatctattttacttttcaatatcaatattactggtgttgatatgtgcacttttatcaatgagcattcagttgaaactggacatgattcatttgatgttgtcaaaaatagaaactaactttgtggggttgtttttttttttcctccttttgaataccacactgctgaggtaaagaatgtcatagcttgtgggcgagctcagtagggccaattaaaacctggctactcttccaccattttgaaatacctgacagaacttgctggggccttgtttctcccttcttagatacctaattgaggagatttcctgtttggtagtcaaggaaagatgaaaacgaaagtaccacattgctggttctgaccaaggtatttaaaattgtccagttgttcacaatgcaatattaattttaaccctgctttaaaaaatgaaatgtagacattgtgaaagaatacatacatgttctatagtagccaaagtatgtgtagaatgcaaggagcgtggttagtgtagattagtcattcaaaagaaggtgtagtattttataacatctaattgacattgcagcttataactcacagatgctttgaggatataattttgtttctgttgtgataagtgcttgttgataatttcttcatagcttaaatgtttttagggaagtgccaatttagatggttaagtcttgtgttggggtctgggaggaatctcaagaaccagcagcccttttcttctagtgggtttgggagcagaagaaaatgcctgctccctgcagccatattggctccatgtggaaaaaaggaggcaccaagacaagcctgtctaatatagtctttccaaattttccagatgtggttcttcactcccccatcctgggtcagtgtgagtaacaggagtgatggagaaaggcaaaatatgtttcaggacattcctggccattggaaacctgaagagtggggagaaattgttctcttctgatagccagctgtgatacctttttctctgactcgaaaggcaacaaatattaagtagaagcatatgaaattgccatttttgttgatcaaccaacatggtcattttgttggtcaaccaaaatggttgaatgctccctgatttcagcagttagatacccctcttgtgggtgtgctatagtattttcccatcattttatgaaactatttttcactaactcagagttggcctgatgttgaggtagaaggggtaggggacaaaaggagatagggggtggggcagggaggatattatataaaggagacaaatagaatggaagaaagaggaggatatacagataaagcgagggaatgaaaaagtggcagagagtctgtggcaaattgtattttctaaaactggatgcaaagttatttccaaccctacatgtacttctacaaccttgccaccttccttcaagaggtagaatctctgtctccaccaatcaaatttaggtggggctttgtgggctgtcttgacaaaatgaatgtggctgtcacttccaaggccaggctataaaaggtggtatatcatcctcttgtatgagatgtgtgactcaatattgagatgctggctcttggaacccagctaccatgctggaggaagcccaggccacatagagaggccacctgtaggtattccagcagactgcaccactgaggtcctagccaacaggcaccatcaactgctaaacatgtgaggatgccttcaaatgattctagcccccagctttcaagccaccccagttgatgccaagtagaacagagacaagctgtccccgttgagccctgcccaaatttcagacttatgtgcaaaatatttttattctttaaaccactgagtggtttgttacacagcaatggataactggaacagagacatttttttccagatttcaggagagtgtagaactaaatggaaacaattgaaagtagaatgtaatctatggagcaggatctgttctatctcatttacctgagtagccacttataataaacctggaagctttggaaacatttatctaatggctggcattgagaacagaaggatttgaagtgatggatgatgagagaggtgctcaaagtaacattttacaatgctgtgaaaactcagcatggtaggcagaataatggcccaccacagatgtccatattccattcactggaacctgtgagtatgttaccttgcgtggcaagggataattaaggttgcagatgtgattaaggttgttaatcgcctgaccttctgatagggagatcatcctggattatggccttgtatgggtccttgatggacccaatgtaatcacaaagtcctttaaaagatggaagtaggaggcagaagagtcaaaatcagaaggatgtagcatgagaatgactccatttgccatttctggctgtgaagatggaagaaggggccatgagccaagaaatgtaggcagcctctagaagctggaaaaggcaagaaaacattctcctcaaagccttgagaaggcgtgcagccttgccaacaccttgattttagcccagtgagacccattctagacttctgacttccagaactgttagataataatcttgtgttgttttaagccaccatgttagtgagaatttcctgcagaagcaataggaaacttattttagttttctattggtatctagcatatggccaggaaacaaaaaggttatatattcttggcacctaatccatttgttgccttttggatggttaaaatagaatttctagcacaacaacctattgaaacagtactaaaaggtcctttttgtcttgttttgtgaaggaaacttgatttttcttttaagctctaatcttggtgacagtggctctgcataaaaagatactacttatggtgctgtcattgtattactaaaaaccttgcttcaaatatagcagcactatttattatgtatttgtgattaagatcttagacccaacttctctttcttcatgcaccattcttacttctttcctttcaaaacattttgtgattcttttgtgtagcatttatttctgtagcctccatttcattattatttttgttttttattgccatataattgcacataataaatgcacagatattacatatatagtttaagttttgataaatgcatacagccatgactaacacctcaaagtacagaacataaccttcactttaaaaaagttactgcatctttctttctttctttctttctttctttctgtctctctctctctctttttccttcttcttttcttttttttttcttttttcccgagatggagtctcattctgttgcccaggctggagtgcagtggtgcaatctcggctcactgcaacctcctcctcccgggttcaagcaattctcctgcctcagcctcccgagtagctgggattgcaggcatgcaccaccacgcccagctaatttttgtatttttagtagagatggggtttcaccatgttggccaggctggtcttgaactcctgaccacatgatctgcctgcctcggcctcccaaagtgctgggattacaggcatgagccacgcgcctggcctttttttttttttttccttttttttttttttttttgagacagagtcttgctctgtcacccaggctagagtgcagtggtgttacctcggctcactgcaacctccgcctcccaggttcaagtgattctcctgcttcagctccccagctggctgggattacaggtgcccgccaccacaccctgctaattttttgtatttttagtagagacagggtttcaccgtgttggccaggctggtctcgaactcctgacctcagtcagggtgatccacctgccttggcctcccaaagcactaggatttcaactgcacccaaccccctcatgttcctttctgatcaatcatcctcctcaccccatctcccacacaaccactgttctgatttttatcttcatataattagttttggcggttcttgaacttcatattaagagagtcgtacagtgtgttctctttgatgtcttgcttctttcacttaacataatatttttgagatttacccatgttctcgcataagtcagtagttcattcctttttattgctgagtagttttccattttataaacgtccatgacttgtttattcattcttttgttgatggacattaaagttgttttcatttttttttttagctatcatgcacaaagctgtaaataatattctagtgcaagcctttcttttttgtttttgataaatgcatagaagtgagattgctagttcaaaagataggtatgtatttaactttataagaaacttctttaaatgaaaaaccttacacaaattaaatttagcagagtttaattgagcagagaatgatttgtgaatcaggcagcccctgaaccagaaagggttcattcagagagactggtgcgctgccgagtggttgaagatttgtggacagaaaaaggaaagtgatgttcagaaaatggaagtgaggtacagaaacagctggattggttacagcttggtgtttgccttatttgagcacagtttgaacagttggccacctctgattggccaaaactcggtgattggcaggagagtaggttgcagtcagtttacacatcca

SEQ ID NO: 680 - DNA, 2682 bp, Homo sapiens
cagatctcttcaaagaatcagcagatctgatagtgtgcccctcttcatccccggcaaccactgttaaaggaaagattgggaaagatcccaccccgccaggagggaggcaaaagcctctgacgctcccctccccccatagctgaccaaggccagggccactgcgggagcaccgcgcgtccacgtgcacccagcatgcccggtcaccctttattacgtaagagtcccaggatggagttgtacctgctgccggcccctcttccccgacggctaataataaacccgggttcctgtttcccggccgcggccactccagattcggggctgaggggctcactctgcaaccaaggcacgtgcattctggtcatcccacgcggggagcgcgcgcaaggcccgcccagcccccacatgccagccccaccctccagtcggtccggacgccgacgcctttttgaccctcgctgtgcccggccctcctcatctggcctgcccagggcttggtgctggcggggtccagctgctccaatccctcctcctctgctctgccctgccctgccctggcctgccccggcgccctccctcagcccgggtatcaggcgagaggcggagctggcccggcgcgccccgcccccgctgtagaaagggccgggcgagtgttactcgcggtcatcccggcctgggccttttatctcggtgctgccgggggaggcgggaggaggagacaccaggggtggccctgagcgccggcgacacctttcctggactataaattgagcacctgggatgggtagggggccaacgcagtcaccgccgtccgcagtcacagtccagccactgaccgcagcagcgcccttgcgtagcagccgcttgcagcgagaacactgaattgccaacgagcaggagagtctcaaggcgcaagaggaggccagggctcgacccacagagcaccctcagccatcgcgagtttccgggcgccaaagccaggagaagccgcccatcccgcagggccggtctgccagcgagacgagagttggcgagggcggaggagtgccgggaatcccgccacaccggctatagccaggcccccagcgcgggccttggagagcgcgtgaaggcgggcatccccttgacccggccgaccatccccgtgcccctgcgtccctgcgctccaacgtccgcgcggccaccatgatgcaaatctgcgacacctacaaccagaagcactcgctctttaacgccatgaatcgcttcattggcgccgtgaacaacatggaccagacggtgatggtgcccagcttgctgcgcgacgtgcccctggctgaccccgggttagacaacgatgttggcgtggaggtaggcggcagtggcggctgcctggaggagcgcacgcccccagtccccgactcgggaagcgccaatggcagctttttcgcgccctctcgggacatgtacagccactacgtgcttctcaagtccatccgcaacgacatcgagtggggggtcctgcaccagccgcctccaccggctgggagcgaggagggcagtgcctggaagtccaaggacatcctggtggacctgggccacttggagggtgcggacgccggcgaagaagacctggaacagcagttccactaccacctgcgcgggctgcacactgtgctctcgaaactcacgcgcaaagccaacatcctcactaacagatacaagcaggagatcggcttcggcaattggggccactgaggcgtggcgcccgtggctgcccagcaccttcttcgacccatctcaccctctctcattcctcaaagctttttttttttttcctggctggggggcgggaagggcagactgcaaactggggggctgcgtacgtgcaggaggcgcggtggggctgcgtggaggagggggccacgtgtgagagagaagaaaatggtggccggagatgggagggcccaaggaacctcctgggagggggcctgcattctatgttggtgggaatgggactgggctgacgccctgcattcagcctgtgcctttcctggggtttcttttctgttcttttcggaggagagggcccgagaaggggccataccagggcgcggcgctgggttgccacacttgggaaagcagcccggagctgggtgctggggaaggcggggcgcgtagcctcccgccgccctgcggttgggccggtggaggcccaggcgttgctaggattgcatcagttttcctgtttgcactatttctttttgtaacattggccctgtgtgaagtatttcgaatctcctccttgctctgaaacttcagcgattccattgtgataagcgcacaaacagcactgtctgtcggtaatcggtactactttattaatgattttctgttacactgtatagtagtcctatggcacccccaccccatccctttcgtgccactcccgtccccacccccaccccagtgtgtataagctggcatttcgccagcttgtacgtagcttgccactcagtgaaaataataacattattatgagaaagtggacttaaccgaaatggaaccaactgacattctatcgtgttgtacatagaatgatgaagggttccactgttgttgtatgtcttaaatttatttaaaactttttttaatccagatgtagactatattctaaaaaataaaaaagcaaatgtgtcaact

SEQ ID NO: 681 - protein, 183 aa, Homo sapiens
MMQICDTYNQKHSLFNAMNRFIGAVNNMDQTVMVPSLLRDVPLADPGLDNDVGVEVGGSGGCLEERTPPVPDSGSANGSFFAPSRDMYSHYVLLKSIRNDIEWGVLHQPPPPAGSEEGSAWKSKDILVDLGHLEGADAGEEDLEQQFHYHLRGLHTVLSKLTRKANILTNRYKQEIGFGNWGH

SEQ ID NO: 682 - DNA, 2129 bp, Homo sapiens
gtccagccactgaccgcagcagcgcccttgcgtagcagccgcttgcagcgagaacactgaattgccaacgagcaggagagtctcaaggcgcaagaggaggtgggtgcccacgccccatcgctgccccggccagcttggttgcttgagctcaggcttttcggagggagaagttgtggtggtggggggacacccttctccccgcggccgtaggtgggcgaggaggtgggactgcccagccgcggggagccacccaggcgccgtcccggacgagctgtagccagagaagggggtgcgcgcgggcaagggcgccaggccccctagcagggtgaataatctaatctgttctttcgtctccgtgtatcaaacaggccagggctcgacccacagagcaccctcagccatcgcgagtttccgggcgccaaagccaggagaagccgcccatcccgcagggccggtctgccagcgagacgagagttggcgagggcggaggagtgccgggaatcccgccacaccggctatagccaggcccccagcgcgggccttggagagcgcgtgaaggcgggcatccccttgacccggccgaccatccccgtgcccctgcgtccctgcgctccaacgtccgcgcggccaccatgatgcaaatctgcgacacctacaaccagaagcactcgctctttaacgccatgaatcgcttcattggcgccgtgaacaacatggaccagacggtgatggtgcccagcttgctgcgcgacgtgcccctggctgaccccgggttagacaacgatgttggcgtggaggtaggcggcagtggcggctgcctggaggagcgcacgcccccagtccccgactcgggaagcgccaatggcagctttttcgcgccctctcgggacatgtacagccactacgtgcttctcaagtccatccgcaacgacatcgagtggggggtcctgcaccagccgcctccaccggctgggagcgaggagggcagtgcctggaagtccaaggacatcctggtggacctgggccacttggagggtgcggacgccggcgaagaagacctggaacagcagttccactaccacctgcgcgggctgcacactgtgctctcgaaactcacgcgcaaagccaacatcctcactaacagatacaagcaggagatcggcttcggcaattggggccactgaggcgtggcgcccgtggctgcccagcaccttcttcgacccatctcaccctctctcattcctcaaagctttttttttttttcctggctggggggcgggaagggcagactgcaaactggggggctgcgtacgtgcaggaggcgcggtggggctgcgtggaggagggggccacgtgtgagagagaagaaaatggtggccggagatgggagggcccaaggaacctcctgggagggggcctgcattctatgttggtgggaatgggactgggctgacgccctgcattcagcctgtgcctttcctggggtttcttttctgttcttttcggaggagagggcccgagaaggggccataccagggcgcggcgctgggttgccacacttgggaaagcagcccggagctgggtgctggggaaggcggggcgcgtagcctcccgccgccctgcggttgggccggtggaggcccaggcgttgctaggattgcatcagttttcctgtttgcactatttctttttgtaacattggccctgtgtgaagtatttcgaatctcctccttgctctgaaacttcagcgattccattgtgataagcgcacaaacagcactgtctgtcggtaatcggtactactttattaatgattttctgttacactgtatagtagtcctatggcacccccaccccatccctttcgtgccactcccgtccccacccccaccccagtgtgtataagctggcatttcgccagcttgtacgtagcttgccactcagtgaaaataataacattattatgagaaagtggacttaaccgaaatggaaccaactgacattctatcgtgttgtacatagaatgatgaagggttccactgttgttgtatgtcttaaatttatttaaaactttttttaatccagatgtagactatattctaaaaaataaaaaagcaaatgtgtcaact

SEQ ID NO: 683 - protein, 183 aa, Homo sapiens; identical to SEQ ID NO: 681

SEQ ID NO: 684 - DNA, 109782 bp, Mus musculus
  misc_feature (1)...(109782): n = A, C, G or T/U
ctatttacctccaacttttctcctctttagcaaacattagttccaccctcctcctttttatatatctcctataactggaaatatataatacatgatctttgtaactggctttgttgcattagcttagtgctgcaaggtttctctactcatccagtgttgccaatgtctctgctttttttctcaagtcccattttagtagatacagacccaaatatttaaacatgagcatttttggaggaagagtaagtagtgatagcatttaaaaatgattgtatttctcgctctctctctcaaacacacacacacaaacacacacaaagcatatcccataaacaaaatgggaactgctaaattcaccaaaatgtgatctaagcatgctcaagaattaaacaatcaaatgtaactgatgaaccatacctgtttctttaagagcctgcttagtgatatggaccatgagaatcatcttcatgggttttattttttttttttttaaatctttttttttttttttttttttttaaagatttatttgttattatatgtaagtacactgtagctgtcttcagacacaccagaagagggagtcagatcttgttacggatggttgtgagccaccatgtggttgctgggatttgaactctggaccttcggaagagcaatcgggtgctcttacccgctgagccatctcgccagccccttcatgggttttaaaatgtactttacattttattctgaagactcttcatcgtatctctggcatttctttcttttctgaaaacctctaatatttgaaagtaacattctgatgaagatttcatgttaaatatttcaccaaaaagaatactttataacctagactcacaagatgatgaataaggaggagctagcatattcacctaccaaatcctccttgcaagttacagtcctgttcatgcttattctagagccaaaatgtaatcctagcaccgaggaggttcaacaaacagtatcatcttgagtttcaggctaacctggtctacactgcaaggctgaatttcaaaaatcaaacaaatgaggtcagtaagatgcctcagctgcccagcctaaggatgtcctgaattccatgcctggaaattatgttgagaggagagaaccaagtcctggtaaactaaattccataggtagtcattgtgcctatgaactggtatgcacacttgctctcctaagtaaacatacagaaataatcaatcacacgtatttttctagcagatttttggatgggttgttttggtggccataggggttagttggtgaagagaaggcaattttcattctactgatgtaatttggcttcttaatgcaacccagaacctggactgagttaacaatgtaataataataacaacagcaacaactattattattgttgttattattaactattattattattattattattattaaataaaacaattctaagcatagtggcacatgtctttaatcccagcatgcaagaggcaaagacagagagatctctgagttctaggtcaatcagggctatgtagtcagaccctgtttttgttttattttgttaagaaaaaaaggggggagtttaaaacataaagaaataaagatgaaagcaaaatgcagcatgtgactttattacatagaccttgtgagataattattaatgctatatcaaaaacatcacaaaaattgtctagatagataaaagcaaaatagtctgtaacttggtgttaaatgactataagacaagagagcctttttgtttctaccttaaggatacccaatatagtccccacccaacactggaaatctgtaggagattgattcttgaactccaatgtgtgctaaagttccttatattggaatgcatttgcacctaacctatgtgaatccaatactatactttaagtacatgactttgaatggctattacggtgttaataccggcgaaatttagaaatttagaatttctatttagaaaacaatgttgacaaggaaaaaagtgtctatgtgatcagtaaaagatagaataaaaaatattttttggtcacagttgactgaatttggcacataggaggaggcccactacccatggtaatttatcttttcaatagattaagtagatcgatctttttacccattgatgttatcagtggtcctttatttgggcaaatccttagcttttgttttgcagatagcgacccaggagccctaaaagaaagcccaatcccagaaacacctcaaaacaccttttgttttcttcacaagaggacttttttctttttgcttctttttagcctttaatgctttgccctctttgcaaacctccttaagcctcacctcacaaaggacccagccacttgggggcttcagccctattatcttcaagcacttttcataatccgaacaacatgccttcaatatatttttatcttgaactattttcttattgtttcatttgtgttaatcttgccattagattacaacttgtgctctgcaaatatgcttttcctatgctgcttaggataattcaaggccagtacctaacagatactttaaaagaatagtaataaatgtattcattcattcattcattcagttagttagtttattgagaggaacgctttgcccaagctggtctcaaactctcatggcttctacctgaagcatccaaaaccctgaactcacagatatctagcacctaagtgaatattttaacagacaaggaaaacaaggagcatagggacatttgtgctttttttcccattaatttatttattcactttacatcccaatagaagccctcctcctctcctcccaatcccaccctcacaaccctctccccaattcctacctctccttctcctctgagaagggaatgcacccatgggtacctgacacttgaatttttaacatgtccagtgctgacagtgacttcctgtgaagctatagaaaacagagctaatgtacgtttacaatgctcaaatcctatcaaatacatttcaatccacttttgctttttattcttattttcaatgaaattttgacattgctgtagatatgtcttactaatttctttctgacaaagtcttcgtgaaacaactggcctgccttagcaaacattaagactcagattaacctttgcagctagaaaaacatttcataagtgcttattcaaaaaattagcatgattcacatatgagtttattttgagttggaaatataaaaaaacaatcctcaataagcaataggaatgattatcgaaatttttgctccctggttcaaaaatttaaagaacttcttagggctatcaagatttcctccttgaactgcaaccctataggtggaacaacaatatgaactaaccagtacccgggagctcttgtctttagctgcatatgtatcaaaagatggcctagtcggtcatcactgcaaagagaggcccattggacttgcaaactttatatgccccagtacaggggaacaccagggccaaaaaggggcagtgggtgggtaggggattgggggggggggtgggtatgggggacctttgggatagcgttgaaaatgtaaacgaggaaaatacctaataaaaaatatattttataaaaaaaaaagatttcctccttgactaacattttaattatatgagaagtcttttaaatcatacatcattttaataaaaaattatgtcataacatgttaaataaaaatgaggaatcaagggtcagtccaaggatctaatgcaccatacccaaactacaattatcatgtaaaatgtaatttaaaaaataatgagttctggcttgaaaataaattgtgaggtagatacaataagttaacaaaattgaggctagggctgggactgggattagaactacagtgcttgtctacctatactcaaagcctcaagttcaatgcctagtaaaggtggatcatactcatttacacacacacatacacacacatagtcacatatagatacatatactcacacatacatacacacatagtcacacatactctcacacatacacatacacacacataatgatacacatacacacacatactgacacatatatcacacacatacacatacgcatacacacacatatacacacacataatcacacatagtcacacacacacttacatatactcacacacgtatatacaccgacacacatatactcacacacagacatatcaaacacacaaacatacatttggtcccacatatacacacacatgcacacacatacttacagacacacaccatgtaactttaaaaccagtaagtaaatcagtttgatattaagctgatcaagattcttttaagattttgttatttaaagtttgtgtgatcaaatcacattatgataacatataagaagaatagtatcattttcttatttttttactagttttaattttttaatatttattaatttattgtagcagggcagtgctggcacatacctttaatcccagcacttgggaggcagaggcaagtgcatctctgtgagttcaaggccagcctggtttccaggacagtccggactacacagagaaaccctgtctcgaccccccaaaaaatttttttaaaagatgtttattgtgtatgagtatgtgacaagctcagttgtttgtgcacagtatgaccatgaaagtcagtgggcatcttcttcttctatgagaccatgtgagtctcagggatcccaggcaatttgtcaaatttggtagcaatcgcctttacccactgtgccataatgttgccagacatattttttaattaattattttttatattttattttattttggttttttttttggtttttttttgtttgtttgtttgttgtttttgtttttcgagacagagtttctctgtatagccttggctgtcctggaactcactctgtagaccaggctggcctcgaactcagagatccacctgcctctgcctcccaagtgctgggattaaaggcgtgcgccaccacgcctggcttttattttggtttttcaagacaaggtttccctgggactaaagacaagtgccaccttacctggctaatttatatttaataacaaaataaaacatagtaatacagaataaaactaacaaacacatcagaatagaacaaaataaacagataagaaccctcggagagtgagaaaacctcaggctcctaacctgtgggttagactgaaaaagttgagagaatggaaatacacaagtagaaaggtcaagagaaaggtcaactggacagagagagagaacaccgaaaaagaaattggatctttttgtgagcttcagggaggacaggaggacatgctttcaaatttttgtgatatccattttaagttacttatcataaagctgagatggatagaaaattggagtcagaaggacagagctaaaaccatttagattattgattcacaaggtcctaagagacctctatctagcctttaccttactagtgttttacaagaataaatccataaaataaccattagttcaataaacattcagtgaacttctacataccagagtactttgtaaggtgctgttaggatggattagagcctataacttgcctgtaagcaggggaggggacaccaaagatcaccagggcatgctgatttacatagataagaaaaccaccaactttagtttaactctgtgaaccatcctttctgtgttaaatttcctttgttggcataaaggaatgcagtctaaatacatctctgtgggtacatgggtgcgtgtgtgcatgcgtgcatgcgtgctgctccttagatccaaatgctaaactttgaaaatgactttgaaatgaaaggtagccaggttatatctttggctatcacgcagctcattacaaaggagttccaccagggttatactgttgggctagtcaaacaggaatctcaactacaatccaaaagtgtgcttctgtgcgaaaggcacacattatctcttggaaagttactgagataatgaggtagcacggttttaaaagtatgcactgctaaactagcattaaagactgatgtttggctgagggttttttttttttgaagggggaaggctgttttgggtgctggggattgaacccagtgcactattccgtgtgggcaagcattctaaaaccgagctacacccccagctcaattgtttgaactttgagatctttagtgctgatggaaactatttattagtagaaacacttggagacttggggaaaggggtctgggaaagtaattcagtgcctggcaaacctgaggactggagttagaggtgagagagagagagaaagagagagagagagagagagagagagagagagagagagagagagagagagagagagagagaaatgaatagctggggagatagctcattggataaagatcttattggtggaatcagcaaatacctgaaagtcctggtggccacctataatcccagtactcaggaggcagagacaggatccctggggaaaactgcccaggagtattagagtattctggttcagccagaaaccttccatccttaaataaggtgaaggtaatggaggaagacctctgaggccaattttaggcttctgcaccgacatgcttgcacatgaacccaactacatgtgaacactcagacttacacacaaaccacacacatatattcagaagaggaacacaaagtgtgtggccccatctcttttttaaacatataattatatttaactctttttttccgattaatttatttattcactttccatcctggtcgtttcccactccttccagacaccctctcaccatccctcctgcactcagggtggtggcaccatttcttaaagaataccacctggggtgatcctctgacctccagacttcctggcacacacatgcattcatatgaatacatacatgttcacacagagacacacaaaataatgaacatgaacaaaatggtgcttgttttgtgttcttttgttttgttttacagggtcttaagtatcccagccaaggatgaactcaagcctcctgcctgtctcctaagtgttgtcatttcaggcagagatcgaacccagggcttcacccatgatagacaaacactttagaactatactagcttcctgtctacaggaaggattttgtttgttttacattctgaaaatgggttttccctctgtagcccaagctggcgtctgcctcctgagtgctgggattataaataagtgcggtcattctacactgcagaattgttacaatctagcttattttactttacatttaattaattaattaattagttaattaattaattaaacatgtgcctatgcagggctcataggggctcacagagagagaagtaacaatcactggtcctgtatgggtctgagctagttcctctgcaaatattttatggttatgtagcttggcattctcgagagactcttaacagtgagacttggggtgtctctgactcttgcctgctcttggaacccttttttaactactgggttgcctcatccagcttcgctataaggatctgtgcctagtcttattgcatcttgtttttccatgttcgttggttatccctgggaggcctgctctctccttcagggaaatggaggaagaatggacctgggggagaggggagtggtggggagggactgagagggttagagggagaggaaactgtatttgggatgtagtatatgagagaagaataaaaatgcaatcctctctttccacctcatgtttctgggcctgagtagagagagtcgggccttgtggcaagtgcctttactaatggagccttcttcttggccctctctgctttcttctaaatgctagaactggaaaaccatggtaaaagtggaattcaagttaaactggacaaactcgcctatattgtaacactgtggccctcttgataaattagaagcaggcagggactattcaatagggactggcacaagaaaagttgcaaaagtaaccttccctagttagtgtgtccagaaattgtgaggaaagtgtgccagtgaccacaccaagccatgtgccatttcctgaaaactaagaatctccttctggagcctcctagaaatgtgcacggcaatacaccatgtgctgaacccagacagacgcaggacaacatcgccaataacagagatatattatctcagaaaagcatgagtgcttacacatttcttcttcacctttctgtgccttttgtaaggtctcctagttggctaatcactgactaatatttaacagggcctttccccagtgccaagtgtttccctgctggtcgagcctctagacaaggtggcctccctcatttaagaaggcctagtattcactacaagccctatgcttcccctatccccatcctcccggccttcatttcactatgtagcacaggttagctttgaacacttcagcaatcctcctgcctcagtttccttgtccagagctcctctataaaaaggtctaattataagttttagatatactgggacaaaacatatattacttaaattaattttaactttatactttttatgataaaatccttgtaaatacttcctggatcatacaacttttattagttcacatacattgcattttatttatttatttatttatttatttatttatatgtgtgtgtgcgctgcattgcacatatttcaaggcacatgagtggaagtcagagggcagctctctccttccaccatttaggacagcttggcaagtgcctttccacactaagctcttttgctggcccttgaattcaatttttaagctcctcatactgtcgaattcttccctggcatatgtaacatggaacttacctgaaccaactttaaatttttaccaaacttcccaacagactcttcctggtcaacaacaacaatgtgcttagggttggaacgctgccaagcaggaagtactggggggggggggttctatggttctcatataaaacaatctagctagggttcagagggacacttagacttttggccctccaagctcattttggagctaggatgagcccatggatcgaaaaacaaacagagaggaacccagtgtagatgatggcacaggggcagaaccgtgggcaacagaaaaggtgtcccccaattgtttctggggaaaggacacccaccagaggagacccacttagggactactccagtgcaaccaagtgatgtctaccacttcttccttctctcactcacctctcactcctccctctcaaggacaaagctaccagacaagtgatttaggccaacaattcatttggctggtgccaggaacacacgggcctttccctgactatgatgaaatgggcgtgctggcggtaggtggttattccagtactagattgttgagaacgccaatttgaggctacctagtatgatcctctctcaaaacaaaccaagcaaaaacaaaggggcagtagctgggaggttccccagttggagtcctttggtgtcaggtctgaagaaatcaaagcgaagtactataccttcccaatgatgagaaaaagaaagaaagaaaaaaaaaaaaccggcaccgtaaccccccccccccccgccaaccccatacctgacttaactaggagacgttcaaacatgctccgaatttcccaactttacagttatttcagtaatgtttgtgaaacatgcattccacgccaagccttgtagatttacttctaagttcttccaccaggtagggaatggaaaaacaggcttgcaaacagagttccagtccccatccctcctcattgcccatccctgctgctgccgggtctctcagttcccccacccagttgatgtgacaggctcctggcccaatcctcttcctggttcccaggccgctgtgaacaccatctgagccaatggctgtggccgcagggcggaggaggctggcaagaggggagggagcgctggctttagaagcacagctgcagagattcctaggggcagaagttgtctgagtgcttggtcggaagctgtagagccagatcagcgactctgcgacttttacgtaagtgctttgcagttccaagggctcgaggggagccggtttcctgggcgtgggtaagagtgggtcctggtgagagcatctccgggaaccttagcaggaacgtgtgttatactaggggacgggggttgggcaaagggggagatcgaagaaaatttcatctggagtctgaggctcggctcccgggcgatcctcgccaacggaatgggtgggagctccaaagggttccttattaccaccctctgccnnnnnnnnnnnnnnnnnnnnnnnnnnnnnnnnnnnnnnnnnnnnnnnnnnnnnnnnnnnnnnnnnnnnnnnnnnnnnnnnnnnnnnnnnnnnnnnnnnnnnnnnnnnnnnnnnnnnnnnnnnnnnnnnnnnnnnnnnnnnnnnnnnnnnnnnnnnnnnnnnnnnnnnnnnnnnnnnnnnnnnnnnnnnnnnnnnnnnnnnnnnnnnnnnnnnnnnnnnnnnnnnnnnnnnnnnnnnnnnnnnnnnnnnnnnnnnnnnnnnnnnnnnnnnnnnnnnnnnnnnnnnnnnnnnnnnnnnnnnnnnnnnnnnnnnnnnnnnnnnnnnnnnnnnnnnnnnnnnnnnnnnnnnnnnnnnnnnnnnnnnnnnnnnnnnnnnnnnnnnnnnnnnnnnnnnnnnnnnnnnnnnnnnnnnnnnnnnnnnnnnnnnnnnnnnnnnnnnnnnnnnnnnnnnnnnnnnnnnnnnnnnnnnnnnnnnnnnnnnnnnnnnnnnnnnnnnnnnnnnnnnnnnnnnnnnnnnnnnnnnnnnnnnnnnnnnnnnnnnnnnnnnnnnnnnnnnnnnnnnnnngcgtaggtcgcttcccgctagttccaatcgcccgctctaggtgacccggcgggtttctgaggaccccgaggctcccaaagaggcggggcgcggagcgggtgcggtaccccccccccccccaggaacctggcctcggcggcccaccttctgccctctcctctccccagcccttaggctgagcttcgggactgcgccgcgactccctatgagtaagcagttttttggtttttttgtttgtttgttttgttttttgtttttttttttgtttttgtttttggtgttttgtgtgtgtgttgttgttgttgttgttttgttttgtttttcctttcggtggcagaagctttccaggctagcccggaggtaccttttggttctctcccctagcagcgccctggcggtcagcttgagtcccgatggctctggttgtgcaactcagagctagcgagcagggctgcagcacccgggaccgctctgggacccctgggaggctgagccgagatggtggctgaagccccattcccagactcagctgcacttgcctgtgtttacttttctccgcctgcttactttagcgacctaatgagaggcctgaggacgccgactagccctgcggtcgccagtcccaaagttgctgctgctgctccactagctcaagtgttggcggttctgaacctcccctggctccaggcccttgcttgctccagctttgctgacagtttacatcctgaagactggcttttcactggagctgtataactgactacaccagtggtgcaggtctagcttggatttaaactggggcgtctagtcatataggatcagaccagagggatgctgctatcacccttctactcaggggtaatgcagacagggtgaaggagcttgagtgaatacggtaggtagaagtgtaggtttaaaaacctacggaacagtaagcatttactccatttcaacatcacaatgggtttgggagactaaagttgaacactgagatgcagtttactgtgaattgcaacttaatggccgaggtcccacacttgccaattggcatcccgcatcttaagtctctgatgcccctagggtaatagtcacatgacctcttttgactttaaaactggaatgcaatggctgaggcccatgttccccaaactaccaagacaaaagtgtggagggagttggtgggaggggcgatgtgtgtcagttagcatccactgaactagatttgcatgaggggagcagaaagtgatctgttgctgtggttttaagcaaaattaaaaattaaaaagaataataaaataagaaaaaagctgctttcaaaacaaaggcttcaaatgtacttatgtggtgacatatatctgtttcccagaaattccatataccttttctaaattttaaaatcatcttctaagaaagctaatgtttaactcatgtctcatttcatccctaaatggctggttttgaagacgtatcccacaagatagtgttaaaaaataaaccatcactaccctttaatctgccctatactattctcaatattgggcatctacttaaaggtagagaacaatctcttgtgtaaaattaactatcaattattcgttgtttgaaatttattggcttagaaaccatacccagacctacttgatacaaaatttccaaaattggttgggttttgtgctgtgtggtggtttgaaagtctctgaaaggactttcccatactgtcccatagtggaagtttccctatttagattatatattgtcacatatgaaaacagtgtagaacagccaagtgtggtggtggcaagtgattataagctgagcacttgggaagctgaggcaggggcatcagctgtccaaagccaagaaggactacatgatgccctgtctcaagcaataagtgtatgagttaagaaaacaaggaaattgaagaaaaataaaaggaaagggaaacacgtagaggagtcacccaagtcaggaatttaaaagtctcacttacttgcaaaaacaggctcagtttacacatattagtacttaaaatcaagtactgcaaaccctacaaaagggaaatgagggttaggggttgaggaccctttagagatagatggttcacatgataaaagtcagtcctgactacccaagtccaaccccctggaccaattggatagcagagaactagctcctgcagtttgtcctctaacctttacatagcattcttagcacactttatgtttgcatacatacacacacactatatttttttaaagtaactgggaatatataaaagatttttgctttgcgtctttcctcctagactttttatttaagtaacctgtgaatacctcctgcactctgttttcagctgtacataagattctgagcctgaaaaccacacttatctaaaagcacagggtcctgatgtgcaggctagcctgttgcacaaattagctagcaatggatttaaactatacctgaactcatagagatgagcccccctagtggaaggaaggaaggtgacaatataattttagagtgaatttctaataaaagtttaacttaactaaaaaaaaaccacattgtttatgcagttcagcactgtgtacgtgagtagacactaataaccattgttaatttcctagctttaaaagatgtttagatagatatataaaatgatactagctgggtgaagatcaacatcatctatatgattgttgttattctgtcaagccaaaattatttcaaaatgaaaatattttaaagccagtcgtggttaaattacatctctcattccagcatttaagtggcagatacaggggaatcagggattccaggacaccctcaatcaactagcttgcttcaatgagagcctggctcaataaggcaagaagaaaaatggtttaaattgcttctctctctctctccctctccctctccctctctctctctttctctctctctctctctctcagttatactcatggttttctttttaatcattatttaattgttttcatacaaaatagtttggtcatatttttctcccccccagccctcccagatcctattcatcaaactttatgttttctctctttctctcaacaaaatgaaaatcaaagaaacagaaaacaattcagacaaacccagtgtgaaatcatttctaagaggtggaacactcctgacaagctgggctgcaggctgtctaagtcatatacaaacagaatcctgagcctgagaacccgattttgatccctgtaccacctaatggctgttgagaacagactcctgacagttatcctctgacccccacacatgacatggcaagatgtgctacccaataaatagaattaccactactttctggtccatagcacttcttgaaatgtccatacagttaaaacaactctcattgctggccagaattggaagactgtgaatctgtttttcttctttctttctttcttccttccttccttccttccttacttccttccttccttcctttctttctttctttctttctttctttctttctttctttctttctttctttctttctttttttcctatttttttctgtgacacatggtttctctgtgtaacaagcccttgcattcctggacttggctctgtagcccaggctggcctcaaactcaaagagatccacctgcttctgccttcagagtgctgagattaaagacatgtcctaccatgcctggtctgaaactctaattcttaatttctacccttgtatcccatttgggatgcaagctaaattatgttttgcttctgttatgcttcagttatgtcttttagacactgaagcctaaaatgtctagtctctttgatgatctttagagtctaattgctaaaatgtgactaggtttgtgacatttggagtaggattagtaatattttgatggagataagtctcttctacaaacaaataaacaaaaaaaccatattaaacttgaccacgattattatggtagaatagtatgactcagtatactatcagaaacccagtgaattttttctcctaggcaaggaatatgattgctgtcataataaggggggagggggcagcttggccatgatgcttgaacactcaagtgatgcccttggacaaaggaagaaagtccacttctaactccgtgttttgtttaaggtgtggttcctacttggctttttacatttcttgatatcatattcttggcatatattacaatggcagagatctatatttgtattcagtctagtatactctgggtgggaactatataaagcaagacatttattgtaactgattctaaaagtaactggtatgaaatgagatttgaaaatgaacatctatcaatatatggcagcttgaatatctgtgttttagaattattttgtacttgttagtatggcaggttggttttttttttatagaaaattatctaaaggggacagacagacctgtaaaaagtaagcataagattagaagtttcgagctgggttcacatttcgagtctgtacttattctagggagtggtatgccatataatgtaagcttaatgtgatataggattccaaagctttttggatgcattgttgtgattgttttcagtttggagtcctttgtttaaagttgtggcaactatctaatgcttacatgacaagccccaccccatgtgtgtctgtgtctgtgtgtaccttatggagatggacataaagtctctttctcaatgacctgcctcctttttttttttttttaagacagagactctaactgaaactggagcttgtccatttggttagactggctggccggtgagccctagggatccccctgtctacacctcctcagtgctgtctgtcagttcaggcacatgctacctcatctgtcttttgtgcttatatgttgagaaatccgaacacaggccctcatgccttcatagcaagcacttcactgcagagccatctccccagaccttaaatgccattcttaaaatccaatctcataatacatgggccaatttattttagttatagaggggaggccatttcaaaagattcacagctaaattcagtagtattgaacgttgccatattcttacacttgaaagtaaaatgcgagtcgggattgttctagggatgaagaaatgttctatttaatagaaaatgctgagagaggaggggtgtggtatgaagggcctgtaatctcaacatatcagatgccagtgcacacaatgagttctagactaaccttagttatgggatcttgtctcaaaaaaaacccaacaaaatatggaggtacaagtatattgattggatatagcctcagaggaactgccactgagccagaatttcatcttgagaaactcacataaaattgttatattggtaaataacatttagtccatctatgtactagacactaagcattttctcagttttgaaaagtgcagtagctcaatgattttagttggctggaattcctttttgaatatagctgtagtctggctattctcacttatatttgtttattattgtttttttaatgtatatgggtgttttgcctgcatgtatgtctgtgtatcacttgtggtacttagtgcccatggaggccagaagaagatgccaaatacctgaaatctagagttaaagaaagttttgagttgcagtttaggtgctgggaatcaaacccaggtcctctagaggcccagccagttctctcacccacttgagccatcactccaggccctgttctcagttgtattatcatttaacttcgtgttatagttgcagggctggacgtggatatcagtgcctccctcatgccaggcaattcattctctaatgatcaatatgctgggctcacatgttactttttctttcagtcagagttctgcttatgacacccagactagccttaaactcactttgtagaccgagccagcctttgaacttgtaatcctcttgagggtcctggattttaggcttgcacccaccaggcctggatatagaccgatttttataatatgaaaaagttaaattttcgtaaagcttagaaatgtgattgatgataaatgtagtgttgctgattctattgggtgttgaatctctgctctttcatttctccgatgtctggacagataggcccatttcagtaaatcactgttgtactcatagctagagtttgcttgatttttaaggcatctgtttttaatctatgcatttcacaggcatgttgaaaggataagtgagctatgcgaaagcttggctcttcagcagacaggtgctatatacatccagcatactgtagctgtatttaataactctgctagggctttaacaggccttttcagatgactggggcatagttcaatggcagaacatttgctttgcttgcatgaggttctgggttcaatcccaagaatccctcacacacacacacacacacacacacacacacacacacacagaggggggggggcagttattgtattttcttacttaaatattattcagcatagcatgttaatgtcatcaattgatttttttccttgttactgtttatttttccttattggttgtcaatacagagtctgttctcttcaattttctttttcttttaagttgttcattagtatacacacatttaggtttcactgtggtttttttcgaacagtttgttatggtttattttcatatacctcccttctcccctttccccccttgtagccttccccaccctcctgcctgctttcagcacatgtgtgccagagtgctttctcttcctccacacctctcaccacactaatagtctcagttctagtttcaaagcccgtgcccacactcacttttgcctgtttacatacatataaacattatatgctaggatacacacatgagaggatgggaattttgtctgaatctcagcctcctcacttaaaataatgctttccagattcatccattttcctgcaaatttcagttttctttatggctgaataaaattacccactgtgtttgtattacattttctttatccatttatctgctgatggatatctaagctgattccatttccttgctgttatgaatagagagcagcaataaaaatagatatgtaagtatctctgtggtagcatacagagttcttatggtatatgccagaaatggtagctgagtcatctggtagttctgatttaatataatttcttattctgtatgtgcatgtgtcatggtccacacgaaggtcaaaggacaacctgcaggaggagttcttctatcatgtgggtctcaggaattgaattcagtcatcggacatgatggtatatgcctttacctgctgagccatcttgccagcccagttaaatagcttgagaataactgaaaatcatggctagtttgtaagagtgggtgatttttactatgaaaaatcatttttcatttttaatttgcaccttcttacttcaaccatctgtgacttaaaatagtcaccaggaaaggtattttgtgtaatactgtaacttgtgcattgaaaatagaggtttgattatcctaagttattatgcacgcattgaaaaatgaatgcatatacacattatgattttatgtaaacataggaagtccttacattgtataaaatgcaatatattctcagccactgtctctgtttatagctgagttcatgttctacactctccttgccagggctacacagagaaaccctgtcttgaccccccccccaaaaaaaagagaaagagagagagagaggaagagctctgtataaagacagaggaactttagtatatctagtcccttagagtgtgtatgtattgggtggggtgggatatagttcagctggtagagtacttgtctagcatacattagtagttcctaggtttgttccccagtataacaatacccaaacatggtggcacagtgtgtaaatctcagcactcaggaggcaaaaggaggagggccagtagttcaagattaagtctgaagctagcctggaatacatctctctttaaaatgacctacaaaccactaaagaatagataaaaacatgtgcaagtgccctgtgtagatgcctagagcccacagaggtcaaaagggggctctggtttctctggaactggggttactgctagttgtaagctgcgacatgggtgccaagaaccaaacccaggtcatttgcaagagtggctagtgctgttaactgctgaaccatctctccagccccatcatgtaataaaagtatttaatgaagacttatgtactggggttacaaagaggatagaagataactcctgcaattcaggagaagaaaaggacacaaaggtaatattggtttttatgaaatttaaaaatatttattatagctttttattaatctgtgtgtgtgcacatccaagtgcttctgcatggcacatcaggacatgtggaaactggttcatgcctcccacattattgagacagtgtcttgcactgcagcacggcatcttccagcccatttgggttatactagcgtgattctcctctcgacttgccatttccatgtaggagtgatgggattacagatgcccaccaccacatatggctttttaagttggttccaggattgaacttgggtcaatcctttcatagctattacttttgtgtgttgggccatcttcttctccgcaatatatatatcatggagaaatgaatttaaattccatttttttaaacataaagtaatttctaaatttaaactctgtatggacaaagacattcacttatatcccagtataatcaaatctaaactaagaacaaatcacatttaaacattgttatttctttgcaataattattatgtcctaaaaaaaaagagcccgctatgagttaattttacttaaatagaacattgctcagcatataaatgaaggtcagcagacactagtgtcttggaataaaatatccctttggctagaaaatgtgccacacccaattttgtttttacaaaaataaaattctttccagcttcactaaattggagagatgctgtgtacaacgacagtagtagttggctctgcaactttggaaatatccaagtatccctgtgtacagaagcccttagaaaagctgagttacacaagcagtacttgggccttctgtcgctcctgttcgcttaggttttatctaaactgtgtataaagtacaactaactcatacagctgatggctttcatttcataacttatacttcatgattttcacaaaccttaaagtgggtaggagcatctgggatttcaggtatgacagtcactccctctggaagccaggaatcaaagtaatgcatatggctttcttaaaaggcagtgagaacttcctgccagtggatggactaccacaggcagggattgagaaaaatctctgttctggttccttccttcatgcctgacacacagcaggacccatttacagcatttcctctatattcacaaggaatgcacttcaggaactctctcgggatgcagaagccccttataggaattattattatgcacattcttcatgcattttgcgagtggaggtgaaaactgaatcaaaagcctctcacattttaaacttaccactgagctacactctcccacatagatgattaaatcatccttcggttgcatgctcacctgtattgcttagagaattaggacaagaaaatattctatgcatgtccaatacagacatgggtctttcttaatatttttcacctggtgctgcttgaacccacgtggagcatatagctatagaggacccattgagttggggaaaaagaaatgatcttgaattttcttgctgataagcatgaagctgaggtctggagatatggctcagtggtttgtactgggcataagtaaggtcatagatttgatccccaacagaagggggggcagggaaggaggaagaagaaaggatagggtgaaaagaaagaaggaaggaaagaaataatgtaaaggtggtgtgggagaccaccaagttgaaggaacccgaattagcagaccattgatttatgacacctggacttcattcgaagacactaatcacatggtgttcttgcatgcacttactttttaactattttctttactagaactcttattagcataagtttgttgtacaacatgaaagaattcatctggaaatttacatgcaaatacacaatgtactttggccattactccattcccctctctctgccttggcctctaggcctcccacgggtctgtttgctttttccaaaaaggcttttgagattcacatcctatgtgtgtggcatgtgccagcgttctgtgtggtaaagattctgcatgtgaaagaacatgcagaatatctgttcttttgaatgtggcttatttcatttgatatgatccctagttccataatatttttttcctgcaaatgacacaattttattcatctttgtggctggaaaagaacatcactgtggacatagttcacagaactagaaaaaaaaagtcctaaaattcatatgaacatgcaaggcaccatgtgttccaaagcagtgctaagcagagagaatcctgcaagaaaagatcaaaattacttgacttcaaattgtactacagagctttactagaaaaaaaaaaacccacaaaaaacaaaaaatgaaacaaacaaaaaaaaatcaaacatggttcagagaaaaatagacatgtagaccaaagatatagaacaaacacagacagctatgatcacataatattggacagaggtgataaaaagtatacactagaaaaaattctattcagcaaattttgagtgatattagatccacaccttcgccccacccaaaaataaattcaaaattggttttaaaaaaaagccaaaatccccccaaaaaaccctccttttaaattttcctgcctcaggctctgaggtgctggaattacaggaattttatcagcacgcctggctgtgactatctcaaatgactgattctgagtgaatgttatgtatgtgctttgttttgttccttgttttgggagataaagtctctcgatatgtaaccccatgctggcccggaatttgctatcctgtccagcctaacttctactttacaatttacctgccttagcctcctgcgtgctgagagtgcaagcatgttccatcacttgcagctatgaatagcatctcctttctctttttaaagatttattcatttaatgtgtgagtgttttatcagcatgtacctatgtacacagtgtgtgtgtgcctggtgcctatggaagtcagaagtgggtgtccgatttcttggaactggtgttgcagagggttagttagatgccgcccaaaatgggcactggtaatcaaaaccaagtcctctgcaagaaagagtgctcttaacttctgagccatctgttcataccccagtatggatggcattttcatgctaagaactgctgaactttagaatcaaagaagctgtgatatattaatattttcacattgtagtagctttgttgaaaaactctatgtagatactcatactatcttctacaagtatatacttgaaaacattttaatccatctcctatagttatatgattatcatccatgttcttttaagagttatttattttattgtatgcatatgagtgctttgctctcatgtatgtctgtgtaacatatgcatgccaggtccccacagaggtcagatgacggtgtaggatcccatggaaccagaattaggtacagttgtgaggtggccatatttgtgttgggaattaaaacctacaccctctgtttaaaaaaaaaagtgctcttaactgctgagccatttctccattcacctacagtccattttcataaatttttattagctcacacagaaatactggactacctacccataatcttcccaccaaaatgactactaatctactttgcatctccataaatttccctgctctggaattttatgtgaattaaatgctatgacattcagtcttttttgcatttgacttctacctggcatagtgctttaaaaggtcattcacattctggcatcagtacttcactgtttttgtttttgtttttttaatgccatatcaacgtttaggttgtatagatcattggtggtcatgtgaattgtctctacattatggctattataaacagtggagcccatcagaattaaaagtttaaccacaggcaagataatgagttaaaggttgtcctgacaagattgtctcatttatttcacctcaaatgttaatgagaaccctaacttggactgatttttggctgttgttttcttggtgtgactacccactgatttatccttgagttactcccaggaaaattttccttttccttaagtaatgcaaagtacatacatgattttagttttgtgtgggtggggttagccaggccttgaacatttattgtcctgtctcagcccctggagtagtggggattccaaacctgtgctttcagtcctttaaaacaaactgtgttacagactttcagcatgtccagttaaatgtgtgttattgttgtttggtttgtgagatggcccctatatgcagataaggctgccctcaaactcaagatctttctgcttcaccttcccagtaactgggaatagaggcacaccaccacacccagccacatatttgtttcgttacattcttgaccgctgaagagcgaagataagcaatgctagggaatgcagaagtaaatagtaaatactggacaacaatggctatggttaacctaaacaattactgaatgcatttatttttcaaatgtgttcacatagaacaaatttcaaatggtacaaagggccataatatataaaaaggaccttcttaacgagtgacattttcaaaaggcatttgtgctttgtggttaggaagcacaatggtaaaaggactccgctgactttttaggagtgaatatgagaatgctatcagcactttcaggttagaatgtctcaggttcacccacatagcataagatgaaaataggtgataacaaagtgagatgggccatacctatagtgctagcacttaggagctgaggcagaaggattgtgaaaagtttgaggacaaactgggctattaggaggtcttatctcaagaacccttaaaggaattaagaaaagaactgctggtccctaaaatactattttgctcttgtattctggattcaactgtaagagaatttcctgggaaagagtccttaaaaatcgtgataaagatgctgaaatgtagctccccacagttgatggcttctggtgggagctagggtggggaaaaaaacacagttatcttttaggggctagtcactgggagtttgaccatgctccagtttgtgaatcggcaacaccagttagacttggtgtgtttgggggtggactggggaagagcacaagggtgagatggtacctgggaggaataagaccagtgcacattgtataaaattcccaaatatttaactaaaaatatggtggagaaagaaaaataaacgtactggctctcagtttcttatgcttctagacactgaaaactatgcaggccttgaggaaaggaggggtttcactgtgcaaggaaggctggaagtcagtaccatttcctggagacccattttgaatgccctatataattacttaattcttgtaacatgtctttgttaattgtctacaaagtgcctgctacactaagattaatcaaacaataagccaccatttgagcttggagtccagtccagacatttctattacaagtgaggcggtggaggtctgtttgtgactaacctaggcagacagttgttaaggtggaggagcacagtttatcatgggggatctgggggatctggattttagcagtagcccactccaccgctgttctctgcccatttcaataccacatccttggtccacactgtctgataggactgcctcttccatcctgagtcagtttatactaactgcctttttttttcccagatactaacaaaatggcaggtgctttgccacatttttaaactgccatgaactcgctggaattcctccacttatcatgaaatctgaactgggtcagacagttcatccatagtcaatagaaatgaatgaatactagttagacacggagcagggaactctttctgtgttctatctttagttgatagttctcagcatactagcaagcatgtattcataatcctgcatggttaatgctttccaaggggttggaaaactctaattcaatatatttcaaggatatcagagggtttttttttaatcactaatagtttctactaaattagaatttaatgctaggtggtggtggcataagcctttaattccagcacccaggagacagaagcaggcagatctcttgatttcaaggccagcctggtctagagagctagtacacagagaaaccctgtctcaaaaaatttattatgctattgttcttttgctataggctctcaggtatcccaggttgacctatgtggccatgtgtgcttatgtgcctgtatgctctatatgctgagattacaggcatgtcacaacatgcccagggtttaaggtattggagattgagtccatttgttttaacttcctaggtgctgggattacaggaatacgccatcacacacagcccctattacacaggaccaaaaagtttcattcaatgaatcattcacttattcaaataattattgtatatcttacataagtcgggtaatattttgtcattagggcttatagttatgaataaaattcccaaagacaccgcctttatgaaaattaacactctactagaggtcgcatagaaaacaacattggtaaagtattgctcttatgacaaatgtatgagaaaaagtatttaaatttatttagagaaacaaactaaatttattttggtctgtggtttcagtccaaggtaagctggttctattgctttgggcttgagataaggcagaatttcatgtcagtagacccttgagaatggggttgctcgctacatgacagtcaggaagtggagaatgagagaccggaaattgtgtagtaccctcaaggacatggccccgttgacctgttccctcacagtaatgccatcagattattaattcatcagtgattgtatccagtgattaaatctagggccttctggggccaatcagttctcagtgattagctccactatcaggagacaaagacttcaacatttaagccttttgtggaatgtgttgtggtatgtatggtgtgtatgtgtgtacatgtggaccagcatgcatgtatgtatggtgtcttccttggtttctctcacttttttttttttatttttgagacagggtctctcactaaacctgaagctcattgattctcctgactggccagtccacaaggtttagaaatcttcctatcccctttccccacaacactagagtttacggctagtgtaaagcatccccatgcctctacatgtgtgctgaggacccaaggtcaggttctcatacttgcatgacagttactttggcaactgcatcatctcaccagccccttgtgggacttttcatttccaaaccctcacaggtaatatgttagatgctgatgtgttaagggaaagttaaaccagaatttgtgttacagtgaggaagaagtagaggatcatcatttctaattgtaaaatcacagaacttttctctgagaaatttcagggcaaggatgaaggtagtcaatgaatgagctatgtgaacattcaggaaggaatgtttatagtgatttatactgaacattatttcatttgaacaaattaaatttgtttctaattgtcttactaaccacaacataatggtgggttttaggcttggaataattcttttgttttgttttgtttgtttggttttgttttgttttgtttttgtttgtttgggtgggtttttttttttttttttgttattcgagactggctttctctgtgtattcctggctgtcctggaacttactttgtagaccaggctggcctcgaactcagaaatccgcctgcctctgcctcccgagtgctgggattaaaggtgtgtgccaccacacccagcttagaataattcttaatgtcagctcctttgtattttggtatcaaaaatatttatactctaatggaatcagtaattgattatagttttggagatggggttggttttggtttttattgaaaatttgtgttaagaatatgttagcaatatttatgctaatatcttaagaaggctatgggaacaatgtttaaaaatgagaagttaactggattaatgcatatattttattcatttattattgttctggtgttttgaaattgagtctctcactatgtagccttgtcttatctagaactcactaaatagaccaagctgatctcaaagtcatagaaatctgcctaactctgcctcctgagtgctgggattaaaggtgtgtaccaccacacgtgacttctttatttatttctgaattttatttttatttatcactttgttttgaggtaaatgtagactcacacataaatgtaagaaatgacacagagagatccaaggttgggttctccttaccagattcctccgatggtagctacttgctaaaacagtataatatccatcccggggtactaacattgatacactcaagatgtagaacattccgtcacttccagcatgtcctttgttgtccatttataacaagacatacttccttcctccctccaccctcatgcctgaaacctggaagtcaccaatatgtcgtctatttttacacttcctgtcatttccagaatctgtataatgggacatttgggatctctctctctctctttctgtgtgtgtgtgtgtgtgtgtgtgtatgtatatatatatatatatatatatatatatatatatatatacacacacacacattgtgtatgcctcatgcccatggcgatcagaagtgggtttaggattccttggaactggagttaaagctggctatacgccataatgttggttctgctggttatgtagaagaactggaactacctttaaccactgagccatttctccagcccaccaaactgtcttcctttacctttatgccttaaagctgggaaaaaaaagcatttgaatatttaaaatcgtagccactaaaattttggacttgaataaannnnnnnnnnnnnnnnnnnntatgtatgtatgtgtgtgtgtccatccccgtttgtgtcgtcctccatcttccttctaccccctccttctctctcttcattttgttttgatgaagtctctccctataactcaagctgaccttgcttgaacttgtgatcatccagcctcagctcttggtcaggcttgggctacgaagcctggctggtaagtgactttattcatttagtgtatttttctgatgagtcttccagaatattgtgtatatccattctttgttccgtttcattactaaattgcattctgtttagcaattgttccattagtgcacatctggaccatttccaactatatcacaatattgctttaaaaataaagcttcaacattcacacaccctaagtttctggtacacgacttgttttacacaatcacccatgcatggaagatgcatctattacctttgtttatagcacccaagtggagttcagagaacaatttacaggagttggtacgctccttccactatatggctcccagggattaaactgaaatcatcattgctggggcttgaacttttgactgcaagaatactaagcatgtgccctactactgagctatactcccctatcatttccagtttttttgttttttgctgttgttgttgtcacaaataaaagcactataaacatttgtgtgcaaccatttatccaagtgtaaggtttatttttgggaaaatcattacgatttgaatatgaaatgtcttgttcaggatcatatgttgaatgctaggcggtcctactttggaaactttaagaagtggagcccagctggaagacatagctcaccgtggatatgttgttggaaactgtatcttctgctctgtgcatctctgtctctgccacatgtcacatgtcacatgctctgtcaatgctttgcctcaccaaaggctaaaaatcaatgggagatctctgaaatcctgaactaaaatgaatcttaattcacttaagttgtgtatatcggatactttgtcaagttagcaaaaagccttcgtgtaagttaatatgtaaagagtgcagttactgagttgtatggacgttgcatgtcagctttataaggaaatcccaaagcacatgggtagagtgactagactgtttgctactttttaaaaagatttgtttgtttgtttgtttgtttgtttatttattgtatatgactacactatcactgtcttcagacacaccagaagacagtgagtctggttctaggtctagaagaaactattggtgggccttgaaacatcagtattgtcttgtttggcattttcttcagtgaaagtcattgctggtttatcagactctgcagaattaatttctcatgtggggaaggcattatttcaaggggtggagctgagggtggggcaaactcttgagaatctgaagattcaaaactctcagcttcaacagggtcttcccacacatctccatcccaagttataggatcccattctttgccaattagtgcccttactttaactgttgacacactctgagactgagacttaaattttcgctgtagttcaaccaacctcacaatgagggtttcagtttgattttctgcaacatgagctctatggatgctggagagaagattctcttcaaggacacacttagcaacttttagatcatttacttgtgtctggagccgttcgattttatcacacaactccttcatttcattcatcgttttttcccaagatgaaccagccagtaaaatcattttctgattttttccccatcttgtagaaagctttgtacaccgactcacctaattcatcaagaaaatcaagggcattagcttctttaaggttgaaatatagtttcagccacgggtcttcaaaattctctgagctcccaggagggagagaatctggtgaggtttcagtagttgaaagtgctggtggatcaacaagccaattccagtattttaaaagattcatccttatacttctgctcctctagaaccactcctggtaccaacttctgtattagtcagggttctctagagtcatattactgatggttgtgagccaccatgtggttgttgggaactaaaatcaggacctgacatctctcctgcccctcttttctactttcacaagcagtgtgcactacatgagtacctcatgctttcagtggtcagagaaggtattggatatcttggaactggaattacaggtggttataagctgccatgtgggtgccagaaatcaaatctaggtcctccagaggagcagccagtgttctgaactgctaagcaatgtatccgtccctagagttttgtttttccccttgagaaaggtcttattctataggttgttatgaatggcccaagctggctttgaactcattgccatacctatttcttaggttcctggctgctgagattacagctgtgattcaccatactaagcctttatgaatttatttttgtgtaaggtttaagtagtcctggttttatttgtttgggacagaatttatggagttcattctggcttctaattcactatagctgagactggccttgagtttgtgatccttttgcctccacttcctgattatagatatgtgccactgcacatggcttttgtttaaaattttcttttaaaatagattctcacccaaggagctaaagggatctgcaaccctataggtggaacaacattatgaactaaccagtaccccggagctcttgactctagctgcatatgtatcaaaagatggcctagtcggcctcactggaaagagaggcccattggacacacaaactttatatgccccagtacaggggaacgccagggccaaaaacggggagtgggtgggtaggggaatgggggacttttggtatagcattggaaatgtaaatgagctaaatacctaataaaaaatggaaaaaaaatagattctcctttcatacaacatatccagaccccagtttaccaccctccactcctgctatcctcccccacctcttctctcccccagatctattctctgtcctttttctccagagaagaacatgcctcaagagacaacaacccagtatgaaaaaactaagataaaataagaaaaggcaaaagccctcatatcaaagccagacaaggctagctggttagaagataaagagtcccaagaacaggcaaaagagtcagatacatacctactcccactgtgagaaatcccacaaaaacacccagctgacagccataacttatgtgcagaggacgtggtgtagacccatgaaggccctgtgcttgctgtctccgtaagccgaagggagccctgcttaggtgattcagtgggatcttttctcttggtgtcctccattccctctaatcctacagtcttttctccccctccttattatttgcctgtgcttgtctagatggtacaccattattcttccactggtaagtttatgttcttctaaaagaaaatcctttgttcatgggatgggaatatagttaaatggtaaaccatatgcctagtatgcaaaagaggctgggttccatccacaatgtacacacacacacacacacacacacacatatacacagtccattacatgcacttatataagtctgtttctgagttccctattctattccaagtacagatgctttgccatcaacacactctctcttgatgaatgcaacttcatgggataactttaccactgggaaaagtcaatacacccaccctgtcaatatgttttagctattcatgttcctttctacatattttttttggaaaaaaaagtttgcttatggcaaggaattgcactagagtttttagtttttagattagattttggagattttatatgtaaatgaaaatatattttcaaatgaaaattctaataagtaaaactgttaactctattaaaaaatttaactttgtgtttggtctgatgctaaatcttattttctaaccctgtacctttttaaaagagattaaaatgccatatagcccaggctagccttaaattctctatgtagctgagaatgatttgaactcttgatctccctgcctctaccactagagtgctgaaattccaggtgtagtcttctgcctctgctgtatgaagtactgaggactgaccctagggactcattcagacaaaacaagcattctgtcagctgaactacataccagcaatatctatttttatagtctaaaataattaagccaggcatgatggcacatgtccttaaccctgggactcaggcaggtgagtttaggtgagttttaggtcagccctagttcatagatgcttcaaagctacatactgagactctgtctcaaaataaattcaatttacttctttattaatacacagatagataaaattgcatttttctagtgtgccatgtgatttgacatatgtttgtgttataaaaagtgttgagataatggtatctgttccctcagccatttatcctgttttcccacaatgtgtaacctggttgtgtgcaccctggttgtgagtacatgggaggcatgcattctggttgtgagtacacgggtggtgtgcaccctggtgggcttcaaactcatgagattctcttccctctgctttacaagtgctgaaattacatgcacatgacatccaactattgtttatttgtcatttctccatggcaaactcattgatatctttttataagttttaaatcttcgaatgaaaatgcatcttaaaaataaattgaatggcttttgagttgctaaaattgaagttttccaaaggaatgaagctttgttgttgttgttgatgatggtttataatcctcagtatgggacccaggtgcttatcttcctagaccaatgctctccagctgagctacaaccccttccccaaaattacatatactctggtgtggggcaggggcaggaaatggttgagacaaggtctcacattgaagcacagactggcctcaaactcagcctctcaaatgctgggattataggtgtttagctatgacacacagctaatatatgcttggatttagaatttgtagcaatttctaatttgttgatctttgtttaaatttaaaggataaatttaagtttcacttatggaatttttaaattttatttttttatgttgttttggatgtcttttagataggatcatactctgtggcctaggaaggcctggagcttgctatgtaacccaggctggtctctaacactgatgatagtcctcataactgagcctcttaatactcagattctaaacacaagccacaatgactacctttttctgtgatttataaagaccacccactgtaacttcttatataagtttctcaaacttcttgttatgccttaaggaaattatggcttagtccattgttggctccatcaaattcatgtctcagaatagcaaagtggggtattctattaaatccctggtatttggggcattggggtcaaggtgaatttggtattcgtgttcagtaagtcaaaagtgtttcaatgaaaatacttgggcattcttgtgctttcattatagattccacaaaaataacaccttgacagttacaaaaagacatctggtaaactgggtgatttaagagaacacagggaaatttactgtctggttgaaacaaacaaacaaacaaacaaacaaataaacaaaaaacaatggggactgccagactgattgtggctgcagagctgaaaagaaaatgacaccttgttgcttttgggtgagggaagctgagacaacattgtgcttttctttctgccctgctttcaggagaaaaggcttttctgctctcttcatattgaatgatccaaggtgggcggcaaagaacaaagccgtatggctcattttttccattctgtttttttctcaattgccttttatttcatttagtaaaatttatcactctgcctgtaacattggaaggtgagattatggggttagagttagagagcagaatcaggaaaaaaatcacagttcaaacacacctgctctaaatgtggagtagaattactgctctatactgaaagcttctttaacttacatagcacatggatcctagggatacttgtcacactgctgcctcctgtcactagtatcagtgttgtgtgtgactacttaggtaatggctacatcctcagcgaaacctgttcgtaacagaaggaagtataatctaggaaagaaagggaagcagagcagagcagagtatagtgtacctctagtgtggggagagttgagtgagacagaaggatcacaagataaagccagcctgggtgtctatggaaagttcaaagctgccctggcttgcctcatactcgacactctgtctcaaaaaaaaaaaaaatcaaaataagaaaacaaaggagaaaaatgattgcatgcagtgtagttcagtggttgagtacttgtctggtgtgtaacagctacaaagcatttttggttttgctttttaaagaagtaatgatatgtatgaaaacagatattcaagtttcttttttcacatataattgatttggagtgtgtgtgtgtgtgtgtgtgtgtgtgtgtgttactacagagcacagggtagtcaagcacacttaccactgagtggtaccactagacttttaattttgtcttttataaattcaccttggaaattcatgaattctaaaaaccagtcaccataaagtagtcaactccagtggaagaactcagaagggcttagccagtttctgctgtaatgagctgggagcagatacacgatgattaatcctaaaaatacagtgtttagcaattgaagatgatagatccctttaacttatggcaaaatcactgtcatgagatgtgtttagctttacaaagttaacaaattactaagtggaatatcagctgagcaaatctagttggtgagattccgcctctttagcaagctgaactaggttgttattgtgttgatgaatactgctccatcctcaaagctgcacaatgaagcgtcacagcacaaataaaagaaagaaaatttgtaagtcatctttcatatgtatatgcgaatgttaagaacatataaccacttttagagactgtggaatttcttttgggtcaatcttacagataaatctacattgtgttcacagttctgtgcagaggcagatttaacaatgaccattatgtgtagaaaatagcagccattgttgctgtactaaagtctctggagattaaaaagaaaataaatgaagcaaattaaaaccttaatggtaacacaccaaataaattaactagtaaagaatgattagaaacaatatagaaggactgttgaattagacctggcaaaagataattgaagtgcatagaaagatggggattgcttacttatttaaaagaataattcccaaacagtgagctcacacacacacacaaatttggatctttcagctaattatttttggagaaagcatcaaaaatatatattcagaagagatacaatgcagtctgtgcactgtcaagtcataatgccctggaattaatttagtttatgctttgacggtgtgtatgtttggaagaattatgagcgagcattgaactgacactatgcagttcttaaagtgaatgtgggcaatgttctgaatgttttattagacaacgagaccacaagttttctctgtttacttgtctctgcaatggtagcagaagacagactatatgtgaaacttcatggatgcatttaacaatctgaaaccatggcaacgtgtgataacaagcggcaaccagcatcctagcagcattcgcttcatgttaccacttcatctgaattagtcgtttagagggtatttcatatgctttgctaaaaactgacgagcttaatcttggactagggcattcaggcaggaaatgctaaaacagctctttcttttgaagatttctttcattactccctgtgaggtcaaaaagcagttgtgagtttggaaacccagagcagtgatgtcttgagagctaaatgagctttttctttcttgtagggtgagtttggtttgttcagtcctacttgtgtgccaggcactgtcttagatgccaaaaacagattactaaaagaagtagacaaaaaaaaaatcattgccctcatattctttgatcatggttgaggctctagaactatttccagttatttaatattgtttctcagctttttaaaacctccaccaaaagagtcttgaactcttgaatattttatcttatttgaatagggaaaattgatgatttgtttagaatacttggcaagaatccaaaagctggtaactaaagtaaatattttctttttggttgtcgctactgtgtttcctgtgccagagttacacctgtattgatgactgacttaggaatactttgggcttcacttgtggatttagtctttagatggggcttaactcaattttaaggggggggcaggaggctcagtgtaatgtgcaaattcatttagaaatgtgtctctgtcatgtgaagatgtatggaatccttaaatggactgaacagtcaccatggaaaatgaatatctgtctgagttatttttgcctatgtgaggagtacaagagctgactcaaagaggatgccatgctggttcctgtcctgaagtcaaacaagacagactgtgctggaaaagccatgtgctcatgcctgtgtttgctcacaccgtagatgtcttcaaccacccccataagagggcatcagatctcattacagatggttgtgagccacctattaaagatttttctttgatcttcctagcctttgaatgatgtagattgttctaccttctcccattaaataaattagtatcaatctaaaatgcaaggttttgctgttaaggtatttgactgtgtctgtttgtttgtggtatttgctcccttcatttggattggacctagagcctcatacaaggtagacaagtgctctactgagctatatccacaacctttttatttttaaatacttttattctttaagttaaagtgtagttatcaattcccgcattgcttttcctcacttcaagcctttgaatgtacccgtcttactctcaaattcatgcccattgttttttttcaattgttgttgttgtgtatatatttcttaatatataaacatacctgattgctccgtataatgttgcttatatgtgtatgatttcagggctgaccactgggtataaggtaaccaattggtgctctcttccctgagattctctctagtctatatgcccctactctcagcattccttagttgctttttaaaaagatttgtgtgtctacataactaagtaggaatctgaaggcgtgcatgcagtaagctggtttttatgttagtttggataaagtccgtgtatttcccatctattgggtgagcctagatatgaactgagcacagaggtatgatatgtacaacccaatgctttaaatttttaaatataattggccagatcactgtttcctgtgcactagatagaaaaatggatcaagtaaacactgaacgggaagagggaaagatatgtatgtaatcatcagaatgcttgaagtctttgcatagtttatgccaacatctgtttcactctaatggagatatgagtgaaacgagaaactatttttcaaatgactattgctggagtcgcacagatcaaattatcttcaattaagaaaaaaatgtgtgtgtgcatgtgtgagtttgtgtatgtgcacaggtaagtatatatatatatatccaagaaggtattggatttcccagagttagagttagagccctacattggtgttgagaaccaaagcagtccccaggaagagcaggaaatgctctttaattactgaaccatctcaccagcctcctcaaactctttcttttgagacacgatgatattatctaggctggcacaaccttgtgatcctcatgcctcattacccttcaatgcccacatgcctaacttcatcctcagtaactagaggtataggtatgtgccaccacatacagattgtttatctttgtctttttgttttgttttgttttgtctttgttagtttttcttgtgtataaacattttgtaatactacggattgaacctaggacctatttatgtcttagacaacttctttattactaagaagagaggtgtttattttgagacaaggtcttcaataagttacccaagctgcccttgcaattagtccatatcctatgcaggccttgaatttgccatctttctgcctcagcctcctcaagacctgattagaggccaggaccaccaagttggctttatttatcttataacatcatatcatatgccttacagctaaccagatatgaaagcaatgtaaagtgtttacattccaaattccaatgctgtggtcaagtctgtagaagataaagtgcatcaggatatggactgactgactacttactggggcatcttatgcttatgaaggtggactgttactgtttggcatctcaggatgctgaacttaatgtgtgcttgtgccttgggttttttttctccaaatgtgaaaacataattacagaatcttgtacagctctgtgtaaatcacttgtgtggtaggcacacggccccagattccatctgctgtgggagggaggaaaaacaaaagtattcctgaaaacagatccatttgattggttttttgtttgtttgtttaaatattttttattacatattttcttcaattacatttccaatgctatcccaaaagtcccccataccctcccccccacttccctacccactcattcccattttttttggccctggcgttcccctgtgctggggcatatacagtttgcgtgtccaatgggcctctctttccactgatggccgactaggccatcttttgatacatatgcagctagagtcaagagctctggggtactggttagttcatattgttgttccacctatagggttgcagatctctttagcaacttgggtactttctctagctcctccattgggggccctgtgatccatttgattgttaaaaccaactcgtgtgcaacaggaagtttggatagctaatgctgctacttctaggatgcatcattgaaatgttccaatctggttcaaaaattacaatagcattactatactatggtgttttatactggcacctgttttatatgttagatctctgttcatgaatatttcactcactgtgtgtgctattttttaaattagaaaacaggtaatatcttatttcttgaaaggaaattagatcattctattgaggtgcgtcattaagtaggagcggcctctaaggtacctgtgagacatgggaagaatagacagcagtgggtgtggtagggagtatgatgtttgaccgaaagttggaagcggtctgaaaaatatgctctagatttggattctagctacacatctcctgtgacgttaatgggtgtgcctctgattttttttttctttccaccctcaggggtgtgtgtgaaccttattgttttgattgtaagatctaaaaggcaatttgcacgagttttccattggctttgcattcaccctgatgtattgagactggaatatgaaactcgttttcattctgttgcctgctagtaaaaaaaaaaaaaaaaaaaaaaaagtaaagctcattattcacccttagccacaattttctattcccaaggcagttatcattggccatagtaaaaacaggttctagccacacagtcacagacatgagcacatgcacagacactgtcaccattcagcccttcctataccaccctatgcaggtgctgagtgaaaaagaagtttacaaagtggatcatgaaccaaaaaaataaaaatgaaaactaaaagccttgagtggactattgaagaagtttcttgtaggaaacatctggtgttgagggtttttttttgttgttgtttgtttgcttgtttgtttggattttccattttgggtttttgtttttctggtgctggagaataaaaccataggatcccttgaatgcttggtaggagacaggttagtaacatttgagtttgaaaacctgaaatgtatatgtatgtatatattcacatatgaccaaagaagtcagggatacattttgtttgattattatgacaggatttcactgcgtagctatcctgtaacttgctatgtagaacaggctggtcttgatctcagacatccaccagcctctgcttcttgagtgctgggattaaaagcctgcaccacaaccgcctggcaaggaccgactttctaagtagcctgttagaaccatctgtatacgagagagaaacagtgtcttctcaagctgcacagttattagtttaaaacaatcatttacccagtgatgatgttgcacatctgaaaagatggttatatagcacttgggacaaacctatctaaggggtttgaggcaataggtgtggctgaaatacagctcctgttgggaaactccagcatttctggcccagcactgctatctccttacctgaggcggttgcctctgttccagtattctttacctacacaacccaggataacacctgcataggtttctgccttccagttagtactatgggcttcataggacctccaaaaggattatctaccctgacagtccccaggacgatggtgctaggcttgttttgcaaatggagaatttgaaaaagttgagattcatatactaagtcagcaattaaaaaaaatatatgtcccctggcttctcctggtatatcctgtcttttctactttgtgttgctttgggggggggggatttcatatggactttgatgattgctctaacacactgaagcatgtccattaaggcaatgaaatgtaatccagtattggtaggcaaggggaagcaaggaggaccgaacactgactcttaatgaagactacctccccagtgatggctcttcttcatgtgtgaatgctctgtgagtcacatctgtgtgctgagaacgtagtgggttatataagactcattgccttgttttgtcttcttcgcaaagatccggagcatgttatctcattttatttcctcatatggtagacagaggagatgttagtaagcaggtgttatctgggcaggttacaacactaccctccagttactaaacgccaaactggatgctgaccctctcccatacttcctccttccccagcagtctttaaaagatatgtggaattagttccacttttacagatagggatgtgggccccagagagacttaagtgtcataaagataagggtcacaaagacttcaagactgtgacttcttagatccccatgctgccatttcattcctcccaggttattaatttgcactgaatctctagaaatagtctgagcctagccagcacagctcatttttttattttgtttgtttggttgttctgattttggttttgggggggttgtttttgtttgtttgtttgatatgggttagttttggttttggggttttggttttggttttcttttatctagccattcagtgattcagttactagaataggtaagaagggttttattaagagcatctgtccataactaatgattgccatgatttacatttatggcatatacaaaatcattaaaaatgctctacactatataaagaaagtagttactataatatggattagttcatatttttattctttatactacttttgattattttatatactattattattattattattaattattatattgggtgttgagacagggtttcagtccatagccctggctgttgtggaaatcattttgtagaccgggctgacctcgaaatcacagagctcctcatgcacttgtaaccccagggctgggatgaaaggccattatgcccagtgagtatttgatatcattactattatttacagtgtgaaagatggaaccttagggccttttgcatactgggccagcactgtgtctgagccccagcccctacttcagccccaaaatgtttatagttgttgtcatcctggctgggaaggccaggctgaagagatgacaataacacataaacctattaaactgtggggcggtaagggaaggacacctagtctgatgctggagcactttctaaggtggcactgccttttccacagaacagtctgacgcactgtgctgctgtcagagctttcttccaacagaaaccaaagtgaaataagcgtgctgctccagttagaatctggagtataaatgttgtatgtggactggaatgaataatagaaaacataagcgtcctgggatagttaatttgcctttccaagtaatgtacttgactgtgcatgagtggcttggacactggggagaagctgttctttgtgttctaaaataagcaggttacttggctactgctcaaactctaaataggtatatgggttgtagctatttgacctgaagcaacttgaagttcccttggttccctgtctggttttaaaagtggagccaaaacgaaagcatgaaggcataaaagttttctctcaaggttgtgcttcagttcgaatttgaatctggcaaaggagtgtaaggcaggcaggaaggagactcgtaagtattgtatcattcctttgtcagggtgttcatttgctagcaggaagtgttgtgacttgctctttaaagttgcaattgtaagaagaatgttgggtttccagatttcaagttctgggcgtgggagacagtcctcctagtgcttcaagaaaagaagcaggttcgctccggtcggaagggtaactattttaatatctttttttttttttgtcggtgctaactttgtaggttactgaatatttaagccgagcttgactgtttaaaaacatgaagttcttattttctgtttaggtaaatctttggaatcacttttaaaatcttgattgtttaagaataagtcagatttgttgtaagacatttttgaaattaagtatttaaccttttctgtgttctctatcctggtgatttttctcttcttcgatattgggaatgttctagcggctttattttctttttaaaaatgggtttgaagtcctacttacataatcttaacttgttaagttagatacctcaaagcttaattgatagaaattattatctggcattttgagtagaagggagaagagacaggattttaaatgcctttggttcttgttaaataattttttaaaaattctgtaataaagcttgtcatgctagaacgtgtcatgattagataagcatctctgctcttacaaagtggcttatgtcaaacagttgtcccagagtttacagttcacaacacacatgatttagatggtgttcctgtgccaaagcagtgctcatcttaaccagcagggttttctcttttttcttttttctttttctttttttttttttttttttttttggctcaagtcacgtaatttatttctttttcccagcaaggtaactttcttttctttttctttttctttttctttttttttctttttttttcatttatttatttttttattagatattttctttatatacatttcaaatgctaacctgaaagttccctataccctccctcgaccctgctccccacccacccactcccacttcttggccctggcattcccctgtgctgggacatataaactttgcaagacctagggacctctcttcccagtgatggccgactaggccatcttctgctacataccagcagggttttcaaacatacgcagcagaggagcttaaaagtcttaacttcttaaagctcctgacaaaaggaagtatagctagttatagaatgatcataactctgaggtaagtgagcatcacctatgtagtatgaaacattaagtctagggagaatatttaaactggtaaggtatatgaagcagacactttagtgacaaatagattctctgctaagcttaaagagggacttatgataatacttagcagtagttttgttttgagttgaaatatgttagctgctctgattcttgcttgcacatatgtacttcacacacgtccctgaagaacactcgtgacttcttaaatatggtagtttttacagctcaggaagctggaacatccctcggggatgaagggcaattcatgtcatgagcagcagcagcagcgttatttttgcacagaatatgggtaggagatgtatgctctaagtgctgggaaaacacaaaagggctgaaagctttcaaaagaggtgtgccttatgtcagtctaagacacaggtgcccattagcttggtaaacaaataagggtaaaaaaggagtaatatgagttgagtcttttgctaattatttttaatttttgagattataatataacaccatttctcctgtccctttcctccctcttggatgagtctttcttttgagtttgacataatctaaatcattaatgtgacttgcataaaaaaatctataaaacttttgggcatcaagcatttaaagaatgtcttcaatgtaagttaagtcgagcactgctattattggaagagttggtgaattatttttaaatagccagtgcttttagatcttatctgtgtttattaagagccattggggaaaggaaacttttacttaaaatggaagtatttgatattccttcaggaaatgacacagagttgggcaccctttgggatttgagtgactcatacatactgctactgaaaaagatcaattggaatctagcttatactattctagaatagactgcaaatattttcataagatggatttgtttcttccttgatatgtagtagtgaaaccaggagatgtctggtgttagattggaaacagttccagttagaaaggtagggcaaagaggagcaggacaggatgaagaaagagtggggcatctgtgggtaaaccctgagaaatggagtatctgctgggtttgtggatggtgattatattgttttctcatactttatatcttgaaaatgctaatagcacaagactcgacatataattagctaattgtataactaggtacatctatttgtaaacattcagttttgcctgtgaacagcaagcctgtcaaaacatgatccatgcgtatgtcgtattgtaaaggtgaaatgtgctgtgtgtgtgccaaaaggcagcaagaactgtttctaaacctctttctgtttgactttcagttacagtcacatcataggctgcaaacctcttgaagagttctgtagtagttcaaagtgtgaaaccagagtgaataagtaaaacgtgatcccaggccacttgcatgtgaagaatgtgactttgttgtgttctcaattttttccaaagttttctttaataatgcttgcaactttgtttatttagtcattcattcatttattctattggcgctgagaactgtgaggactgaacccttcatactgtttgagctagaggaacattctaccactaacctatactctgaatctccctagtttggcattgcttgtttggggtgctttgtttactttttttcagacagggtttccttatgtagcctatcctgtctttgaacttttgtgtagcccagggactcacaatcctcctgccccacactcacaaattctgtaactataggtatcagcatgcccagctcaagactgcattttggaaacccatttgaggtgactaggtagactaacttccagatagctaggtcagctcgctcccatcgatcctgatgcttatttattcagccagtttttggtgtgtacttgtgagccaagatacaaagtcatatatgtgatatcttctctgttttgaaggaaccaggagtgagtgtaagggacagaaaaggcagaaggtagaccccacactgtgggatttagggaggggttactggctaacaactgtgatcatgtgctgcatctcctttaaagtcgttgaacagaaaacttgaggttggggcatggtagtctatttctgtaatcacagaattgggaagcagaagcaagaaaatcagcagtctgaggccagcctagggtacatgagagtccttatctcaaaacaaaaacaaacaaacaaacacaaaaatttaggatggtataattggttgccagtattaaagaattagaaagtgggcaaagatagcctaggtttaatatctatgactttaaaagactctctgctcttttattcttttcagaaacctttaaaggtcatttgtgtatctgcagggatcgtgaggtgacacatgcaaaggagagtgacatctctacatttctgagaagatgggtatttaagttaaaagttttgaatacatccaagttaaaattatacttaaaggaagcaagttcatgggacagagcaaagggtaaaggaagtcttcatcaacagttgtccagaatataacagtttattagaaattgaaagcacactttgtcaaggaagtatacgcttgcccttgttaagatttaattacttgaagctgtagagaaagagatgcctccgtggttaagagcacttgctgctcttctgaggatcttgattcagttcccagcatccacatggctaatacaactatccattactcaagttccagtggaactgatgcccgcttttggcctctgtgggcacacagacatacatgcaggttaaaaaaatgctcaaaatagaattaaaagtaaatcattttagaaatatatatttttattatgtgtgtgtgttctacttgctttttctgagtatgcaccatatgcatctagtgccattggaaaccagatgaggatttcagatcccctggaactagagttacagtcagatttgatctaccatggggtgccgggaatcaaactaaaatcctttacaaaagcaaccagctttcttaactgctgagttctatctccagtcccaagtaataagatttttcaagttactttaagagtgtctttgaactcttctgtttcattatctgacatatttttttatattgtcattcacgtgtcatttggtggcacacctcattgaatctagggtctcatgaatgctaggcaagctctatcactggactctaaacccagcctcctctttacgttttgttttgaaacatgatctggctaagttatcctggttagtgttgaatttagaatcccttagcctcagctttccaagtaggtgggattataatgctgctccaccaggccaagtctctgctatttaaccagagtagcaccaagatgtggggctggaaaggtgattccctaggttaagagcacatactgctcttgcagaggacttaagttttattcccagtacccatgctaggcagctcccaagcacttctatctccacctgcaaggtgaacccatgtcctcggccttccatgtgtgtgcattcataaaataaatgaaatattcttggtttgtttcaaaatgaatgaaccaagaatatttgctacatatatccagattcttccaatcagtggttttagttctcagattccaattctttacaccccaaataacctatgtagctatactggaagttcaaatgctgttggtttggtgaggaatatctaagatgctctctgctttagtttcacagtgtgtggctgaagtgtcagacaaaattaccaaaagatgtaggcctactaattactgtgctaagtcaagtctgctgtatagttgaatattcctttcatagttttgttgttgttattgttgacattgagtataaaaaaacaactggacattgactataaaaaaaaaaacaattggcaagaccaggtatggtaataaatacctttaatccccaaacttagaagctgaggcaggtgaatatttgtgagttccagaccagcatggtctagacagtgacaccttatctcactggaaaaaaaaaaaaagcagttgacaagggacatgaaagagatgtagctcagttggtagcatgcacaagtaccctgggtttgatactcagcaccacataaaccaagtatgttgttgcgcacctgtaatcccagcattcaggatctagaaaaaggtgaacaagaagtttaaattaattttatagttggttacgtagtaaaattcaagccagcttggactaaatgagaccctgtctgaaaacaataatcaaacatggtaaaaaaaatatgtgtccaaaaatgtcataatgaaacgtagtataaattaataaaacaaaaagaaaaaagacccagaagaccaaagcgatcttcatgtttttttgtgcatatgtgcgcaggcacactggttacctatggtggttggaggactgcctctgctgtcagttctcactgtccacctcctgggaggcagggttacttcattgtttgccactaaatacaccagactagctggcctcaagagcctctggggattcttctatgtccaccctcatgctttaggaacactggtattttagatgcatgctattgtgctcagctttacttaggttctggttgtttgaacttgtgtccttgggcttacatgcaagctctctacccactgaaccttcttctcatccccaaatatacaagtattacaaatgctgatgtgctatggttagtgaattgtcaagaataaataaaaaagacaccatgtctttctgcattttataactaggagcctaaaaagagtgtgaggacatttgggatttgactgctttcttttgactttcaaagcattgaatgaaaatggtatgcagggccagacttggaggagctctcaagaggcagaggcaggtagatctctgagttcaaggccagcctggtctacagagttagtttcaggacagccagagttaaacagaaaaaccctctctctctctctctctctctctctcacgcacacacacacacacagagagagagagagagagagagagagagagagagggagagagagagagagagaacagaaagaaatggtgtatagatactttttaaagatttatttcatttatatgagtataccagaagagggcatcagatcccattacagatggttgtgaaccaccatgtggttgctgggaactgaactcaggacctctggaagaccagtcggtgcttttaacctctgagccatctccccaacccagaatagattctttaccaagattccacaaaagtttgcttcaagaagaaaagttctgaaagagaaataattctatatgaaaaagtaactgtatgatgactgactgtttggttatgattacattaacacaaggttattgctaagctttgtgacagaattctaaaatctgtgctgagctgaagagagagatcagaaagagttagagaactagtcatatcaggcatctcaagaagagtgttctcagctgggcggtggtggcgcacgcctttaatcccagcacttgggagacagaggcaggtggatttctgagttcaaggccagcctggtctacagagtgagttccaggacagccagggctacacagagaaaccctgtctcaaaaaacaaaaactaacaaacaaacaaaaaaaaaccaaacaacaacaaaaaagaagagtgttctcagtgggagaggaagcgcatagcctcacagagactcgaagtgccaggatagggggtctcctgaaatatcaagcaggtggcacacacttagtgcaggtacatgctgaatatggggatctggcataattaactggttgtgggccatttttaatttgaaagaaaatccaaatgcactgtgaccaaggtttatagtaatgaatacattctatttctaccttactgaatcttggggaaagaacattcattctgtaagttgttgagagtggttaggaatattgactgtttcaaataggtctggggtttgagacgtggttcatctctttctagctatgtgaatttgaagtaacttctctaaagtcagttgctctgttaagtgtgaatatcacacacacacacacacacacacacacaaagaaataaattttaatgtcaaagtaatatttccaagattatatttttctgagaagtaacttccattttgcatatgaagcaagtagcttaccccacagtaaatatgtcctctgcaattatgagtggctaaaatagaaacttagaaggacatgctgttacttcacataagttgttattacctatacttcaggcactacgatacaggttgagtggctgccaatgagatgtgatactgatcaatgagatatggatattttcatctaagagatttgataagactattaaatgctattcttgggatatatattttctataaataagtctatgttaattgggcatggtagttcatcctgataattaaagcaccttggagatagagataggaagatggtaaattcaaagctagcctgggatatatagaaagatcctagggagaaactactgaagcttctagaattgatcaaatgtgagaccataaagggacatgatggaaaaagaatctaagtttgtaagagagaatccaggaaatttaatgactgactcactcataggaaacaaactttgtgggcaaccagtgtctcaaatgtatttgtctggatactacaaaaaatagagaagttggatatgaagcctggtatatcaggaaagagagttggtgagggaaaggaaagaggccagggatgtgactcactgaagagagcatctgcctaacatgctccaggccttgggtttgagtcatagtactgagaagaggacgggaagagatggcagtgaggtcgaattgaataactcttgttgaccttcccctcctgtggtcaggtctcagctagactctgaccttctaaccctagactaaaagcccaagccttcctgtatatctgaagctccacatagcaccttctctgactcctaagtctagaacaggtctccagtctttaagacaaaggacatagccacatccatggaaatgttggctgacaactatcactcagtgcaaataactatgataactctagtatgatgtgctgttttcttctactggacaataaactcttctagagaaaagaggctttggggtcctaattgcttgtatgtgtggcactagacgcactgcctagtatgtattaagccttcagtgaaggcttggtgagtgtagatgagtcatgagtgaatgcgttagacactcaggttgagatctgccaaagtcattaggaaatatggcactggagtttgagtaatcacaggaagagatggtgagctttagcccacagagtggcacacacccatccaacctagagactggcactgttgactttcctaacttgaggaggaggcagggtggcagtttctgttggtataggtaggaatgtgaagtgtgggtgttccaaggcactgcatgctttggatggaagaaggtgacaaataatattcccctcttttgttgcctgctctagaattgtttgctaaaatgatggctacatctttgtggtttcctcctcttttctaacaaaagaatacatctttccatgttttcttcccctctttattgctttctccttaaggagtttttttttttaaacaaaacaaaactatttttttaaagatttatttacttacactgtagctgtctgtcttcagacacaccagaagagggagtcagatctcattatggatggttttgagccaccatgtggttactggaatttgaactcaggaccttcggaagagcagtcagtgctcttaaccactgagccatctgtccaccccctccttagggagttttaagtcatatactgggcaatctttaatcaacattttcccaattccatttgtacaaagtttactagtggctgtcaatgaagtctatggtgaatatcctgtaggttagttactagagtgtttgatcagcttctttgttttctgctgtgctggaaatgaaaggcaggatatttggtagacagtctctctaacactgagctactgattacccacaaaggagttcctgaatgtgccacccttcctcctgaccctgccatggtacagaatgacacatactagtaactccactgttcagtaagctacattccaaagatgatgaaccgggatcaggaccttcctccccgctccccacttcgaacagccttcaatttttgagtaatagtttcaggtagttttaggtaaaccattctcagcaagaatttgtgtccaaggtttctgtatagttacatgagccagtgcagtggtttcataattgctgtattgttagtcaaacgctgtaattagggatgacttcataagcataagattcttctatgggtgacgccctgatccgtaccctgttgtacaccgtatccttttatgaaaaaaaaaaaaaacccaaacaaggttttgtttccttttgttttatacccagaattgaaaatctgttttcctatatctcagatggttaggaaagagagctcccccgactcccgctgatttctctgtacagaacagtcaggcagacggaagagaacaaaggctttgcagcctgctttgccaaaatgaaatgtaggaaaacatatatagagagagttctgttcagtgagtattagtactctcatatcatatgaacaaagttcacatttgcacttttgtggtaagacaggctgcgagggtggggggcaggttaaaaaaaaagacatttcaaagagccatttccctgcctgtcatacattattaaacaggctttacacttgaatcttaatcttacttctttatcttttattcagcattcttgctcataagaaaatgttcagatggagaggaatgtgacagtattaacaagctgttgatgacttcaaagtatttatactaaagttacttttattttttaaaatgtatcgcttgcctacacctcaagttctgtctagaggctggccttgtgaaagggccaaattgagtcataggtaaaatgtgactgacaggtttttattatgctcatccttcttaaactaccctgagtgaaggcttgtaatttttatatatgagggaggcttgttatactctgtagtcaataattataagggagatgagacagctcttcatgtatcccatttaaaagacttttagtagagccaatgcctgatatttatagtctctcacaattacttatggagttatttattccccattttctttcactgaggatttgaagttgctgtataatgctttgtagcttataatttgccttcacatacgtcatctttaatctttatgaggatcccgggaaacaggtattattagtgctatttgcaaatgagaagctgagcctcagagaaatgaaataaactaactcatggacttacagttaggaagtagcaggaccagggtattgattgagggcctctcattgcatgcctaagaagaatatgtccttgagacagcaagcaatctccgggcatgacaagcattcaggaagtgtccagaagcagcaatgataacaaattatctgtttcacatgaaagccagtcttggatactttctttgggggaacttgtatgaaaatgaagacgaaaaaaaaaaaagaacagaaattgaaataatttcagtgagatctaagcatttcccaattctataagaagatcacatagttctatttccagcacccatggggtggggggagggggtgtcgggggtggcaggtcacaactgtctgcacctacagatgtagtggactgatgtcctcttctggcctctacaggcacagcactcaagatgtgcataaccaaacacacacacattcaaaaagaataataacatatttttttttgaagtatggtgtgaggataacaggggaactcaaaggcctgttgaggagggatttgaaaagggaggaagtggaacggaaagatgcccattcctgtcagctggaataagagtgacaagcacaaggtcaacaaggattgtaagtgctttaagtccaggcttaactctttccagtttcttactgatgagagagagaaaaaaaaaacagaaatgatatgtagtatgtgaatgaaatcagttgtatagttttattattgcttgaaatgtgttttactgacctattttagataattatggattcaaactacccaaactagaaagggcctttagagatagaggtcaaaccatatgttttagattttctcactcccaaggctgttgttcgatatatgtagttcatggaaatggctaataatttttcattaaaaacaggattggatgggcatggtggaataagcctttcattatagcttgatgaattgtagaggtaagaggattgccagtagtttgaagtcagctggatctacatagggagtgcccgtccagccagggatacagaatcagactccaatgtaaaacaaactgaaatgatcactgaaaatgtatgtaaataaaattataattaatcctatctaatatttttgtgattgacactgttaaacatcattagtatgatacataagacaaacttagaattcttaccatagggatacagctttatgttgtaggatgtttgaccatattatgaacctagagactgtgttctttactgaaaaaccttttcctacttgtggtgcagctcagccctagcacacacctttaatcccagaattttggacgcccacgcctttaatccaaaacaatgaaggtaaagatagtgcatagaaagaagaccaccatgttcataaacggtgtctaattgagtgacagacaaagtgactaataagatttgacggaatagggtattcttatctcacgagaagaaagaagaaagggaagcttccataaggggcagtgtaaagaggaggcagtctgttttactgggagaatttgacagaagagagaggacaagctagacgccagtaaaggcagaaagaaccagaagattagaaagaacatgttgccaacgtgagtatgaagacaagcagagccatttaggaggagggaagaaaagtcagattgaataagataacatggggaggagtttgagccagaatagctgagttgaaccagccagtgagagttccgaaaggaatagaaagggatgggtttatttagcagtaagtctcagaatccgaaaacattctaagcctaaataagattgtacagaggctagaaacgtccagatctaggcctagaagacagaggcagtaagccaccacgacaacaattacttcaagtgccacagaccctctgggtccctatgtttgcttggaacaggtctctggggcaggtgggcaaggcgtcggcgggtgacagacagactaacacgcaagattgtgtagaatctgaatgtaatgtcaggtcgagcatcaaattttttatacccaagaaataacaagaaaccaggcaaaatacaatccatcaatttacagtgacacaatacaaaaggaatgtatatatcaaaagaaggcggggaccaggccgctgccacaaagggtaaagctagtcacaaagggtaaaactgccacaggtgtaaagctagtctattgttaaacctaccaccaggggttctgcactagaagaccttttcatgaatactgcaatactccaaccccggtatttcttgggtcttcagaagaatttactaacttgcttctaatatgaagcttgctatacctagctgtagagatctctgtctcagtgggattccctagctctattatggtattctcttgtttgggtgagatttcctactgtccttagtaaatactttgcagaacagctctgagctactggctctgtcttttgtaatgcttaattagctactgaataggttaagttccttactgcattcttacaggattctaagctcggcttctgggaccttggaacactggggagatttaactctaacagaatttaatcttaaaagggatttataataaaatattaaaagagagttcgtagttacatacaccagactaatgtgggaatagggtatgagtatatgggtaaatgaaaacgccaaagctctaggaggtgagtttccgtgaaactcttttcctcgttaagtgcttactttcagcctgtcaagcagacttgagcagagggcgtggcattcaagcaaatacaacttacaggtacagctacatcttaatttattttaaaacattttatgacttttaaacaaagtggctactttattttgagtcaagattgtttgtttctttacctgtttatttaagatagggtgtcaccaaatagccttatcagcctggaacttgctgcttgaaacaaaatggccttaagctcatagcgactggctcacatctcccaagtgctggtattaaaggtgtaggtcaccgctgcttgactccacactttttcaaaatgtgttttctttttgagattagaatgtaatgacataattttttcctttcctccatacagcatctcccatggagagctctgcttcaattcagggcctccttggccttagttcttattatttaaaatgactacctctgggctcaggtgagagctcagttactacaatgcctacttagcattcctaaactgtaggtcccatccccagtactgaataaatcaggcaggacatggctgccatctcagcatttgcaaaaggaggtgaacagataagcctgagagaaggtcttagtcaaaacaagtttgaggccagcctgggctgcacgagatcctctatcaacaaacaaacaaacaaacaaacaaacaaatggtgaaaacgcacaatgacaaaatgtatgtctagctggagatacttcttacttttaaggcatttttatatttgagatcataatttacttttccctcttacctctcctccctttaatcctttccatgttcccactctatatcaaataaattcatgacctcttcttttttctccttgtctttattattgttgcatatatacatatatatttaaattataaatgtaaaatcatatgtagtagggctggtgagatggcttagtgggtaagagcgcccgactgctcttccgaaggtccggagttcaaatcccagcaaccacatggtggctcacaaccatctgtaacaagatccgacgccctcttctggagtgtctgaagacagctacagtgtacttacatataataaataaatctttaaaaaaaaatcatatgtagtatataatatcaacaatttaacatagtattgtgtgttaacatatactcgtggaatctatatcaaaaccaaatatacttcttttgactgctttctnnnnnnnnnnnnnnnnnnnnnnnnnnnnnnnnnnnnnnnnnnnnnnnnnnnnnnnnnnnnnnnnnnnnnnnnnnnnnnnnnnnnnnnnnnnnnnnnnnnnnnnnnnnnnnnnnnnnnnnnnnnnnnnnnnnnnnnnnnnnnnnnnnnnnnnnnnnnnnnnnnnnnnnnnnnnnnnnnnnnnnnnnnnnnnnnnnnnnnnnnnnnnnnnnnnnnnnnnnnnnnnnnnnnnnnnnnnnnnnnnnnnnnnnnnnnnnnnnnnnnnnnnnnnnnnnnnnnnnnnaccttcaccatggcgcgcgcgcacacacacacacacacacacacacacacacacacacacacaagattctgtcatacaatgcttttgagttatatcttggtgcattcttatcctcttttagtgtagcttaagattttatcattgggaagttgccaccaggtgagacctcctgagttcaactcccaggaaccacatactgaacagagaatctatgccaatagttgtcctctgacttctaaatgcatgctgtgacagacgtgtacccatacccacagaatggataactgtaaatatttctaaaaactaaactttattcttgattgattcagtttctttttcttttttctttttgttttttttttgttttttctttttttaatagatattttctttatttacattgcaaatgttatccccttttctggtttcccctccaaaaatcccctatcccctacccttttccctgctcaccaacccacccacttcttggccctggcattcccctatactggggcatagaaccttcacaggaccaagggcctctcttcccattgatgatcaactaggccattctcttctacatatgcagctagagccaggagtccctccttgtgtactctttgattggtggtttagtccctgggaactctaggattactggttagttcatattgtagttcctcctagggggctgcaaactccttcagctccttgggttctttctctagctccttcattgaggaccctgtgatcagtctaatggatggctatgagcatccacttctgtatttgccaggcactggcatagcctcacaagagagagctatatcagggtcttgtcagcaaaatctttctggcatctgcaatagtgcctgggtttggtggttgtttatgggatggatccccaggtggggcagtctctggatggtccttccttccatctcagctccaaactttgtctctgtaactcctttcatgggtattttgctccctcttctaaggagggacgaagtatccacactttagtttctttttctatatagcttttgatgaatgagaacttgccattgattgtttttttttattttgggtgtagatacatggttacctattcagagtgttttagtactttgcaagccatcttactgtgtttgtaatttagcaaatgctagtgttacatattcttcatgaacttttttgaagaatgagccttttgtttccctttagatctttacatggatgagatggcgaccacccagatttccaaagatgagcttgatgaactcaaagaagcctttgcaaaagttggtgagtgcattttataccacaacatattgttagaaattaccataaatcagcctttatctgagaaatatagtgagattgactccaaaaatcaaggttagggttagatggataaagttttagacattgtagtcaaaactatattaattctggcagacattactcaacagttaatggtgcatatctgaattcaatcctgaagacccacttggtggaaggagggaacttgcaggagcaagttgttatgtggactctgtgtgtgtgtgtgtgtgtataggtatgtatgtataaattttaaaaattttaaaatattttaatagaatctagtatttaatatggtcaatcatttttagctcagagtcctagtcattaaatctgtcctgctgtggcacttgaaaatttaatgacatatgtatgttattagaatattttccatatcatgttttttctaaggggagtatttggagtgaccgctgaagcattacttagatttcactgttcctgtggtattttatttgttgaggaaagagtctcaatctgtatccaggctagccttgaactcattatgtatactgttcatccttctaagaagcatcaaatgaagagggaaaggcatattgtgatgtcattgttttcccctggaacggagtattgaacccaaaatttcatgcatggcaggcaagtcctctacagctgagctgcatcctcagccattaatattttcagacagtctcactgagctatcctgggtgatataaactgtgatcctctcacctaacccaagaatcataattatagatacatgccaacatatatggcttgttttcttttttgtgtatttgtggtatacatatatactagaccaactaagcctataagtagcatgaccatcttttcctttcactttttattttgagacaaggtctcatacccttcccaaactgaccttgaactgactccaaaggccagccagatcttgaatttgctctctatgcctcttcttcggcttctccagtagctggggttgcaagcctgtgacaccaggtcaagttttattttgttttgaaccttttaacatcatatcacatgccttccaattgagtagctatggaagcaatgcatagtgttttcattctatgcaaagttcaagtccataaaggataaagtgaatggagtgaaaactaactactgatacaaatcctcacaagacacagattgtgcttaagctttggctctcaacctgtggctgtaaacactttgcaaaacctctgtctccaaaaatgtctacattataattcataacagtagcaaagttacagttatgaaacagcaacaaaaataattttgtagttgggggccacccaacacgaggaacgccattaaaagcatttttctgcattagaaaggttgaaaccccctcgcttgaggtgaactgaaatcaaagggagtaaagttagaatataatggtttgttatttaaatcagaattactctgaaactctaaaagtcctattagtataacatttaaaatgatagctatttctgttccctttacattcactcattcattcattcattcattcatttttgaaacagtctcttttagagcagaatggcctccagattcactccaaatagtccacgatgacttcaaactcttattcccatcctcccactctgtagtgctgagattgaagacattaccacctgatttaggattttattgctgtgaagagacaccatgaccttattaaaaaaccaaacaaacattgaattggcagtggcttatagttcagaggtttagtccattattgtcatggcaggatggatggcatgaagacagacattgtgctgaaggtatagttgagagttctacatcttgatctacaggcaccagaaggagactgtgtatatactgagcatagcttaaacatataagaccatgaagcctgcctacaaggccgcacctaatccaacaaggctatataccccctaatagtgccactccctatgggccaggtattcaaacacatgaatctgggggcggggggcaaactttttcaaaccaccaggcttttatgcatactatgcaaactctccatcaactgagctacatccctacatatgatcctaatttctgtaatggtatttatattaatagaaacagcataccgtgaagagaataataacctccctagctagagtggctattcatatcctgtcataaggctagacagaaaaggttaaactgttctgaatcatcactttatctgtgtatattttacaaggcaatatattaacttgctgcacatatgactcactgggagaatggagttacataggtagatattcaactgatgaaaaatagaaaatgagtccttggtcataagaggtggtgttattttttattcatattttctctttcatcaatatcccattagaactgttcttaccataattgtttcagaaacatattttctcccccccccccttttttggcattttcgagacagggtttctctctgtagttctggctgtcctgaaactcactctgtagaccaggctggcctcgaactcagaaatctgcctgcctctgcctcccaagtgctgggattaaaggcgtgtgacaccactgcccggctttctttcttccttatcttttgtttacattcatcttttagtgttaggaacagtttgtttctttatgtgttagaatagggaccatgaattactatgcctagcctcctgaaggaaggccttgacctcatatattgccttgtagaaatatttgtgttcactgtttctttaaattaacattaaatgagatgtgatttacttgatgggacttggagtactttttttttctatttatagtgttgggggttttgggtttctttatttttttcattttttttattagatttttttttcctttacgtttcagatgctatcccaaaagtcccctataccctctccccaccctgcttccctacctacccattcccacttcttggccctggcgttcccctgtactggggcatgtgaagtttgtaagaccaaggggactccctttggagtactttttatgagttagcagcataactgttttgataagatataatagagaattgaccaattattgccacggtaagaacaagattaaaatatacttactaaggagggatcaattagaattgtggtccttaaccttcctaatgctgtgatcctttgaaacagttcctcatgtcctagtgacaccccaaccataaaattatttcattgataattcattaatataattttgctacttttatgtgttataatataagtagatgatatgcatgatatctgatatgcacccccctgtaaaagggttgtttgacaccctcagtggtcaagacgcacatgttaagaaccattggattagaatttttactgaaagaaattcagaacagcagcaaaaacaaaagcctatcactgtgtgagtctttgaatggcataggcaggaggtggggatgtatgaattactgaaacctatacccacaacaggttttgctctacaaccccaaactaatatatacaagctgtccctcaaaaattaggaggccagtatttctgcctgttttgattaatactcttttttaaatttccactgtaaatacctagtgcagtgttgtctacatgttaggttctcaataaatacttaattacttacataccaaagaaacacagtcttttgatatactgggattttaccagtatcaattgtacactcaaaaggtccttgctgggaagaatttattactaaagtttttttgggcattacaccaaagcacataaaagcagcatggggtgtctgtgagggtgagtgtgtatttgtctgtgggggtggggtactgtgtggaaaatgcttgtgcagagtctatctttcagaaactcattgaaaagctctcctgactctggcttttcctacaaacctctgtagtttttacatggcgttggatacagaatcctcaagaggcagctctcaaaggtgttgtggaactaattttttaatttaaggatcccttatttatgaaacaaagctctagaacttattttccttgccattgtttcctactctgtgtggaaagggagagcagagacaattactttgtctcacttcatttgtgacaaaatatggaaatcgttttccttatctattaacaataatagccttgattatctgcttagaaactcaacaaaatcacagtgggcagagaaaaatctctgtaatcatgactaatcacaggttttgttcaatcaattaatagtgcttcgaaactctttaccagcaataaattgagtattaggatttaaagttctttcactagcttcttgcacctgctctaatcatatgcaattattttaattataccaacaattgtctcaggatttccctctgggttagtggaaaccatagtgctaccctttttccccaacacaaacttttcctgttttaatgtaaatgctgacatcctgcatggttttataaaagagaataaagcttggtatgttgaggcctgccaggcatccttgcagtttataatccttgtgctagagtggctacaggaatatctcaagagtacgaggttagccaaggctagatagggagaccctgactctatatttttcaagccagaagtgatggcacacacctctaatcccactacttggccacatctctgagagttcaaaaccctgtttcaaaataaataatcttgatagatagatagatagatagatagatagatagatagatagatagatagatagatagatagatgtagttttcctcctttgggcagtgacagtacatggctttaagcctagtactgggaaggcagaagcaggtgaatctctgtttgttggaggctagcctggtctaagaagtctcaagacagacaggggtgcatacagagaaccctgcctcaaaaaccacactacacacacacaatgtgtatatgtgattttgttttcattttatatattaatttacaaagtgaatgtttaccagatacaagatgtcttttacattctaagacttcaattttatattgttacttccctcaaaaattgaattttggatggcttaaaatactctcagtttgactttggtctgttgcaagaccactttcttaaaaataggactttggagtgctggaaaggtgactcagggtttatagctactcttgtaataggtctgggttcaattctcagaaccaacatagggggttcacaaccatctacaactccaagtccagatcagacaccctcttttcctcttctgaactctgtggacagctgcaatcacgtgtatacatattccacaacacacacacataattacaacaaagatatatctataaaaatagtaataaaatatgattttttttcttccccagagcatgctctatctagtaaacttttgtaaagatgaaagtcaggatatttgaaacacaagaatactggggttgcttaagtggccaggaatagtatgggtgcattcctttgaggttcccaccaaatgaagccaaaaacattttggttgtggtgattttagagtaccacatttctctcagtccagaaaatggaactgtttccaattacttgatgttctctagtatatagaaaccacatcatgatgtcacacaaaaaaatggcagttgagtccagattactttcaatgttaaataaaactacacagcacacatttgtttaattataccttcaaatagaaaactgcaaaaactaggaggcagttctgtcggtaagttgtagagctattggttagtttatagatggaactgggcattcacacacacacttacaaatgtgggggggggatgtatttataggcccaaactaacagaaatgaatgaacaagcagataaatgaataaaactgggcatggtgatatatgccagcaagtcaaaaatttagaagtagagacaagaagagggattcaaggctagtcttagctacataacaagtacaagaccagcatgtactaccttctattctgtctcctaatactaaataagtaaagaaatactgcatctcaactaaaagataaattagctagtgttctttcactgtgctgtgtggtccattatcaatgcaatattagaagtggatgtttggggatagcctggagaccatgtgctgatggaaagttctctgaggacctgtgtgaggattcgagctggaccgcacacatgtgagaacatgaccacaaatatgtgtatgtcaatatgtttagagagaagagagtagcagcaggtaggcagctatcagcaaactgctagaaacatacaggaaaagattagaaacatttctgaatacccattcctggccctctagattgctcaagtgttcacatctaggtgaactccacctttggggatccactcctgaaagtccaatataaaagatgaataagcaagctctagtctaccctagactagactcattaaatatccacttatgttcattatgttcctatcttagaaagtagaagctgagctacagggttagatccacatctgaagatatatatagtagcatcctttccttggcatttttccaagacagggctctctgggtagccatgaccatcctagaacttgctctgtataccaggctggcccagaactcagagattgacctatctctgcttcctgagtgctggggttaaaggtgcccacaagcagtatccagctaagttttcaaacttcaatacctaatgaaagcttggttttactacttggaccttagggtgtaataaagaaaatatatgtatatatgctcctgtcaaaaaaaccttttggtcagttgtgttccaaaaattgttttgggatttattaattttgtgtgttttctgtgtgtgtgtgtgtgtgtctgtgtgtgtgtgtgtctgtgtatgtgtgtgtctgtgtgtgtgtgtatgtgtgtgtctgtgtgtgtgtgtgtgtctgtgtgtgtgtgtgtgcgccacatatgtgtctggtacctgcagaggtaagaaagggatgtcagattccttggaacaaaagttctgaatgttgacaagctatcagatgggtgctgagaagtaagactgagttctctgcaagagcaacaagtactcataaatactgaaccatctctccagcccctggtcaagtctataaatcaatgattttgtattgtagactttcaacttttatagactttcaacatcatgtgtgtttctgtaaatccattattagacacatacattctctatcaatgttttttaatttaaaacattttaagaatacattaggtaagctaaactgaaatttttaaaattccagccttttcaaaagattgtatgactgaactggattgattttcttcttttaattgtggacactgtccacaatgggttaatgtaggagccatatgtgcattaaatatgatggcccacagttgcaacctcttttttagaaaaacactatatttagacagattcaagaagagttaaagcaacacacacacacacacacacacacacacacacacacacacacactccctgagggtcaaaggaaatcctcatttttcttactgtcagatttataacacaaagtagcaccttaaaagatgcttttgaagggatgggttatactgcataccacctaggcaagggcactgtaaaacagcagccaaaatcaaaaccacttgaattctggctcaaccttctccagacaaggacttaaaatagcttaaataacaggatgcaaggggagggaaaacatttccttttaaggatgtgcattcttggtgtgattcagacttctgcaggaacatggcaggaacatgagtttgtttgctttgaggtaacttgggggagggtgttgaaggaggtaactggcatttaaactaatgcttggtaaaaagagaagaatgagatttcctttaaaacaaaatgcagatgtgactctacatgtgtcatctgagacacggagagacagatggagagtgaattccttgtaaccaatagttagtgtgtttctgatgaattcagcagccagaggaaaagatggttctgcctagtacaatcttgagtgcctcctagtgattttttgcccaagtataatgtttttcagtgtttgttttttaaataaactttttacatttgttaaatgttagctcattactttgtgcaagcacttggtttggcagctaggtagccttccttttttttccccctgtggcatgttagtgtccctataataatcatattttcagaactacaatgctcgtagaagcattgtgactgttgtggataacataagctatatgcaaatgatttatatttttaatcagtcattagagaatgtggtggtataagaggcaagtcttccaaatacaaagcctcttccttctcacatatatatatatatatatatatatatatatatatatatatatatatatatatatatagtgtgtagtgagaagcagtgagtgagccagaaatgggttccagaatgttggcagctttaatgagaaaataaagaggtaccatcgtgcctgctgattgcaattttagtttccagttaaaaccgcttttgatctgggtctgtttcttagatgctcatattattaaaatgttatgttcatatcaaattcagaatgggaaaagttcaccatcaaccatgaccttagctctcggtgaataacgttactggtaggatggattctggtgaaaccagcgtgctccctcatttctctggaacgttagattgctgtcattgcttcagagatgtactgctaggtttgatttctgcttttttaaactggagattggaaagacaatcacataaaatgcttggaatataattacacactcttctgtgccttgtaaggattttaccagctgggaggttttgtaaaattaattcttagcggcggccattttctggctctctctgccttcttaaagacattgaaattgttcccttccagtccagtcctaaggacgaccgacccattgtgatttgcttaatacaagcaccaaaatgccacaatgtaaataggattagcatctactgagaacatacaagaaggtagccaagtagaatttaggaaagaaagatcatacagtgatacacaatttctcccttccccacacctctcttttcttaggacttggtttctctgtgtaaccctggcctacttaggctctctctgtagaccaggctggcctcaaacactgggatctacctgcctctgcctcctgagtattgggattaaagaaaggtgtgtaccattgcctggctagatgatacacattctagtcgctaaaggtgaaaaatgtaaatatcctcagggttgtcaacgatgtacaaaaatttaagagatattggttcaagtgagacccaagggttttaacttaatttaacttctcatttattttcttcttttatttaggcccagccttgtgtctctgacagatggctatggtcacttagaaaaccaaattacacatcaggtggttgctgggtggggacaggattagaacaaagggagaaagattaaatgttatttgagagatatctccgtcaagttttggcttcctgatgaactggcatttcgtctgttttgggtgctttttctgtattttttggtcttcgctgctaagttttgttttgaaaacactcatctaggattagagcattcttcctgcagttaatgtctgagaattagtttgtgcagtattttagagcattgactctagagcgtggggcccagcaatagagctcgtccttagcatgcataaagccccagtgctgggactaaaggtgtccaccccaactatccctgccttggcagaacttccctaatcaaattcctaatcaaaccatttccatcttggtcatcttggtccatttgcttatttgtagattattacttcccttacattgtaatatacctaagctacagtagcctaaagattattagataatttatagaatcattttaatgcctgctttactcagtactccattctcttgaattgtgtttgtcttagaataacgtttgtttatattaactcaaaaaactggcctccacagctatgttaccccaggtcagatgtgctttgacataaaaatctgtgtgaaaccataaaacctattttggaaaaagaaaagaatacacataaaaatcctacatgctgcatagagatagtagaaattgttacaccatgacacagtttgttggtgtttaaagtattatttctaagactcctcttgtttctatgatttaataatagctttacacactagaaactatactttcttataatcagggatgctatttctaagtaaagctttgtacacatttttaaaaatacaaggtacacgatatgaacaaaacattgccctttcagttaaaacagacattcctcctctgtacatccttagattccaaaggataaaaaaatattgtaattaggcaggcatgtaaaatgatgatattcttacaaatttatttctaatcttttttctgttttatctttctgtttgtttcttggctatctttttccttccttttcacaaagatctcaacagcaatggattcatttgcgactatgagcttcatgagcttttcaaggaagctaatatgccactgcccggatataaagtgagagaaattattcagaaactcatggtggatggtgacagaaataaagatgggaagatcagctttaatgagtttgtttatgtaagtatatccaaatcggaatatgaaaattcattgttgttccactgtatgctgggaaacaaagtataaataccactgtattgatggttaactatcatattaatactctactaccttgtaacatttttgtcattctgacttctaaatttaaattcttcagctattagaatatttttaaaaatatgaaaaaatggtacattgaaaaaaccaaagctatagcacaatgctcacttgtggccagaaacaatctcctttggggcatcattagagagcatctattaagatgctaaataacagctttgaggcattctttctcttccccatatagaagatcatggtacacaagtttactgatatcatatgactgagtcttagaagtttcctgagctaaagtttctaatgaaaaggtgttttctcccacaccccactacttgtaatatttaaatgtctcgttttccccagggtgaccatattgataattaaaagctagaagtatatctttcggtatgtttggagaagtgtttacaattttgttttcttgtatagtatcatcaaatattcctcaaggtttatggctaatttcataacacttctcctccataaacacttagttcagttcctgtagcatgtgtgacaggcatgagcttctttatcaagatagaactattttagctgcctgaattacagccaacattgtagtgaattacagattttcagtctagatttgttaagaaattattgcatgatgacattttaaatagctgttgcttcttctcacttaagaacacccttaagggttagcaagatagtttgacatttaagagtactagctgctcctccagactacctaggttcagttcaaatggaggcttatgactaagtgtttgtgattccagttgcacaggaaatgcgcccacttctggtttccctaggcactgcacatgagttggacacagcctataaaccaaggcactggtggcatatgcctttaattacaggatttaggagacagaggcagacggatatttgtgagttcaaggccaacctggtctaaagagctaattctagaaagcaaaagttatacagtgaagccctgtctcacaggggaaaaaaataattgaaaagaacacccttaaggcagacatggtggtacagacctttctcaagttcgagacagtcattgctgcaaagagagaccctgcctcagataagaaacattcatggttggggttttgtttttgtgttggggtttgctttatttagtttgttttgagacagtctgaatttaaagtcatgatcatcctgccttggcctccagagagcttacttagcctacctctagattgtatggatgttactatttatttatttatttatttatttatttattgccttgttttttaagactacctttggctgtgtagctcagactggcctccagtttgttatttcttcctgcctcagcatccccagtgctgggattttaggagcatgctgtactgctcctataaccggtgattattttaagcttgaatttgagttgatcttgcaaggcattgttttcagtatactgcaaactaggaattactttttcctatttgtcaccaagatcccagcgtgcatgttctccttttccatacttcatcttggcaccaatacatctgctgttatagcatatgctctcatcagttaccatgactcattatgacaactgaaattcagatatgttccctctgagcagaactaacgcaaagaacacagcatatggtctggaaacaaatagactacatagggctgtagagatggcagtggttgagagcacagattgcttttccagaggacccaggttcaagtaccaccacccacatagcagctcacaactgtctgtaattccaggatctacactctcacgatttcttaaaaccaaatagacctgtcagatgtggggaatgggtggtcgttactgaaaaatacagacgtgtatcattattatacttacacagttcttgccattttccttgtgaaaaactgatttcctcccatcatttctgtctccagttatgtccaaagcatttgctttgaattctgtgttcaatagtaagttacaaatgttttgcggtgtcagcacttgcatgtctctgttcgtactttgcatgtgtcgctgtgaatttcaagcagatcagagaagttgggaactatggttaggtgcttttcatataacttatagctgagagtttgttaactactaggaagaagcagcctaagccattagcatctgtactctaactggtaatgttgaggacaccattataaacttgtctaccaaaaaaatgatcatgataaaactttcaattttgtattttttaaagactgcggtttctacacatcatttagtggcttttaagtgacaaggtaatgttgacttagtatgtactttaaaagtagaggcataataatttgggcaaaaccaaggattttttggaataaaaaagtaaggaggggctggagagttggcatggtggttaagagcactagttattcttccacaggtcctaagttcaattcccagcacccatacggtgactcagaactatccagtatgatctgatgccctcttctgtcatgcagacatacaggaaaacagcagtcaaatacataaataaatataacaaacgacaaaagaatatattttttagaaaattaaggagggcatttaagatcaaagtaatatttagaaggatttccactctcttgtttgagacaggatctgtctctgtagccctggttgtcctggaactggctacgttgaccaggctggcctcagactcacagaggtggacctgcctttgcctcacgtgctacaattaaaaatgtgatcacggctgggtggtggtggcgcacgcctttgatcccagcacttgggaagcaagaggcaggcggatttctgagttcgaggccagcctggtctacagagtgagttccaatacagccagggatacacagagaaaccctgtctcgaaaaaacaaaacaaaacaaacaaacaaaaaaatgtgatcactttgccttgcttcaacatgaaacaagcatatgaaaatgaaagtgagttgaccagcactgtctggagggtgagaagcctttctttgttggtcctctgctaatcaagacccttgaactgggacctgagaaatggctcagcagcactggctgcttctccagaagtcccagcactgaaacaatctgtgactctagttccaagaaatccattgccctattctggtctccaaggacatcactaagatgttaaagtgacccacataaactatcataatcctgtggccatcactgttagaagaaagggggacattgtaatggctgtccactctcatgtgctttgctgctgatttaatgctttccaagttctcagagaaaattgactcatggccgaactacactagaaccagagactgcaactcttttttttttaattaggtattttcctcaattacatttccaatgctatcccaaaagtcccccataccctcccacccactcccctacccacccactcccactttttggccctggcgttcccctgtactggggcatataaagtttgcatgtccaatgggcctctctttccagtgatggccgactaggccatcttttgatacatatgcagctagagtcaagagctccggggtactggttagttcatattgttgttccacctatagcgttgcagaaccctttagctccttggatacattctctagctcctccatttggggtcctgtgatccatccaatagctgactgcaacccttgctttagcataaggaaaggaaaagaagggcagtggtggcgcacgcctttgatcccagcgctcaggaggcagaggtagtggttttctgagttcaaagctagcctgatctacagagtgagttctaggacagcaagggctacacagaaggaccctgtctggaaaaaaaagaaagaaaaaagaaaaagaaacatgttctccgatgctaggtttggtgttaggtgaagtagagtataaagcagtattcagtgtaagctaagctacaaagtatatcagtttctattttcaaggatagatgaagggcagaagaggctcctaatacagtaaacaaacttcaaagccaggactgtaattaatacttgtttttgttttgagtatcacaagttgaagttactagccttgtttatttatttatttatttatttatttattttagttttttgagggagatttcctctgtgtaagaactcaagctctcctggaactctctgtagaccaggctggcctcgcactcacggagatctgcctgcctctgcctcccaagtgctgggattaaaggcatctgctgtcatgccgtgctactgggctttttaaatgttgaccttttttctatttttacttttcttgtgctatgatttaaacactgggggccttgcacatgctaggtaaatgttctaccactgaaacatatatacagaacgctaggttttatacttataaaactaacacaattgtttcctctgattgtgaaagactgattggacaatatattttgaaacagagatgattacattcatttcttgttttcacagtgataaacttgcctttacatactggtaataagtctttaaccttttgctaataaattcggcccacaggattaatcatttcaagatagcaaagtacttagaacaatgtcaggcacagagtaaatgctccatagctcttagtggtttaaataattattgctacttttattgatggattcctttgagccagggtctcaccaagttacctaggctggacaaacctcattgattccgtggattttctcgctctcagcctggagcaattgtggggttcctggccccttactactctctctctctctctctctccctcctatttaaaatattttctcctatttaaaataaatacaccagtacacttttccaactttaggccggcaacaatttccataagaaggaaaaattcaaacctgctaggttggaaacaaaccccatactggaaatagtcaatattttctgcaaattctttctgcaatctttccttcttaagtcatacgcctctgcactgctcggcgttggctgcttggcttgtgcaggactccctttggggtcaaaagaccttaagtgcctgctggagattttgagagatagccggtgaggcttaggaaaggaagagccagagatgccagcaaagagactaaaagatgcataagatgagagtggctgtttgccttctgagcgtagtacacaaggaaattgtctccagatgataaataccaactttgtcctcaagaagggaaaacagcataacacagagaactcattagggtcacaagtgagccttgaaaaacttccctgggcatcctagcagtcttgtgctggctctgatttctgagatgcctgtgaagccaaagcctatactccaacggttttgtcatccaatccagtaatgccttccctgagtagaaagaaaaatgcagactttcatggagtgcaccaatataatgtatgaattgtctttttaaaaatattattaaattcatttactcactttacaacccaataaatatcgacccttcctctcctcccaggacccctcaagcaagtcagccctcccccattttcaacttccccgaagcccccctctgtgtcaaatatcacccccacacactctccccaccgtccacacacctatcccacccctaccccccccacacacacacacatcaagtcactgcaggactaggggcatcctctcccactgaggccagacaaggctatccttttaggggttcaggatccaaagatagacaggcatgcaacaagctcatgggcagacagcctctgtttcagttgttgggggaaccccataaagaccaagtgactcatctgctacataggtgctaggaggcctacctaggtctagcctgtgctcactctttggtcggtaattcagactctgggagcctctgagggtccaggttagttgactctgatgtatgaattttcaatgctcttattaaaaaaaaaaaaaaagaaagaaagaaaagaaaaagaaatagttataatgagatctggtgccctcttctggcgtgcaggtatgcatgcaggcagaacactatacatactacatcttgttttaaaaaagggggaaaaaagttttaaactaagaaacagaacaaaatactatgaaataaaatttgaggttggctgaaatgtgtttggaaatatttggaaggcagaatttggaatatagttcagtggtaaactagactctgtcctcagcaccacaggaaagggcatttaacaaatttaattagactttccacatcattcacaagcactgcttcccatacgtatgaaaaaaataggctattttaccacaaagatattcttattgcattattcttctctctctctctctctctctctctctccatatatatatatatatatatatatatatatatatatatatatatatatggaatatagtggatatatcattcagttagaatcatgatcactgaaacaacttaatttgttagaagactacagtgtgtaaagcagaggcacagagaataagaaaaacagctcttcctgtgttcctccgaagcagctgtaacaggttttggtctggcactggtgactggtatgtttggtatgaggaaatgcacacctgtccaatttcaagattttttttttttttttttacaaaatggagtggagtttcaaattaggaagactaactttttactgagcagatactttttttttctttgttttgttttatttgagaaagtgtctcgatctgtaaatcaagcagactttgaactcctggcaatcctcctgctttgatctcctgaagtgcagggattacaaatatgagccaccaggctctatttttgttttgtttttgagacatggggctcattctggctatagcataaaatttcaacttttgaggacacagcattaaaactagaggaagcaactgtgcacagtggcccacgcatttaggcccatcactcacgaggaagagacaggagatctctgagttcaaggctagccaggcctacaggatgagttccagaatggtgaaaggtacacagagaaacctggtctcaaaactaccacacacatgcacacttgcaaaaagctacagggaacttaattgttaaaagctaattgcacagtattttcctaaacaaaagtatgattatggagccaaagttgggatttgagaatagtagtgggacaatatgactgtgataatcagtgacaatgtccattacagaaagtcccttttttgttgtgcacatatgtaatcccagcacttgggaaggcagaagcaagttagatctaacaaaccaacagcaacaaaaaggcccattctcttagtggattaattacaaaagggctttgcccgaagcttgcttgttattgcatgggctagactgttccagtctgcactcactactgtactttgtgaacttcaactaaaggtaacctccttcagggactagaatggcactgtccacgagtcagcagcactaaaagcctttgacatgggttatgttctgctcagcaattctttctattagatattttcttcatttacgtttcaaatgctatccctaaagccccctataccctccctctgccctgttctccaacccatccactcctgcttcctggccctggcattcccctgtactggggcatatgatcttcacaagaccaagtgcctctcttcccaatgatggccgactaggccatcctctgctacatatgcaactagagacacagctctgggggtactggttagttcatattgttgatcctcctatagggttgcagacccattcagctccttgggtactttctctagctcccgttcagcaattcttttgtttatggctccacttagagattctaaaggcatctagcaaaatttcatgaccctgaaggatggctcagtgggtaaagcatttgcttagcaagcccactgacctgaatttgatctccggagtgcatggaaaggtggcaggagagaaccagcacctcagaattgtcctctgacctctatgtgtgtacccctccagtaaaaaaagaatgtttaccaagttgccagacttgttcctagttgacagtggtaaattgaagcatgcacattgtaaacagggggaaattttggaaggagacaaatttgagaatatcaagagtatagagaaggattttaaagatgctcattcatttatattattaaacctggatagaaagcttacatttttctaccctgtttaacttttggtgctggagaggtggctcagtggttaacagcaatgtgtgttcttcaggggaacccgggttcaattcccatgcacccacgtggcagctcaacaccatctgtagctccagttctagtggacctggaaccttcagagacatacatgcaggaaaaacaccaaagtacataaaataaaaataaatcttttctaaaaattgaaaatttatttttaaaaagttagcatgttatccatgttctgcaatgggaagaaaagctgaactcaaatgcccaaataggacactcattaaaaagccttagatgatccgggcagtggtggtgcacacctttaatcccagcactcgggaggcagaggcaggcggatttctgagttcgaggccagcctgatctacaaagtgagttccaggacagccatggctacacagagaaaaccctgtcttaaaaaaacaaacaaacaaacaaacaaacaaacaaagccttaaatgagtgtgttttctcttctgtctccttcctcacataactgaggtcgaaaccctagcacttatgtgaacaaggcaagtgctctgccactgatcaatcttcacagttctaatttcactttgttttaaagatttctttatttacctattttatgtatgtgagtacactgtatctgtcttcagacacaccagaagaggccatcggatcccattgcagatggttgtgagtcatcgcgtggttgctgggatttgaactcaggacctctggaagagcagtcggtgctcttaaccgctgagccatctctccagccctaatttccctttttgtgttgtttgttttttgagacagggtttctctgtgtaatagccctggatgtcctagaactcactgtagaccaagctggcctagaattcagagatcatcctgtctctgcctccagagtgctgagattaaaggtgtgctctactgcccagtcgaaattcagttttaatttttatttttagacaaggtctcactgtgttgtccaaagtggccatagacttgcagtccttctgcttcatgacagctctttttagtcagtgtctacgccattactccccatccccttcttgaggtaaagattttctacattgccctagcaaccaggaacctcttacagaagtccagctggccccaaacttgtacagatcctcttgcctctgccccctgggttttatgattacaaatgtgcccaccatgtcctggctttgttgtctatgatctttcttattttttagaatagtttgttgagtccaccccattagagcagtggacaatgccatattaacaatattgcctacttcctactttctctccttgagaatcatctatgccacgagcacttttgtccattattactctgttgcttttgattgagtgaactcttagctaccacattatgccacaaaatacttttttggtcgagtcatacatttttgtctgtaggtaagaattgtgactgaagaaaggaccacccatcagcctcttctaagaaaagaacaaagctatgcttcaccatgggaaattaacagttttacctgtgcctttgaactacactttttttttttttacttaaaagtgcattcaatgcatgcagcactgaatgtgtttggcgagtgtgtgaaattgacgcttcatctttagtaacagccctgtagccttgcaaaaacccaagccagttttcctctttcatgctcaccacctgtgaagaatactgtaggtaatagacagatacaacggagttcaatgtgcttgttcttgtgcccacttgaaaatggtgactcaacacccttgttttcattgatagattttccaagaggtaaagagcagtgatatcgctaaaaccttccgaaaggccatcaacaggaaagaagggatttgtgctctgggagggacatcagagttgtccagtgaagggacccagcattcctattcaggtaatcatgacatggttgtgcttaggtgggtacagcgcactgggcaggtacctactgtcatgccttaaaaagcatgtttctctaattaaatagactaagtagtcttagtggcatggttgggtcttgggtcacatattggtcagaaagctatggtagacattggtggcttgtaagacacagagtaaaatccaagtaatagtagtctttattacagtggaggtgtacagtaatataaatacattgctatatattttgtaacttccctaaagatcggtcaacctgttcttttgtttctactaacttattaattagtccctaatggccactatattgcttccatgtctctgagtattccaagaggatgagcacatatttgtgaagcattatctcttagcagcactctgcaacaagcgtagggcttgggggccaaatgattaacagagagtatgaactgatttcttgcttcatataattttagaggaagaaaaatatgcttttgttaactggataaacaaagctttggaaaatgatcccgattgtagacatgtcatacccatgaacccaaatactgatgacctgttcaaagcagttggtgatgggatcgtgctctggtaagaggatagtttggttttgtactgagatttccaaagaatctccacagaatacatgtatttggttgtgtgcttggttatttagctgtttgatgtcaagaaggggtggggggggcaattgcccaggttttgtctttttcatttaatatctaaatctatgtgtaaaagtaaaagtcaatcacagagtggggacctcttttatagggtaaaattttggcttccaatttctcctcatcactgagaaagcagaacattataattttttcaaacataagtgtgtcagtgtctattcattctgaagtaccttggcttccaacaagagaaaaagaagctagccttcagttctaactctccagtgatctaattctgaaaactgcttttgtcgctttagctgcattagagccagcagtatcttggcagaagtgatataagattatccacactgtccattactgctcctgttttcagagatggctttgccacactgttctaaaatgtacttcattataagttctgagttcctatgcaagccttcccacttagtagctgtggatggggtctagatagtcagagccttttacatttcactttcccctgtggtcttcatagtatggtacagtttggacatcgtgaaagaaaaaatccaaaatctgaacctttagttttatttttgttcatgactttattagcatatattaataatatatgataatgggttgcattatgaccttttcatatacatacatgtatgtatgtgtatgtatatgtatacatgtgtgtgtgtttgtgtgtctgtgtgacagattttgatcatattcctacggacattcctgtctgctccctctctcattcctactgatctccatcttcttcccatcttaccctcttctattttcatatcttttttttttttcaaaaaaaaaaacctgtaagtgtcatcaggcatacacacaggagcaagggttagaggatagttacaagaccatctgaaacttcaaattctgataaggacactgtaagtggaatatccgtagctgacctcaggtgatagatataaacaaagagcagattcccccaaatactgcacaaaattgcctctgttccagcgccacacctcagtggcataagatgaactagcatgttcatggcaatgattttcaaactcagcaatacactgtgcagggtggcatattcctgtaatcccagcactcaagaagtggggtcagacaaatatctgtgagttcaaggccagcctgatctactatgtaatcagttccaggacagccagggagacatagtgagatcctgtcccaaaataaaaaagaaggagagaaagaaggaaggaaagaaagaacagaaaaaaaaacagataaaaaagaaagaatagggccgggcgtggtggtgcacgcctttaatcccagcactcgggaggcagaggcaggtggatttctgagttcgaggccagcctggtctacaaagtgagttccaggacagccagggctacacagaaccctgtctcgaaaaaccaagaaaaaaaagaagaaagaataaaaaacaacaaaaaagcaaacctgccaggcagtgatggcacacacctttaattccagcacttgggtggcagaggcaggcaaatctctataagttcaagggcagccttgcccacatatcaagtttcgggccagccagggctacacatagaaaccctgtctcaaaacaaagcaaaatttaaaaaaacaaaacaaaaccttacaaccttagcatcacaaaaaaattaaaagcaaaacttagattcaggttgtatgtatgtgtgagtgggtgtatgcatgtctttgtgtgtgtacatacatatgtgtaatggaatatgaataaaaagttgttttcagacctgggcactccaatatgtcatcatattttgtctaatcagcagtttggacatacatagtttttgtggtcaacatgataaatgtcatctctggcattttgtatttttttattatatgtgtagcttcatgggtttatgtataccacattgtgcaggtatctgtgaaggccaaaagagtatatagaattccctgaaactggaattaacaggcagttgtgagctgttcagtattggtgctaggaaccaaacctgggtcctctacaagggaagtaaatgttcttaacccctgggccatctcttcagccccagattgactttattttttatatattgcatgaaagatagtttataataaactttaccattcatgaccattcatgaagatgtattcaagtgttgttaataaaaaagcaagtatgtcccaagatagtctcaactcggtatgtggtccaggatggcctcaaactcatgattcttttgccaacatgctctagtgctgagactatagattcctctatgtcctaattaagtgatgctggggactgaacccatgacctcatgcaggctaggtaagcactctacaaactgagctacatctccaaacttgaaggactctttaaaagtaaaccaacatttgtttgtttgtttcagcaaaatgatcaacctttcagttcctgatacaattgacgagagagcaatcaataagaagaagcttacacccttcatcattcaggtgcgcggtgttctctgctctctcttccatgaactgtgatttgaaacagaggctatagactgtctgctggcctctaatcctcagagcagctctgagtgtagaatgtccattgatgttttagaccatgagctgggactcagaaaggcttgcggttgtgggtcttgttggagaagttcacactggcactgaggtgttgttccatattgaactcaaagccctgtgtgcctttcattgcctattgagttaagatatgaccaaagtgatcaaaaggatttaagcgctttcttagctggtgtgcttaaaggatggagtgtgtttgttttccactgaatgagtaagtatagtacagcaaaatcccatcacgcagcagtgtccttgagatgtacagattggttatttctaaagcctggatgtatgccatacgctgctggattccaattcaggcaattttagaaaaatccattcacatggatatatttcctttggttacttgactttttttactttagaattgacataattcaaaagcaaccagataaaaagaaaaggtccacttcctgtcgaattgtggaaaaaaaaaaagaatacaagtgagactgagaattgctgccactttgctacttaacgctgaactctgcaatttgttttctgtaaatgtgggtggatgaaattaatacctcgtattaatttctcagcttactggtatttttcagtgaaggctgaagtggactgggtgtggaaaaaggaaaaggtcaagaagtgcataatttggctgtcttgcaggaaaacttgaacttggccctgaactctgcttctgccattgggtgtcacgttgtgaacattggtgccgaagatctgcgggccgggaaacctcacctggttttgggactgctttggcagattattaagattggcctgtttgctgacattgaattaagcaggaatgaaggtaatggggcacagttgttcttttgaaagatggatattgttcatttttactttctcttcatggaaattgccaggctcgcacttaaccgagttgagctgatggtaactagaatgaatccagagctattcaggaaatcaagccatacgcctctgttctttatctgtagctaacatgacagttcacattggattttagtataaagacataaaaacacagagacgttgatattgggtgccttcctcagtctctctctaccttacaagtgtgtgtgtgtgtgtgtgtgtacatgaacctccgacttattaatccagctatccaagctggccaacgagccccagggatccttctgtgtccacctccccaacacttggattacagatgagcaccactgcacccaggtttatacaagtactgtgatctaagcactggtcttcatacttaaacagcaaataatttaccaagcgcttccctccatccccaggcttactttgagtcaaggtctatctctaaatctagaacttgccaatttggctagattgctgcacagcaaactcccagagcctggcacacactccaccccatcccaccccaccccagcttccacttgtacagctctaaagagtacagacttgtgctaccacacttggcttttctttcacatgggtgctgccaatcgaacctgggtccttgtggtttcacagcaagccctttactaactgagacatgtctttagcccagcgtttggggacctggaaactaggtctcgattaccaaacaaagtttcgaaagactgatgctgcatgcctgtaatcccagcacttgggaggttgaggcatgggtttgtttcaaagtaaaagggcggggggccactcaagtgctcggcctggccactgtcacatgacacactgactgaggcgtttctatctacaagcactggcagctttgcttcgagatggtgagacactggaggagcttatgaaattgtctccagaagagcttctgctgagatgggccaacttccatctggaaaactcaggctggcaaaagatcaacaacttcagcgctgacatcaaggtaactgtgcaaaaaaccatagcgttcaggtagatacgatggcttcagggattttatcccattgtaacagagacaaaaatgataggatatcaccaggccctgttgtctttcatgttctgagataaggtcttgctcaaatctgctcagtaattaaagatgtgacttgccatactcacattttgtggggtgttcaggattaaatccagagttttctccattcaagtcaagcatagtgcaaatggaagccattgtgatttttttcagatgtgattggactctgtaggccaggttggcctacagctcactctgtcagccaggctggcttcaaaactgcagtgtttctgcctctgcctaaaacctatatacaggcctatgccaaagtacctagtcagtggaaaccgtttattatgaagcctgttttgaatatttttgaaaagcaaagaatccttgcattagttgatcatgggaagccttcacctcaatccccatcactgtgggagaaggggagagagatgagctaatttccttaagtatattctgattttaaaaggttaaatgctctcttgccaaccatatgtgtttctcgtttaagcttttctgtatttcaacttttgatttaacatacaattaacatagtagatgttgtttccataggttgctactcatcatgctttgtaatgccataatgtgttcattttctctttccctatgcttcctggatttctgctcttctatttcatgcttgtttatctgtcaagcttattgacttcagtaattcagtgaaggtacagaaatacttaatagctttattgggttgatggcatcgataaattgtcaagtcctaacaatcacgtgcaaagacaaaaagaaagatctctcaaataagaagacagagaagaatgccttatattatcacaaaagctgctcccaatgtcctcatcaccaagggacaataagatgcagctactctttggcagtgtgatcacactattatgttcaattcttttgtaggattccaaagcctatttccatctgctcaatcaaatcgcaccgaagggacagaaagaaggggagccacggatagatattaacatgtcaggtttcaatgtaagtataggtgctttttcagattctagtcttttaccattgcatgttcccccccacccccctttggattgttgagacaaactcttgttacatagggctctaacctgctatgtaaagcaggcttgtggttaactcgtaggcatccacctgcctctgctttcgctgtattgggtctaaagatatgtgctgccacacccaaataattttgcttaaattctatcaaaatttctgtggaacttcatgtagtggtgttgacacttttcagattgctttagaggacgtggtacacgtgactcacaggagagaaagtatactgatttattttgagaacttgtgagttccataattttgatggtactgtattttatgaatgacataaacattcaaagactatggggaaataagcattactcctggcttgttccccatggtactggtaaagggccagcccatgcattaagagaactacctgggatagtttgttctctctcaaaatataattacagacacagtcagaggtatgtctccaagttcattcgaaatcaagctgatatgctagagcacagtcctctcacccctactcccactggatcccctccccatttcagaggcccctcctcttgtggtttgactgtgatgtgtcccccacaggatcatgtgtttaaacactcgcttcccagcaggtggcgctgttcagggaggtggtggaatctttagatgatgaagccatgctggaggaaatccatcactagaggtgggccttgagtctggccccacttgctttgttggctgtttcctcagtgcagaatcaatatgagcagccagtttcctgatcctgctctcaagccctccatgcctcacgtcacccttcccaggcatgactgcctctagccctctggacctgtgaaccaggtctttcttccttaaaaaaaaagaaagaaaagaaaagaaaagtaaagtaaagaaaagaaatcaagctgaattgatggtcaagatgaaccatcccactaccaggtcctccctgtttgatgtttttctactgtgtccctttgagtcgtcccccacaatccagccaggattcccctactggctttagaatttggtccatcagcttaacatttaaattcctacaaaatattacccacctctgtcagtctgccctccaaaacctcttttcaccttcatatagctgtcttaaacttgtccaaacacccctcccactttacagttattgagacagtttctctgcatagccctggctgtcctgaaactcaatctgtagaccaaattggccttaaactcatagatatctacctgcctccacctgcctctgcctcctgtgtgctgagattaaagacatatgccacaaccacccagcccaaacatcctttttaactccaagcctatgattgcaagttttttcagatatgttctttaagtaaaaaataaagggtctggtgagatggcacagctgttaaaaaaattcttgctgctttagctgagaccaaagtgctgttcccaaactcacaagcagtaactccagatccaggagatccaaatgccctcttctgttcaggcatgtgtgtatgagagatattcaaaaaagaagaagaaaagaaaagcttttttgaaaataaaatatcctgagtgagctaaccaaatcacaaaagaacacacatggtatgcactcactgataagtggatattagcccagaagctcagaatacccaagatacaattcagaaaacacatgaaactcaagaagaaagaagaccaaagtgtggatacttctatccatcttaaaaggggggagcaaaacacccatggaaggagttacaaagtatggagcagagactaaagaaatgaccatccagcgactgccccaattggggacccatcccatatacaaccaccaaacccagacactgttgtggatgacaacaagtgtttgctgagaggagcctgatatatctgtctcttgagaggctctgccagtgcctggaaaatacagaagtggatgctcacagtcatccattagactgagcacaggatccccaatgaaggagctagagaaagggcctaaggagctgaaggggtttgcagccccataggaggaacatcaatatgaaccaaccagtacccccagagctcccagggactaaaccaccaaagagtacacatggcgggactcatggctccagctgcatatgtggcagaggatggcctagtcagacatcaatgggaggagaggcccttggtcctatgaaagctgtatgccccagtgtgggggaaatgtcaaggccaggaagcaggagtgggtgggttggtgagcagggggaggggggaggggatagggggagggtgtttttcataagggaaatcaggaaaggggatacatttgaaatgtaaataaagaaaatatccaattttttaaaaaaacacgcttttttgaaaataaaatatttttctgaaactgtccatatttaaagttaactcttaaaaggaatgtggatgaaaagttgggaaacggcatttttttttccttcttcattttcccaagagaggtaaactcaatggaatactttattcagttcttagatgtactctggcgccatcttggggaacttataggtactacatatccctcatggttttgcattcaaaaccaattttataagtatcatgtgctagaaagtactatcatttacccaacctatgattggattgtaggcgatgtgtgtgtgtgtgtgtgtatacacacatatatatgtatgtatgtatgtgtgtatgtgtatatgtatatatgcacatatatatacatatatatggatggcctttaaaatatgtcttcttttacttcaacaggaaactgatgatttaaagagagccgaaagtatgcttcaacaagcagataaattaggttgcagacagttcgttactccagctgatgttgtcagcggaaaccccaaactgaacttggcctttgtagctaacctcttcaataaatatccagcactaactaaacctgaaaaccaggatattgactggactcttctagaaggtaagtcaaaggtcctctaattctaatgtacagtctgtaccataaaaccccagaggccacaatgacgtcattccaagccagtgagttgctttgtccatttagatgccatgccgagtgagaactggaaacagctgggtggaggtggtgatggaagcaaaatatgcaaataaaacaatctagttgaggaatgtggctcagtgccagagctcttacctagaacagccaccactacaaaagaaaagaaaaaatccagactcacctatcaggagaaacacttagtaaacaaatggcttgcttcaatgtttagtgccatatcttccttttttcttttttgttttgttttgttttaaaccaccttatttattttgagcaaagaatctcttgttctgtttctttgaggttgtttttaaggtagtcgtctattttgggacaagcatttaatgtgtctccagtcgacctcagacttagtacgtagtaaagaatgaccctaagtttctgatgctcctatctctaagtgctgggataacaggcatcatttgtgggtttgagggtgctagggaatgaagccagaacttcctgcactctaggcaaggactcagtaaactgagctacattccccagagccttggaggtcgttgtgagacagggtcttaccctgtagtggatgcttaccctgtagtggtggccctctgtcctcagccaaatgagggctgagattatagatatgagccaccatgtctgaccagatcacagaaaggtatacatacatgcagaatttaacttataaacttttgtaatcatatttcatttatccgtagtcagagtgacatactaacatgtggtgattatcaactcagaataaagcatataaagtaaatcaatacatgccctggtgctatatggacaagacatttaatcaatgaatgcactttgtggatgttttcataggggaaactcgggaagaaagaaccttccgcaactggatgaactctcttggtgttaatccccacgtcaaccatctctatgcgtaagctgccctactgctcttaggaagttgtgaatagcatgaggagatgtagcatcaataatggcaactctaaaatctttccacatgttcatttgtagcagatattcttattatgaagtattcgtgatttccatcatcattttccaaatacacaaaagcccaaattctttctttgtctgactattggctctaagtgatagaaatgtgtcttgagggagtaggtactttaagtttcttaaatagtcctggaatactcataacaaagtgttcatgattccttcagcctttggcttcttggccagactgttctttgctgacatacaatggtttgtatcctaatattccttaccttcactattttcttaccatctaccattcactacctgtgaactctattaatcgcatttacatatatgtcaaaatcatattacttgtttagatacatcgttgtttattatacatctatttgactctcaagtaaggtttggggttttcatcttgtgtttccaacctttataacactttttgcttacaataagtgtgcatccttacaattatcattgttgtcttcgtcgagacagtttctctgtgtagttctggctgtcctggaacttactttgttgaccaggatggcttcaaactcacagagatctgcttgactctgcttccaaagtgctgggattaaaggcctatgccactactgctgccccttcttttttttttttttttaagacaggtcaggaactcactgtgtagccctgactgtcctggaactggctgtatagaccactctgaactcactcacaaaggtcaccctgccaccccctcccaagcctgggactaaaggtgtgtgccaccttgcccagctgtgctcacatactattaagtgagctgaatggtcttggctctattttcagcacaaacatatgagtcgtaggaactgtgactttatagatcttgggtgatttgtgtccctgctcatgatcactgatggagttctgtttcccattgttagtgacctgcaggatgctctggtgatcctacagctgtatgagaggattaaagttcctgtggactggagtaaagttaacaagcctccatacccaaagctgggggccaacatgaagaaggtagagaaccttgaaccttcttcatttctttcttttactttaacacctctagacccggaatagagagatggctcagtgtttaagggcactggctgctcttccaggacacctgagttcaattcccagcaccacatggcagcacacaactgtctgtaactgtagttccaggggatctgaacccttcacaagaacatacatgcaggcaaaacacaaatgcaaatgaaataaaaataaaaatgatagataaatagatagatagatgaaaaacctctagaccctaagctgcttctggaggaaagaactagatcttggcattgagaagatacttaccattatacaacacacacacacacacacacacacacacacacacacatacacggggtggggagagagaatagagattgaacaaatgacaatatttaaccgttactttgcttttgtccatttgcagttagaaaactgcaactatgcagttgaattagggaagaatccagctaaattctccttggttggcattggaggacaagacctgaacgatggcaaccctaccttgaccttggctgtagtctggcagctgatgagaaggtatcgtgcacagtattggctatggaagcgtcagagtaatatgcatataggaattcacccttagtatattttcactgcttaaattaatcatttagttcaatgaatatacttcagagctcattgtacttagactctaaaatgactttgctatgagtgtatgttggagcttcactgggagatacctccttgtgagttaggtagaactgtagctgttgccagtcttggcacaaaagtctgaggtatagacttaaacctgatgcaatgtcactgaataaccttaacagatgttctcatggagttccctgactaaaactgtcagagggtttgcagctccagcccagtcgtctaggatatacttagcatgcatggaggctatcctcagagccccgaaatgaataaagaaatgttgtcagaagcccagaattgtggctcatacttgaaatctcagcaccgaggagtctgaggaggggaattggctagtttgaggccagcttgggctacatagtgaattctaggacatcctgaactataaagttcaaccttgcctcaaaggaacaaaccaagaacattaaattatcagaagtctgaacatctctatgtctccatttggatatgaccatcagggccagcagggttagagctcctgtgcctggcttgatgacctgagttctgttccaggaactcatgtggtgaaggaacaaaaccatgtcctgcaagttgttccctgatttccataggggtaccatgacatacatgtgttctagtacatataaataattacaatttttataattctttaagaaattgaagattcctttacttgatctatttttaataattctttgagaatttcatacagtcagctctaataacttccagtcccacttccagcccctccaaccctgctggattcccccacttctccttccgactttaattccttttgttataacttactgggttatataatgcctcccatatgtacagtgtggaatcttgcatgtggcgcatgggaacctattagaagccacattccataataaaaactgagtctggcacccagtcatatcaattgtcaaaactaggagtgtggcaccatgggtcctttctctatccatgctgtaattctgtgtctttatcttgtatgggtcttgttcaggcaatgacagctgctgtgaattcaatgagggcaaacagacctgtcatgaacctggaggcaggagctgatgcagaggacatgggtggcgggtacaagggtgctgcttactggcttgctcctcattgcttgctcagccttctttcctataaaacctagcactaccatctcaggaatagaagcacccacaaggggctgtaccttctcccttcaataaattaagaaaattactaacagccaggtcttgtggaggcattttctccattaaggctccctcctttgtatgtcaagttgacacaagactagccagcagagagaggggggtgggagaggaagaaggagaggggagagaagagaggatgacctcaggtgtcatgctcaggaacaccatccgcctgctttgagatctgtccactcccctgagataaagatcaagcttttcgcagggacctgggcttagctctttggctaggttggttggccagtgagccccagggatctgctgttttcagctgctcagcactacaattacaatcacatgcccacatgcccggcatttctttatataggtgctcctgtttgaactcaagtcttcatgtttgtgtttgtaacacaagcactttacagactgagctatttccccaattcctccttgatacacacacacacacacacacacaagcatggctctttgcacaaagttacttttattatgtgtgtatatatactaattttgtatataatttctatacatatgcataaactgtatgtgcaagagtgagtaaatagagcaaggctcataccactgcctcagatggatgtcagagtctaagtttggggaatcatttttcaccatccaccctgtaggaatcagattcacgtgcatcaagctgtttttcccacttgcccaccttgctgaccccccatgaaatatttatgataaaaatgtacatgaggtatatttctaatgtttgcatttttcttcatagaatccattgtgactctcttctgctgcttttcttagatatacccttaatgttctggaagatcttggagagggtcagaaagcaaatgatgacatcattgtaaactgggtcaacagaacattgagtgaagctggaaagtcaacttccattcagagttttaaggtcagcatactgattaatatacactgtgtttgctagataatatcagttgttttaaggacaaccttgagtttttttgtaagagttattattgttgagctagtggcaaaatgttcctttccttggtcaggctaacataaagaagcacatgatcgtttgtaaatagtgaaattcttaggcttgttgcctttttcataataggacaagaccatcagctccagtttggcggttgtggatttaattgacgccatccaaccaggctgcattaactatgaccttgtgaagagtgggaatctaacagaagatgacaagcacaataacgccaagtaagggcagccatgtgcaatcgttcggagtcatacaaagaacactggtgccggccaggcagatccactctaagtcaagctctccctctttgttagtggtgacatctggggaagatctcttcttttttgaaggctttaacttttactttttgtcttagttagggtttccattggtgagaagaaacaccatgacgaaggcaactcttttttttttttttttttttttttttttttggtttttcgagacagggtttctctgtatagccctgactatcctggaactcactttgtagaccagactggcctcgaactcagaaatccgagtgctgggattaaaggcgtgcgccaccacgcccggctgaaggcaactcttaaaaggacatttaattggggctggcttacaggttcagaggttcagttcattatcatcaaagcaggagcatggcaggcatggagctggaggagatgagagtatacatcttgaaccaaaagcagtcaggagaagactgacatcctctggcagctaggaggaaattctcttctgcaatgggtgtagaaggagacctccaaagcccacccccacagtgacacacttcttctaacaatgccatacctcctaacagttaccactcctatgggtcaagcatattcaaaccacaattttaatggcttaaaggggatccagctcacagatagacaattcactcatttatgtatacaatctaatggttttgaccttgctcacactgctatatgaccaccaacacaatcaattttagaacacagttatcagataaaagagaccctccctgagcacccagcaaacctaggttctagctctatacctgcctgcctttaactattttatctgtctgctctttagtgtcaattatatagccccttcaccaacatctctcccttgtacaccttgaccttactactctcttctctgtcgttttataagaattgctttgtagaggccacatgggataatgaaacacaatgagacctctagtaagaatgtgattctatcatttgtaacaacatgactgaatatgaagatgatgttaaatttcagatacaaaaataccagtatggtgtgatcttagatctgtgagaggagacatcttttgtttggttggttagttggtttggtttcattgtgtttgtttgttttgagacaaggtgactcacaaggattaaagggttcacaagaaataccatttttaacctatattgttattgtttgtggggagggtgttttgtctgcagggatgttggtatacaacttctgtgtgtgcctagtgtttgaataggccagaaaattgtgtcatatcctctgaaactggagttacagattgttgtgagctaccatgtaggcacgtggaattgaacctgagtcctcaggaagagcagccagtgagccatctctctagcacatgagacaaatatctttaaaccacaaattcatcatgaccaaaaaacaaagctaatttttattatcttagaaggttttgaacatgttttaagaatgtgttatctcgagccaggcttggtggcacatgcctttaatcctagcacttgggaggcagaggcaggcggatttctgagtttgaggtcagcctggtctacagagtgagttccaagatacagctacacagaaaaaccctgtctcgaaaaaagaatttgttatctcattacactgcacagagaatttcataatgattatgcagtcaacctgactaattacacacacacacacacacacacacacacctttttgttgtgggggtaggggtaggctgtttgtttgtttgttttttcaagacagagtttctctggctgtcttggatctctctgtagaccaggctggcctcagactcagagatatccctgcctcccacatgctggaattaaaggtgtgtgccacatgccctgactaaaaatttcatttttatataaactcagtgcttcaagcttttcctttcatttcatattgggaagaaatgagtaaataaaatccaaaataataaattgtaaaaaattagtataacttggagctggagaaatgagcacttgttgctcttacagacgacctgggttcaattcccagcacccgcatggtggcacctccacttccaggaaagttaataccctcctctgacctcttcagtcatcaggaacacacacgtggtacacaagcatacatgcaggccgaacactcacacacataaagtaaatctcatggtttgatctagtataagttaaaaatcaattcaaaacaaaaattaagcagaaaataaatgtgaaattattcatttgtactttatgttttctgagacaaagtgtcactgtgtacttctgactgatgtcaaacttaacagggactctttggcctcaccttctgccccaagagcaatatggtcataggattatgagcattgccatcatgctcagctctttgagttagacattcaatacagaaattttacatcccagccttcaggttataaaagaggaagtacatctcttaaatggtgtccttgggctggagagaggactcagtggtaaagagcattggctgttctagaggatgtaggctcgggtcccagaacccacatggcggctcacaactgtccataagttcagttttaggggatccagcaccttaacacagacatacatgaaggcacaacaccaaagcgcataaaagaaaattacttagttcttttttttaagttaggtatttattttcagttacatttccaatnnnnnnnnnnnnnnnnnnnnnnnnnnnnnnnnnnnnnnnnnnnnnnnnnnnnnnnnnnnnnnnnnnnnnnnnnnnnnnnnnnnnnnnnnnnnnnnnnnnnnnnnnnnnnnnnnnnnnnnnnnnnnnnnnnnnnnnnnnnnnnnnnnnnnnnnnnnnnnnnnnnnnnnnnnnnnnnnnnnnnnnnnnnnnnnnnnnnnnnnnnnnnnnnnnnnnnnnnnnnnnnnnnnnnnnnnnnnnnnnnnnnnnnnnnnnnnnnnnnnnnnnnnnnnnnnnnnnnnnnnnnnnnnnnnnnnnnnnnnnnnnnnnnnnnnnnnnnnnnnnnnnnnnnnnnnnnnnnnnnnnnnnnnnnnnnnnnnnnnnnnnnnnnnnnnnnnnnnnnnnnnnnnnnnnnnnnnnnnnnnnnnnnnnnnnnnngatcaatatagtaaaaatggctatcttgccaaaagcaatctacagattcaatgcgatccccatcaaaattccaactcaattcttcaacaaattagaaagggcaatctgcaaattcatctggaataacaaaaaacctaggatagcaaaaactcttctcaaggataaaagaacctctagtggaatcaccatgcctgacctaaagctgtactacagagcaattgtgataaaaactgcaaggtactggtatagcgacagacaagtagacgaatggaatagaattgaagacccagaaatgaacccaaacttagttcttttttaaaagagtgcaaatgtgggggctggagagatggctcaggggttaagagcactgattgttcttccttgacatcctgagttcaattcccagcaaccacatggtggctcaaaatcatcagtaatgttatttgatgacctcttctggtgtgtctgaagacagctatagtgtactcatacataaaataaagaaataactctgtttttaaaagagtgcaaaggtgttcttgctaggaaaaaaaaaacaaacatcttgatttttgtttcctccaaaactaggtacgcagtatcgatggctagaagaatcggagccagagtatatgccctccctgaagaccttgtggaagtaaaaccgaagatggtcatgactgtgtttgcctgtttgatgggcagagggatgaagagagtgtaaaacaaccaatctcaatagaaccaaccttactctccggtgcatgattaccaagtcagctagtcccaggtgaagtgctcatggcttcagaagtcttggtcatttaaaggacttttagttttgattagcaaaactaattaatcgtgacagcctttggagaaagcattttagtaaacaagcaactcctctttcccgtagagctgatctgttcagcacacctgaacatgctcacagccaaccttttgcactctcctcctagaatgctgcccttgacattccggcttgctttgtattatctatgtatcttttccctcctgggatatccatctcttgagacttgcctagatgtgtagataggaatattcttagctcatccttttgctttccacattctagcagttctttctggagaatcctgctctgatgctgtgtggagatgagtgttctttgtttactctgtagtgctgaaaatccgctgaagtaactggctgtgcagaatgtactagaagcttttctcattcttttagtcttaaaatcagtatctttttacagtattctttctacatggatattttttgtacatttaagaatattttgattacatccgacacgtctgctgatttgctactttttaaaaaaggggtcttcatgtaagtaaaacatacaaaagcataaattataggtggaagaaagtggaccctaaggttgcatttccccctcacacccaggctcaaaggaaatgaaatattttgtcttcaataagttggtccgatacatgcttgtttgtttggaaatctttatcacaaaactctttttcagtctaaaatgctgttgaacatgacacttttgaagagagggtgggctcagaatttagacgggaatttgataagcaaagaatgctaaaatgtacaatggatttttaattttacacctataacaaggagatgtggtctcagaaatgggaaagtatgtatgtcggacttgatgtactcttgctctgtcaagctctttgctatagttctcaatatcattatgttaatctaaatctgaaaagtgatgtaatctggtagcatcatagtagtccaaataaaggcatttgcataataattattctctactctcttttgttttaatgatttttcttagtgtggatacatagggggctgtgggggtgagtggggtcatttcaggggatgtctatggccaacagaaagagcattggttccccctggatctggagttacagaaagttggaatctgtttgatgaggatgctgggcatcaaacttcaaaagagcagcacgcactcttaatggctgagccatctctccagcacattgttttgtttttgagacaggtctccctctgtagctcaggatggtcttgaacttaagtctctccacttcagcttccccatgtctgccctgagtctcttcttggtgtttccgccccatagtgatgtgtcaattgtgacctgcatttcctctgttttctgttatattctataaaatcatttgtattagatttgggctttgagggctgaattggagctgtgggactaactcaagttcaaataaatgttaagtataattatttcctctaattcaccagatctccttgggtgagggtatgtagctcagtaagagagagagaacataatgttcaaaaagtactgggttcaatatccattcctctaaaaaatattttatccaccacctcctctttctcttcatcttaaatcttttcagtgttgtctaatgtgcagaccctgaagtgggagggtctgactggccaatgatgagaaatgattcacctctttacagttgttattgggactggataattctctctgaacactttacagggtacagaggtaccatgtagcctttgtctactggatggcaaggccatacctctgactatatttaccaagtatctccatccatggtatcttgtcccatagtatacaaaatgaacccttgttgacaagtacagtgggttatggtacacttttaaagttttgtgtggggctgaagagatggctcagcagttaagagcactgactgctcttctaaaggtcctgagttcaaatcccagcaactacatggtggcttacaaccatccataatgagatctgatgccctcttctggtgtgtatgaagacagctacagtgtacttatatgtaacaataagtaaatctttgggctggagcaagaggggccagagtgagcagaagtcctgagttcaattacaagcaaccatatgatggctcacaaccacgtatacagctacggtgtactcatatacataaaataaataaatctttaaaataaaaaataaagttttgtgtgattaatgacatgcagtccagtccttttagagtctagttacctgacaatattttaaaatagtttgaataggcatggttacacacacctattgttagaacacctgggaagctaaaccagaagaaagatgacatttctaaaactgcctaagcaaagtatcgaaatcatctcttagaaacaaaagaagaaaggctagtttatgcatactgtttgaaagtttggaaaaggacttttctaaagataggacaattactaaagacatagacacaagttaatgaaacaaaaaggtaagtctcttttaggggctcaaacccagatatccgcccgcctctgtttactgaacgctggggttaaagttgtgtgccaccaccacccatctttcaaggttgttaaaaaggagtgtgatgagatagataggccagcgtagccaatcaggaactgcttcatcatatggcctgaggcaaaaacagtaagtcagcatcagattttaggctctagagtaaagttcctagagccctagccaatcccagaaacacccatacccccggagatagagccaaccaaccaggataaaggttacctattcttccctggaattgctctgatcatctttaaattgagctggtgaagctaccatctctgtctccatcctggtgaaaggtagatccctgtatgctggatttctgcagaataaatgctctttgcttttacatatcatttgagtcatgggtatcattcctcagcaaattcgacccttacaattccagggactgaggatgtagagattgttgggtccctgggcctgggagggcagtcagtttagcttagtctgtgaattccctgccaatgaaagagaaggtgctcagcacctgaagaacaatacccaaagtgacctctggttccaatgtgtacatgcacacacatgcatcttcatgcatgtacagacaaaagatgtaaaactgtaaatgagcaaaggacaaagcttagtaccacatgatacccaagtgcaaaagcaacacagttgatagtgtttgcacagtgtgcaaggaagtttggattctatccctagagcttcataaactgggcatggtgatatagacctacaacactagcactcaggagatggagacagttgtcaaaagttgagttatcctcagatatatagcaacgttgaggccagagggctatataagaccctgcttttgttgttgttgttgttgttgttgtttttgtttttcgagacagggtttctctgtatagccctggctgtcctggaactcactctgtagaccaggctgacctcgaactcagaaatccacctgcctctgcctcccgagtgctgagattaaaggtgtgcgccaccatacctggtggcaagaccctgcttttaaaataaatgtataaagtggttagttcctgattcttacataatcctgtaggttcaggaaggaggaagactgcaaatttgaaatgatcctgggctacaaatcaagttggccagactaggtgagattccatctgaagaactaacaccatggtggcctaagtttgtcatttcatcgtgggggcagagacaaaagggtcagaagtttaaggtagaacaagggagatggctcaatgggagatcctgcctcaaaaactgaggtggggagcaactgaggaaatcaccttatgtggaactttggccttcgtacactcacacaaacatgtgcacatcctacagaaacacttgtgtacaccatacacacacaggaatcaacaaatgtaaaaaggttcaagccagatgtggttgtgcacgcttttaattcaagcactctggaggcagaggcaggccgatatacaaaatgagtttaagacatccaaggttacatagaaaaaccctgtctcgataaaaacaacaagataataataaaaacattaaaacatgaaaactggtagattggtgtctgctatacagccaattaggtgccaacctgggatacatgagaccctataagctatttcagaaaataaatagaggaacctttagtaaagccaggatgatgagttgaaccagaaatatatatgtatatgccagattgctaaaaaacttcatttgaaaaacaagtaaatggaaacaaaatacattaaacaagaataacagccaggtatgatggcacttaactagtcttagcctgggaagataagaacagaagaccaagaggttaaggtcattgtttactgtgccagctcatactaaatgagactctgcctcgaggaaaacaaaaacgtaaaacgagctgtgctagacaattttatgccatgtaacatgactgaagagtcacttggaaagagagaaccccatttgaaaaaagaaccccacgagattggcctgtgggtaaacctgtagctcattttcctgactggtgattgactggtttggatccagccctctgtggggtggaccacccttgggcaggtggtcctgggtgctggaagaaatcccactgaacaagccaggaggagtaagaagagtaagtagcactcctccatggcctttgcatcagctctcccatcagggcttcaagccttgattttctaccctgccttccctcagtgataaagtataaccatagaaatataagctgaaataaacccctttctctccaatatgctattggtcatgatgtttatcacagcaaaggaaatataactaagaccaaattttccacatattcctgactccacacatacaaccctccccatttcaatattgcacactgagagtgtatgggggtggttctgatgtattgatcggaaatctgcatatgaagatcctgttccccaatcttttttttttttttgttttgttttgtttttttttttttttcgagacagggtttctctgtgtggcctcaaactcagaaatctgcctgtttctgcctcccaactgctgggattaaaggcgtgcaccaccactgccccgattccccaatccattattttatttatttatttatttatttatttatttattttttggtttttcgagacagggtttctctgtatatccctggctgtcctggaactcacttgtagaccaggctggcatcgaactcagaaatcaacctgcctctgcctcccgagtgctgggatcccaatccattcttgatccatcaataaagatactagcagccaaagagttgggcagaataggtgggacttccagtattcccataggcaggcaagctgacacaagggagatttctccatgcttcaaaggagaaaaggtgtccagccatgtgaggtctcaggcagagccttcgggccagaggttagatcccttaatcagcctccaaatgctgacaccattgcatacactagcaagattttgctgaaaggacccagatatagctgtctctggtgaggatatgccggggcctagcaaacacataagtggatgctcatagtcagctattggatggatcacagggctcccaatggaggagctagagaaagtatccaaggagctaaagggatctgccaccctataggtagaacaacaatatgaactacccagtaccccccagagctcgtgtctctagctgcatatgtatcagaagatggcctagtcagccatcagtggaaagagaggccccttggtcgtgcaaactttatctgcctcagtacaggggaatgccagggtcaaaaagtaggagtgggtgggtgggggagtgggtgggggagcgggtgggggccttttgggatagcatttgaaatgtaaatgaaataaatacctaatttttaaaaaagaaagaaagaaagaaaaagaaatgtaccaaaaaataaaaataaaataaaaagaaaaaaagaaaagaaaaagaaaaaagaaacctaacaaagctgagggcaggtttagggtgctgagctgggagtgaacagaaggtcacgctagtcaagggaggcttagaagagcctggcctttgagctaaagcaatataaaaacaagctagtgtgtgtgtgtgtgtgtgtgtgtgtgtgtgtgtgtgtgtgtgtgtgtgtgtatgtgtgtgtgtgtgtgtgtgtgtctttattccacggatcccatattctctgggcagggtctggtagtgcagtatgctgggtgggagcttaaagcagggtagcgaaaactacacgctacagagaggactacataaactccttttcaggaccaggcctgacaacaaaagaaaagtcattcattccaggaaccgaccgccataacccatcaccgtaagccaggaattccaggaaattagaccataaaatcccccacccaaagatcagcctgaaaataaccatgaggactggaaaatatcttatctcaggatgggccatttgtgctgggcaatcttatatgctttggttgtctcatcctatggttaaacattcatgacataggaatgcagaccactgaccacctggcagaagccaatcagaacctgatgcacatagcttccccagcccccaccgaagaaactttagattacttaacccactctttaagttctcaccaaatatagaaaaactaacatagtagccaatcaaaactgtactaatgtcactgctttggcccctaccaatcacatgagagattacctaatccttctagaaaattcccatatccctgcataaaagggtgcctgcaagctcctctggggtcaacacattgatgagtgattgacccaccccaccccatgctggttgtttctgcagaatgagtgttcattgtctttgcataatttctgagtctggggtttttcttcagcgattttcagaccctgacaacactagaagagtatgcttcttatggttaataaacacatgctaaaacatataatatgaagctgtttaaattgcttacaccaataaagacaagggaggcaaaaaagtgaggtaaaaacctgctagctcagcaaggcaaatattttcttaagtatatacaaagtatctatttacaagcctgatcctacaactaaactgctatctaggttttttagaaatctctatatgagtcatcttactgatctagtctacctttctcttgagctcctccaaacccaagagggcttctttgctcttccctcaaatgcctccttactgccagctgcttctctgttattcctgcaagcccaaagaaaagccctatctcttacacggagctccttccataaaggctcttccaagccaagagacagagccctaacaaaaaaatccaattgcttataaaaagaggtttctagctccactcctattggtaggctggaccttgttactatgtgctctggtagctcaaggctgcccatctgactctccctcgggtcataaagcaaagaccacaagacccctcccaagcacctaccctaaaataggcaggaactttccatttttagcattcttatctaaagaggctctgagagacacacccaaactgcatctttccaggacccaactaactgcatgggagaaatgcagtatctatttaagcttgtatattttgttaacaatctggttttctatgtacattaatcaaatagcttgtaacaaatccattgtcacacgatgctctagtttttgtttcatgtagttacattagagttagtttatttggttttgttttgttttggggttttttttgtttgtttgttttggctatgcctgagatgaaaaccagacccccaggcattctggtcaacactttagcactgagcagcaccctcaggcctcactccatagaactacagtctatgagtttagacaaacacataatgacacatatccaatgtgatcgtggagaacagaatagtttcaggattgtgaactcctctgtgctctgtgcatttgcctcccactgttgccaggcagctgcttccatggctttctcttttccacattttgagacacacagtcatacagattttggcagccttcaaagggaactcttccacctggttggatgcacttgtcgagaaaaactaaacttttttgttttgttttgttttttagtttgttaagacagggtcacactaatgacacgatgtatgtgttttatacattcagaaaactgacaggcagtgtcaatcgaaagaaaagaaaagattcgaaagaaaaaaaaaacccacagacccaagtcgtcatggccaaattaattaaagcaagcaattaattaaagcaagcgttttgtttcatgtacactgcttaagtaggctgcttctccctaacgaagggttcgagaggtcaccactcaacatggaaaaaaataaggctattgtagttcaggggtagggtgtttccaaatgggggcaaacaggcagggttatataaacatatcggttgaattgctcataacctcatgaaaacaaagacatgttgcaaggtggtcctaagggacacatatgtacatatataacagcagatggtcatattaaccttttaaaaccagccatggttgctgtttcctggaacaggcagtacagcaacatctgtagttatggttataagtggggcaaggcccaatccttgagaaacacaggtttctcacaaagagtaatgaacctagtttatctttaccataagaaggattaaaagaataagatagagacaggctggtttaccagctggatagagggctcagcagttaaaagcccttacctctcttacagaggaccaaagttcctttaccagcacacaaatggcagctaataacggcctaaacctccaggtctggtggatatgatgccctcttctggcctctgtgggaactgcatgcttgtggtgtacttacatacatgctgtcaaaatattcaaactcataaaataaataatttcaaaacatacaaaaaactttaaaaatcacacacacacatacacatgcacttgtttttacgagcatgagtgctttacttacatttatttctgcaggtggtatatatgcctgatacccacatcaaccagaagacaaaggtcagatctcctacaactagagttgcagacagctgtgagccatattgtgggtattggaaacaaaaccttggtcctttggatgagtagccagagctcttaaccattgagccatctctccagaccctggcccccacataaatattatttataattcattatttagataaggttttttatatcccaggctgatgtcaaactcattgatggtcatttgaacttcaatcttccatctgggaaccaaacccaaggctcagtgctcatgctttgtagcaattccacaaaactcccagccctaagcatcctctcagcgcagccaccgcccccacacacagccttaatgtgtatcggggttgtgtctgcatatacatcagtagagctggcacactcaaggacaaaattgatgtccagttccctggaacaggaggaacagatggtttgggggcaccttgttattggtggaaattgaaccctgatactctggaagaacagtcagggctctttattgctgagccatctctccagctctcctgagcactttttcatggcaaggagagagcaaaggatttatgctccaggagactcactttggcaaaatcatttagtttatgtcaggccaggaaacctgcagagtaaaggcttttgactttttccaacataatacttttatccattgtttgggaatttcacacaatgcgccctgatcatactttccattcccctcagttccaacttccacacttgagttctcccactccaaaaaaaaaatttttttaaaaaaatacaccaaatccaagttatgttgtgtttgactggagcacggtcaaactccccatggccagccccttaaagataactgagtcaagccgggcagtggtggcccacgcctttaatcccagcacttgggaggcagaggcaggcggatttctgagttcgagaccatcctggtctagagagtaagttctaggacagccagggctacacagagaaaccctgtctccaaaaagcaaacaaacaaaaaagataactgagtctttccccagcccctccagaagccatcaactatgaagagctacacatgtcagcatctttatcattatttttaatgactctctaaaatgacatcttgtctagaggtattgactactgcaggctcatagttgagaatgagaggcatgtaaggcttcttgcaacaacctctcccacccaatgccccaaaagaaaattggcttttgacttttgaatgcccattacaccctaacatgaaagagaaggaaaacaaagcaaaatcaggaaagggtttctaaggagctgtaatcccagcccagcggtctccatgggaaatttcacctgggagtcttccttaaacttgcaaagaggtaaaactgtggccccacccttttcctctcccccaagggttcttcactgggaggatgcaatggagattttaggagaggccctgatgacctgaaatgcaaagcctcaggcttggccaggataaagcaagtcctgctaggcatgtctgaagccctgggttccatccctagctctgggtaaagaaagccatttgaagccattcctggcttggggtttaaattcctttactcttttattttctatagtggatttggtgtcaaaagaacactcctgaatcagaaatcagaaaggacaacacattaaggaaccgttcacaggaagcccttattaaccagggctttttctctgttgtaattctgaggctttgacctcatgcggtttggctgatcccagacaca

SEQ ID NO: 685 - DNA, 3093 bp, Mus musculus
cagagattcctaggggcagaagttgtctgagtgcttggtcggaagctgtagagccagatcagcgactctgcgacttttactttccctttagatctttacatggatgagatggcgaccacccagatttccaaagatgagcttgatgaactcaaagaagcctttgcaaaagttgatctcaacagcaatggattcatttgcgactatgagcttcatgagcttttcaaggaagctaatatgccactgcccggatataaagtgagagaaattattcagaaactcatggtggatggtgacagaaataaagatgggaagatcagctttaatgagtttgtttatattttccaagaggtaaagagcagtgatatcgctaaaaccttccgaaaggccatcaacaggaaagaagggatttgtgctctgggagggacatcagagttgtccagtgaagggacccagcattcctattcagaggaagaaaaatatgcttttgttaactggataaacaaagctttggaaaatgatcccgattgtagacatgtcatacccatgaacccaaatactgatgacctgttcaaagcagttggtgatgggatcgtgctctgcaaaatgatcaacctttcagttcctgatacaattgacgagagagcaatcaataagaagaagcttacacccttcatcattcaggaaaacttgaacttggccctgaactctgcttctgccattgggtgtcacgttgtgaacattggtgccgaagatctgcgggccgggaaacctcacctggttttgggactgctttggcagattattaagattggcctgtttgctgacattgaattaagcaggaatgaagcactggcagctttgcttcgagatggtgagacactggaggagcttatgaaattgtctccagaagagcttctgctgagatgggccaacttccatctggaaaactcaggctggcaaaagatcaacaacttcagcgctgacatcaaggattccaaagcctatttccatctgctcaatcaaatcgcaccgaagggacagaaagaaggggagccacggatagatattaacatgtcaggtttcaatgaaactgatgatttaaagagagccgaaagtatgcttcaacaagcagataaattaggttgcagacagttcgttactccagctgatgttgtcagcggaaaccccaaactgaacttggcctttgtagctaacctcttcaataaatatccagcactaactaaacctgaaaaccaggatattgactggactcttctagaaggggaaactcgggaagaaagaaccttccgcaactggatgaactctcttggtgttaatccccacgtcaaccatctctatgctgacctgcaggatgctctggtgatcctacagctgtatgagaggattaaagttcctgtggactggagtaaagttaacaagcctccatacccaaagctgggggccaacatgaagaagttagaaaactgcaactatgcagttgaattagggaagaatccagctaaattctccttggttggcattggaggacaagacctgaacgatggcaaccctaccttgaccttggctgtagtctggcagctgatgagaagatatacccttaatgttctggaagatcttggagagggtcagaaagcaaatgatgacatcattgtaaactgggtcaacagaacattgagtgaagctggaaagtcaacttccattcagagttttaaggacaagaccatcagctccagtttggcggttgtggatttaattgacgccatccaaccaggctgcattaactatgaccttgtgaagagtgggaatctaacagaagatgacaagcacaataacgccaagtacgcagtatcgatggctagaagaatcggagccagagtatatgccctccctgaagaccttgtggaagtaaaaccgaagatggtcatgactgtgtttgcctgtttgatgggcagagggatgaagagagtgtaaaacaaccaatctcaatagaaccaaccttactctccggtgcatgattaccaagtcagctagtcccaggtgaagtgctcatggcttcagaagtcttggtcatttaaaggacttttagttttgattagcaaaactaattaatcgtgacagcctttggagaaagcattttagtaaacaagcaactcctctttcccgtagagctgatctgttcagcacacctgaacatgctcacagccaaccttttgcactctcctcctagaatgctgcccttgacattccggcttgctttgtattatctatgtatcttttccctcctgggatatccatctcttgagacttgcctagatgtgtagataggaatattcttagctcatccttttgctttccacattctagcagttctttctggagaatcctgctctgatgctgtgtggagatgagtgttctttgtttactctgtagtgctgaaaatccgctgaagtaactggctgtgcagaatgtactagaagcttttctcattcttttagtcttaaaatcagtatctttttacagtattctttctacatggatattttttgtacatttaagaatattttgattacatccgacacgtctgctgatttgctactttttaaaaaaggggtcttcatgtaagtaaaacatacaaaagcataaattataggtggaagaaagtggaccctaaggttgcatttccccctcacacccaggctcaaaggaaatgaaatattttgtcttcaataagttggtccgatacatgcttgtttgtttggaaatctttatcacaaaactctttttcagtctaaaatgctgttgaacatgacacttttgaagagagggtgggctcagaatttagacgggaatttgataagcaaagaatgctaaaatgtacaatggatttttaattttacacctataacaaggagatgtggtctcagaaatgggaaagtatgtatgtcggacttgatgtactcttgctctgtcaagctctttgctatagttctcaatatcattatgttaatctaaatctgaaaagtgatgtaatctggtagcatcatagtagtccaaataaaggcatttgcataa

SEQ ID NO: 686 - protein, 628 aa, Mus musculus
MDEMATTQISKDELDELKEAFAKVDLNSNGFICDYELHELFKEANMPLPGYKVREIIQKLMVDGDRNKDGKISFNEFVYIFQEVKSSDIAKTFRKAINRKEGICALGGTSELSSEGTQHSYSEEEKYAFVNWINKALENDPDCRHVIPMNPNTDDLFKAVGDGIVLCKMINLSVPDTIDERAINKKKLTPFIIQENLNLALNSASAIGCHVVNIGAEDLRAGKPHLVLGLLWQIIKIGLFADIELSRNEAALLRDGETLEELMKLSPEELLLRWANFHLENSGWQKINNFSADIKDSKAYFHLLNQIAPKGQKEGEPRIDINMSGFNETDDLKRAESMLQQADKLGCRQFVTPADVVSGNPKLNLAFVANLFNKYPALTKPENQDIDWTLLEGETREERTFRNWMNSLGVNPHVNHLYADLQDALVILQLYERIKVPVDWSKVNKPPYPKLGANMKKLENCNYAVELGKNPAKFSLVGIGGQDLNDGNPTLTLAVVWQLMRRYTLNVLEDLGEGQKANDDIIVNWVNRTLSEAGKSTSIQSFKDKTISSSLAVVDLIDAIQPGCINYDLVKSGNLTEDDKHNNAKYAVSMARRIGARVYALPEDLVEVKPKMVMTVFACLMGRGMKRV

SEQ ID NO: 687 - DNA, 109677 bp, Homo sapiens
atttatttttgagacagactcttgctctgtcaccaggctggagtgcagtagcgtgatctcggctcactgcaacctccacctccagagttcaagcgattctcctgcctcagcctcctgagtagctgggattacaggcacgcgccaccatgcccagctaatttttttgtatttttagtagggatgatcttcatctcctgacctcgtgatccgcccacctcggcctcccaaagtgctgggattacaggcatgagccaccgtgcccggctttatttattttttaatttatttatttttgagatggagtctggctctgttgcccaggctggtgtgcagtggcgcgaactcagctcgcggcaacctccgcctcccgggttcaagcgattctcgtgcctcagccttccgagtagctgggactacaggaacgtgccaccgtggctggctaattttttttatttttatttttattttatatgtatttgtttttgagacagagtcttgccctgtcgcccaggctggagttcagtgctgcaatctcggctcactgcaacctccgcctcctgggtttaaatgattcttgtgccacagcctccagaatagctgggactataggtgcaagccaccaggcccagctaattttttgtatgtgtagtagagacggggtttcaccatgttagccaggccagcctcgaactcccagcctcaagtgatccgcctccctcagcctcccaaagtgctgggaatacaggcatgaaccaccatacccggctgtttgtttatttatttatttttgagatggagtcttgctctgttgcccagggtggagtgcaatggcacgatttcagctcactgcaacctctgcctacggggttcaagcgattctcctgtctcagcctcctgagtagctgggattacaggcatgcaccaccatgccctgctaatttttgtatttttagtagaggaggggtatcgtcatgttggccaggctggtctcaaaatcctgacctcaggtgatccatccgcctcggcctcccacagtgctgggattacaggcgtgagccacccgcccagcctgtttatttaatttttatggttgcttccataatacaacatcagagttgagtagttgcaacagacactgtatggcttgtatgcaaaaatatttactatctggccctttacaggcaaagtttgctaacttctgacttaggataatcttaggcatatgatcgcatttcacgtggcgtcctttccagaggactcccaaatatttaaaactttttataaagccttaattaaacatagttttaggcctaccctattccaaccaccaaatgggatttaagctatgataatgttgctcagtgtatgaaagggaatgcctccctgaatgaacaactttacattctattttcacccttgttcaggtgaatctatggcattgataaagaaacaaaccagtgaaaacattattggttctgaattaccaaagagatgtgtgttgattcagaatgaaacttcttatcctgaaaccttctgtgacacttcctaaggaatttcttggttacttaaaccaaatgtccaattatctttataaccgcaagtatttatgaaaactgtggcatgatttaaatacctcgaccaatttagtcatatggtgattcaaacctttttaaaagtatcagagaagcactagatcaccttttactgcctaggttccgtttctggctgatttgatttgtttgaaattttttttttttgtaatgtttaatttacatctcttttgtagtaagttaaagcactatgttattctttcagtgacagtgacaaaaatgggaacatgctaaccaagaagtggatgaatttatctcccaaggcccttttgattgcatgagtttagtttcttccttgcaattacagatcctttcatatcatatcctcattagtatggttttccttgtgcttaatagcctaattctgtcaatctccttctctttttgaatagcagctatatagagatatgttaaatcaaactaaaatttggcctgagaaagtctttgtacttgtacactcgaattcttaagtataaactgcaacctaacttagtaggtaaacaaactgaaaacctaatttaggagtaggcttctataacaatagctgagtctcagccaatcacagccgccatacttaaacaaccactcacaggcagccagctgttcaaaccctgctcaaataaggcaaaggcccagctgtttctgcactcgcttctgttttctgtatgtcattttcctgattctgtccataaatctcctctgaccatggggcagccccagaatctctgaatctgttctgattctgggagctggctaattctcgaatcgtttttgtttttcttgctcagttaaattctgttaattttaacttgcctaaagtaacagatctaattcgcataccatatagatcaccaattaaaattgtacaattcgatagttttaaatttattcatatagttacgcaaccgccactacaatctattttagaatattttcgttaccccaaaaaggaaccctactagcagtcactcctcatttccccccaattgcccatacccccagtcctaggcaaccactaatctactttctgtctctatggatttttccctttttgtacattttatataaatggaatcatacaatatgtggtcttttgttactggcctcttttcacttagcataatgttttcaaggttcatccatggtgtcacactgtcaatctctttttaaagtcattattttgcatacttagtaaacacagacccaaatatttaactataagcattcttggtagaataaacagttatagcatttaaatatctgatcatattctctctctttctctctgtctctctctctctcacacacacacacacacacataatgcaggtagacactcataaatttaccaaaatttggcctcacatattcagaaatcagttaaacgcaatagactggacatgactgtttctttagaagtctggctagtgctgtggagaattatggataacccttataaattttaaaatgtgcgctacaatttattctgcagggttgtttgtatatgtttaaaagacttttttcataggaagcctccaatatttcaaattacattctaataaaggttgaggttgaatatttcaccaaaaagaatgctttatagcccagacacacaaaatgataacatcaagttgtacgtgctagtgcactcacctaccttaaattctgtgtaagttacaggcatgttattaataatacttccttaaaagcaaaatgtgatatgtgccaattaattatgtaaatctcattgagggaaggattattatggctctaactaaagcaactgtcaaaattactgtaacctggccaggcacggtggctcatgcctgtaatcccagcactttgggagatgggtggatcacttgatatcaggagtttgagaccagcctggccaacatggtgaaacccagtctctactaaaatacaaaaattagccgggtgtggtggcgcacctgtaatcccatctactcaggaggcccgagagtcgcttgcacccaggagtcggaaggttgcagtgagccaagactgcatcattgcactccagtctgggtaacagagcgagactccgtcttaaaaaaaattaaattaaaaaatttaaaaaaaaaaccagacaaacaaaattactgtaactaaaagcaagaccttctgtaacttggcagtttaattaatgtaagacaagaaagattcacaagtcttttcttttattttccttccctccttccctctctccctccctctctccttctctttctctctctctctttctctctcttttttttttattattatgctttaagttctagtgtacatgcacacaacgtgcaggtttgttacatatctatacatgtgccatgttggtgtgctgctcccattaactctacatttacgttaggtatatctcctaatgctatccctccctcctcccccaaccccaggacaggccccggtgtgtgatgttcccctctctcttttcttttctttctttcctttcttccttttgcttccctctttccctccctccctccctccctccctttcttccttccttccttcctcctttccttccttccttcttttctttccttctttcaacagggtcttactctgctttccgggctggagttcagtggtgatatcatagctcactgcagcctcaacctcccagcctcaagtgatcctccaacttcagcctcccaagtagctggaactacaggcatgtaccacgaccatgtccagctaatttttgtattttttgtagagactgggttttgcgatgttgcccaggctggtctcaaattcctgggctcaagtgatctacccacctcggcttccgaaagtgctgggattacaggcatgagcccagcccacaagtctttttaatcactaaagtaagtgttaaaaaaatatattttctcttttaaaaagattacgttagtgagatcccaagcaatcttccttcccattgatgttatcactgcacctttgtggtaggcaaatcctcagtttttcttttgcagataaggaagtagaagcctggaaagaaagcccaaactcagaaacttacctaaagcgctcccattttgctttcttatgttaaattaagtttagcctggttgggtgtggtggctcaggcctctaatcccagtagtttgggaggcccaggcaggtggatcacttgagcccaggcgttcaagtccagcctggacaacatggcaaaaccgcgtctctaccacaaaaaaaaattagttgggtgtggtggcacgagcctgtagtcccagctgcttgggagacttgcggtgtgagaatcacctgagcctgggaaattgaggcttcagtgagccatgatcgtgccactgcactccaacctgggtgacagagcgagaccctgccaaaaaaaaaaaacagtatttccatacatagtgaactgtaacctaaacagatgtgtaaacacactgtaaccctcacttgtaaaaattactgagttttggccaataaaagcagccaattgttcaaattgagttcaaataaagcaaatgccaaggtgtaaccaatccagctattgctgtaccccacttccattttctgtatgtcacttttctttttctgtccataaattctctatgaacatgtggcagcaccagagtctctctgcacctagtctggtttggggtggctgccccatcgttcattgctcaattaaactatgttaaatttaatttgtctgaagtttttcttttatcacttcctaggaatgaaaatggttttcatttctacttgcctatatcaagtcttacccatctttgtcaagcctagctcaagttccattgcacaaaggatgccttctacaactgctttagccctattattctcattcttttcagcctacctacggtgcttcttatatattctatcttgaattgttttctcattattacagttatgtggactttgatcttgaattaatattagactattaattcgttgtgttttgagaccatactttttctatgttgcttataatagttatctgattgattaattagatatttaacacccagaaagtcgggagaggggagggtgacactttaattttgagcatttccagtgatgatagtgatctttgttaaatctatatattataaagtccatactgattaaatatgtcctaatcctattaaagagacttcaattaattttttgttttttattttttaattttcttattctcagatactgataattttttttttaacaagtgaaaatctgaaataagcttggacatgtcagagtaatttctttatgtgaatgtgcgtgtaagatagttggcctgcattagcaggcattcacattcataataatctttaggtttgaaaaatatttgacaattgcctattcactattaatattcatgtcctatacatgtgtacattttgagttggaaacataaaaacactccactaataaacagtggtaataactgttcaaatctgtatcctatggatcaaaaaaaaattaataattgtccaggtcttccaagatttcctctatgccaaatattttaagtatgagagaaacctttaaaatcatacttaattttaataaaaatgtcatctcacagcacactgaataaaaagagggattaggatcaatccaagaacctaaaatatcacaacatggaatagaattatccatgaattaaaaagatgatttaaaaaaggataattccttgaaaataatgtgataaaataaaatacaattaattaaaacagattagtacacaattttacatttagagactgagaaaacaattaggtgtgttagaaaaatgatttagtattgaactgatcaagattctttaagttattcctggcttatataaagtttatgcagcaaaatcattttttaatagactacagaaaggaggttttaaaaaaaatgataaaaattatctcagacggggtgaggaaaaagaagaaaaaataaaataaaataaaataaaataaaataaaaaatggataaaaagttcaagccagtggtcaggcacggtggctcacctctgtaatcccagcactttgggaggccaaggcaggtggatcacctgaggtcaggagttcgagaggagcctggccaacatggtgaaaccccatctctactgaaaaaacaaaaatcggccgggtgtggtggcaggtgcctataataccagctacttgggaggctgaggcaggagaatcgcttgaacccgggaggcagaggttgcaatgagctgagactgtgccgttgcactacagctgaggtgacaacagtgaaactctgtctcaaggaaaaaaaaaaaagttcaaaccagcaatgacatgttaagaataaagaattaaaaatggatagaagaggaaactgacaacttactctaggaaaatttcagggaaaattttagactatgtacacataatacattgtgagctagactggggagagtgttgggcagaacaataggaaaaagagcaagaaaaagggggatgtgcgtatcaaaaggaggaaagaaaagtagtttggacagacaaaaaacctaagagagatattggcgccttcttatgatatcagcggaggacaggaagaataaatggttttcaaaattttgtgatattgactttaagtgatttattacaaaggcattaggatcgaaaattggaaatggaaggaaaggtaaaaactcttaggttactgattcacaaggtctgtgagaatcctatatatattaatagctttttgttgctgttgtttaacaagaatagacataaaataaccattggttcagcaaacatttactgaactcctatgtgtcaggcactatgcaagtcactgtcaaaataaattaaagcctataagcaggtggagggaaccctgacaaacatctgtgcaggctttttgatacagataagaaaacaatcaactttgggttacttcgtgaatgatcctctatgaggtaaattgatggcatgaaaaattataaagaaatgctgtttaagagctttgagcctgaggatcctttcttccagcaaaatgctaaatttgaaaagatcctttagattctgggcaacacaaaggtagcttagttacatcaaactggctgggtatcttaatagtattcattaaaatggagttctacctggattatatagtggagcttgttaaacaggaatctcagctagcatccaaataggtgcttctgtgtttagggtgtgttttatctgttggaaagttactgaggcaatgagaactaatgccatcagctaggtacactgcagctttgaaactatggactattgcatttcaattaaaatgacatttcttgactgaattctgacatcctcagtgatagtggtgaatgaagacttttatcaaagtatagattctattaagcttttaaaaaattttattaattttttttgtagagatgaggtcttgctatgttgtccaggctggtcttgaactcctggcctcatgcaatcctcccactgcacagcctcccaaagtgctggattacaggcgtgagctaccctactcggaccaatgtaagcttttttgaattaaaaacaggaactgtaaatagcatatacgtaggattcttaatatttttactttaaattctagaatttgaaaaataaactaaaattgaatacaacgtaattgagacaaatatatctgcactggaaaatttagcttacagagtcccttcatgctattgctcagtctgtaattttaagtttaagagcaggtggaagctcttcagcggtgaccgacagacaccataaaaggtagaaaactgaaaaagcctatttcctgtatctaaaaattttttgtaaagaattccagaagtcacaccaaacctttggccaattactgaatgctagaaatctcatttgggagcttactgtaaatgtgtgtggcaatgcactggctccatgttcaatccaacgccaacatgttgaaatcagtatttttgtgctggcccaaacctgaaccagtagaaaatctcccataacagaaattcaatgtttgtgaaagcatgattgccctcccatttctttttcaccttcctgtgcctttcataagttcttccagttggttaatcattaattaatatttaacaaggctttttcctcgtgccaagtcctctgctagtctagcctttaggcaatatatgaactccccaagttcttcccttttaagaagccttggcactcactacggattaatttctctaaggaaattcataatggcagatgaaataggggttccttttcaagaacattccattttaaagcctctcagcattttttcctggtacatgtaaaatgcgacttaattgaactaattttaaatgttgacagaactttccaagcacacatttcctcaacaaaatggttacgactggaacaggaaagggcttagactttttcttctacagctatcccacaagtcagtctcttgacctgaccctgcaaaatccctcaaactctggctctctgagttgattttggatatacgatgaaccataggtttggaatgcagataacctccacgtgtattaatgaaagaggtcagctatgacgtggaagccatctcctgggcagagaaggagaagaaatggcagtctggggagtagtaacatgtctccaaattttctctggtgaaaggagactgatgagaattgatacccatttccggtcaaaagagtggaaccaatgtacttccaaccacctcctctcaacccctctccgcatggacaaacataccagacaggtgatgtgggctaacaatttacttggcatgaggccaaaggcttgagggccctgccctgcccatattcttctcccttgacttcttaaggaaaggaatgattgctgatgtttccctctgcaccctttggcacctggactgattgttgcagatgtaattaggaatgttccccaacatgccgttattcttctcacgattctgggagaaactgtacccctcccccatagacttatataggtggcattcaaattcttgttcccaactttttcatctgtttattaatcccacaagattgtgtgaatgtgtactccgagccaggcacgttggacttctaacttcctcttagcccaagtaggaaggggagactcaggcgctggggaccattctcctctccctgcagcagagttgcagtccctatccctcctgggtgcccatccccgtgcctattttcctggatccccacccagttgatgtgacaggctcgtggcccaatccccttcctggttcccaggccgactgctagcaccacccgagccaatggcggcggccgaggggcggagggggctggcaggaggggagggagcgctggctttagagccacagctgcaaagattccgaggtgcagaagttgtctgagtgggttggtcggcggcagtcgggccagacccaggactctgcgactttacgtaagtgctttgtaggcgccggcgggcactaggggagcgggtttcctgggcgtgggcaggagtgggtcccggggagagcatctcggttaagctcagcaggaacgtgcggcgcaccgtggggcgggggttgggggagagggaggtcggagaaatttcagttggagccctcgggcgcccgggcgatcggtcgcaaccgaaatgggtgtgagtgacggggagtttccctactagcatccgccgcagacacgttttctgcacttcactgtattaagtggtgttttcttactagttgctcttaacttgttgccagtcttgggctggagtcctagacgccagcccttgccctgattcccctccgcggctgcggccccgaagtggaaagggagcgcacaacttccctctgtcgtccttctccagctactgccatcccctcttccctcccgcccggactcaggaaatcccggagccagcagcctgctactcctccagcccccacacgcccgcctcgggtgacctggctggcttaagccgaccctggggctctggagagggggggccgtggccgagggaaggcacgaggtttgggttgcctgccttctgcctgcttccctcccttgtccttagcgagggcgtcgcgaacgcacctagtctccctatgagtaagcactttttttcctttcagtaggagaacatctctgggctagtaggacagtacctttccgttctcccctggccccacaccccctgtccttttttcagctcctttgactttgcggccccgggcgcgcggtcggggcggcggcagtcccggacctctcccgactcttggagagggagaggcaaaggggcgacgggagggaggtaatagtctacccccccgccctttccccgcacagctgcacttgcctgtgtttacttttctccacccgcagtacttaagcgctgtaatgagaggcccggggacgccgaccacccccgccctggcttctcgccagtcccaaagttgctgccgccgtcgctgctccagtgtgctggcggttccgaccgccgggctccgggacgtaagatgatcccagcccgggaggtggagtgggggttaatggcatctgactctagccttatgcgatgctccttgcctctcacctgagctgcacgatatccccagtggtgcagaaggttgaacttttgcagaaggttgagcttggagctaagtgggttggagagcctcgccatttagcgtcagacagacgggatgctgggggcgcccggcctgttaagagggattgggaggagggaagggagcctggctaacagtaggtagaaaatgtagggaaaagtaaaaaccattgaggggcaagcacttactccactttgctggatgtcacaatggactggggagcctaaacttgatcctcgagatgcagttcatggtgaattccaactaagtggctggagccccacacataccagttggaatcacgtgccccaagtctctgatggtcacatgacgtctttttactttaaagctggaatgtaatggttgaggcccatattccaaaaaccacctctacgtttgaaaaaaaaaaggtggggaggagtgtgaactagcttctaatcaaggaagtctactaggattttggatgaggggaccagaaagggaatttggtgctcagcttttatccaaaacaaaaacaggagctgtttttaaaataagggattgaaatatatgtgagctgggacatgtatctcctctcttcttcaatctcatggtttttctaaatttaaaaaacatcttactaattattttctagggaagtcatcctattactcatgcctcattttgtccctgaatactagatttgaagctaaatcccacaagatagtgttaaaaagtaaggctctgttcatcttccttggtctggcctatattctaattgaactgttccctattttaggcaactacttaaaggtagtaaataacctcttgactaaaattaaccaccagttatttgtggttttcaattaactggattagaaatcatgcacaaaaacagtggatagtaaatttgatacatcgagttggttgggtttttgcctgtcagtggtttggtagaataatgagaggacactgaaacaactttcccatattgacctatacccgcccaagtggcccaagttaaggttgcttctgggaaaacgtggcaatttggctattcagattatatattacagagtatagaagagaggcagaggagcctctgaggtcaggagtttaaaagctttgcttatctgaaaaaaaaagaaaaaacggacctggttgatgcatattcagtcttgaaaacaactagggcagaagatatttaagagattctgactttgtattcttttgccaaaaaccctttgtctcctgcagcagcctctgaatgaccggagcactccagtttcttgctgttcatccgtttctgagcctgaaaactagaacaaccttaaagcacattgttctgaccccaaggctagccttgtggcacagatgagctggaaatggatttaaggtgcacctgagttactagagttaactacactggtagatagacccctctagtggaagtgaggtgataatataattttagatcgaaataataaatgtttaacctcaaaaaaaggaagttattaccactcaactaggttacagtggtagggggataagttcttttttaagtattgtgaaatcatgtctaaacagaatcatcgctaggctctagtccacagcttttcattgtcttgggatgcctactcattgaacaccacccccaatattgctgactttttttggtggtatgatctaatgagcccaaatttttattgaaattagggggctgggagtcaaattcttgatttttactgttagatctagcagatagcaacccctttacctgaggtggggagctattaataaataaataacactttgccttgacttaatacagacgatcaacattgaagtccaaagtctctagtctgatgtaaccatttagattcaattgataaaaatgactaggcttatggcattttgggtagaaggattaattataactagtgagtaataatttgggtgagattaagcctcttccacaagtggttacacgcacattagactttgactgtgactgtttatactggcagaatgtcagtatctagggcactatcagaaacccaatgagatttttctcccaggagaacagaattctgttactgaaaataaaagggcagcttggccatggtgcttgagcaccaaagtggttctttttggtgacactgagagggtacaagaagaaagtccatttgccattatcccatattctgttttaggcattatttctacttggattttcatgaaatgtactgacagtgttcttagcacatatgataaattcatgagtttgctgttgtgtttgatctagcataatctatgtggaatgtataagctgaactgtttcttttttgatgtttggtacagattatgaaagtagctggtataaaataaaatttgaaaatgaatatctctcaatacatgacaacaatggggtatctgtttttagaatcatgttgtctttggtcatatggcaatttttcttttggtgaagagtgatccagaaggcaaaatttttgatctgtgaaaataatacaactcatttagaagaagtcagctgggtcatgttttgagtctgtattattttagacagtgatataccatataatgtatattcagtgtgttggaggtttcaaagctttttggatacattacaatgttggaagatttttatataccagtggtcatgactagctgattttagttatgagagcgctttggttaaagttatggaaacagtctaatcgtgaaatgtcagtcttagaagatctgatcatacttgggccaatttattttagttacggaggtgagacaatttcagaagattcacgataaatttaataataccaaattttgccttagtcttgacacttggaagataaatattagtgagtataaactgttttagggatgaagaagtattgttagtatacaaaaatgaaaatactaattattttagcatgggtcttttagtcctttgcagtctggacagatagattatcttaagtaaatcattgaacttgccctcagaggaattagattctagatagtgctctgccattgactcataatttgaccttcggaaagtcatttaaaattattatattaataactaattgagtacatacatgtgccagacaccattcatgcttttgtttataaaaagagaggattgctcaagctttttggtttgctgggttttattttttcaaatattcataatctggcttatttcacttatcagttgacttttcaaactttgatgcaattgcattgatccaagctaaatactttgttggcaaattgatgactattcaggaaagtgatcaccagtgggttattccatgactaatgttagttctttaaaataaagaggtgccatttatttaattccttgacagggatttttggtgcattaagcctactgattttataatatgagaaaccttacattttcttaaaagtttagaaacgtatttgataataaggaggtagtgttgtttattggaaaagcattgagcatagaatttagggtcttttagtcctttgcagtctggacagatagatgatcttaagtaactcattgaaattttctgtggtcatatctgggtttcactttatttttaagccatgtgattccaatctacatatttcacaggcatggtaaaaggataagtgagaaacgtgaagccttggcttttaagcagacaggtgctatataaattcaaagtactgcagcagtgtatcatagaaacactaaagctttaacaagagtttacagaaatggcagggttctcatcacgtaagtcttgccacatttttctttgtctgtaaaagttctgcacccatccaatttttacaagcaaaggaaaaataaagccagacatattataatgaaaaataagagactaggttgataacaatagaataaaaacctacatgtgatactttcttcttcttttgttttgttctgttttgttttgttttaaagacggagtcttgctttgtcgcccaggctggagtggtgcagcggcgtgatctcggctcactgcaagctcctcctcccgggttcaggccattctcctgcctcagcctcccgagtagctgggactacaggcgcccgccactgtgcccagctagtttttttgtatttttagtagagacggggtttcaccgtggtctcgatctcctgacctcgtgatccgcccgcctcggcctcccaaagtgctgggattacaggcgtgagccaccgcgcccggcccgttttgttttgttttgttttgagatggagtctcgctctgtcgcccaggctggaatgcaatggcgtgatctcggcccactgcaacctctgcctccgggttcaagtgattctcgtgcctcagcctcctgggtagctgggattacaggcgcgtaccaccacgcctggctaatttttgtatttttagtagaaatggggtttcaccatgttggtcaggctggtctagaattcctgaccttgtgatccgcccgccttggcctcccagagtgctgggattacaggcatgagccaccgcacccagcccatgtgatactttcttctatttcttacctcaaatattgtgcaaggtagcccgttaaagccattaattgggtggtgtttttcccctttttaactaactactgagtagaattttggtcttcagtggtaattgttacagagtccattggcttaccatacctcatttttagttttgtgattgcccataatgggaggtttcgtgtaaaaaacctcataaaaaatcaagtttttcctcctcataattgcagtctaaaggaggacaacacgcaggtctgggaaactgcatagtggaagagataatctatacatttaagtagcatgccatgaataacacaaaaaatggcctggcacggtggctcacatctgtcatcccaacactttgggaggccgaggtgggtggatcacttcaggccaggagaccagcctagccaacatggtgaaaccccgtctctactaaaatacaaaaacttagccaagcacggtggcacgggcttgtagtcccagctacccaagaggctgaggtgggaggattgcttgagcctgggaggcggaggttacagtgagccgagattgcgccattgcactccaagcctgggctaccgagtgagaccccatctcaaaagaaaaacagaaaaacaaacaaacaaacaaaaaaaaacagaaaatgtgggaagttaagttgaaaaataaacaccttcaaagctattaacttggattttcttttcttttcttcttcttttttttttttttttttttgagtcaggttctcactctgtcgcccattcatactctgtccagttcattgaaaatacaagtctgattcccttgagttgtgatattcatacacacacgagtatatatacacttatgtgtgcatatgtatattatataaagttttacgtgatatataatataagtttttactttctgtaaaataaaatttgttagggccgtataatagttttgaatattcatattattgtgttccacattataagctctaattacatcgtgttgcactcagattgacattctgctgttgacactgaaaataacgctttcattcatagatgaatgtaattttcaagctttttttctatatttcttaacttgcttgaatgttcccatttttgccatttcttgttgttcattttaacattttggggcttgtgtttcagatcaggaagaatcaccattatagggtgcaaagagtttgctcagaggtgaaaatgatacgaaattgtccctagagcacatcctattgctatactattcaacatgtatgaattaatctactgggaaagtgtcttgtgtagtgtgtactttaaagatgttttcaatcactttgctttggattagaaaaattcaaggtaactataattttaaatgctcatatttttatgtttattttatatgtaggaagagaaatttttaaaaattggaataacactatatcccattcttttcatttattacattataaacatgtttccaagtgatcaaatatttttaaaaatgtttaaaatcactgcagtatattttatataatggctgtttcataatttatttcactaattccaagttgttgaacatttgtttccatatcttatagataatgcttcagtaagcattcttgatcgaacatcattttgcactctatcattttttagaagtcaccaagaatgttttaaagatgaattcctttgatagtccctgaaatttaaacattggcttaaacaaaaagatagccttgatttcagtggcatttaaaaaaagaaggctgggcatggtggctcaggcctgtaatcccaatactttggaaggccaaggcaggcagatcacttgaggtcaggagttcaagaccagcctggccaacatggcaaaactccgtctctactaaaaatacaaaaaaactagctgagcatggtggcgcacgcctgtaatcccagctacttgggaggctaaggcaggagaatcgcttgaacccaggaggtgaaggttgcagtgagccaagattgcaccactgcactccagcccgggcaacagagcaagactccgtttcaaaaaaaaaaaaagaagaagaaaaaagaaaaggccattctttatatagtgtattgtatcatatgtgactctaaactggaacttgtttaggtaaagtatatgtcttggaagtattttggttttctctgatctagttagcaggtgcagagcaggatgaggtaggattctgtgctgtgtacaatcataggaagttctgttttttgaaacggaactgttaatgggggaagggagacacgtttgtttttaagaagcctttatgtttaatattattataaaactcagttcaagtatacaaagcttatttgtgcctatgaacattcagtatcctaaagaaacatttaatcctggtgttggctaaatgactatttgctgatatgcccttttatctcaaggctattagtttcttaaagtactttgatatcactcaataaactacagttaaactcagagttttacatttcattcaggttgcttaaataatataactaaacataggtccaataatagtaaaaattctgatgctgtcacttaatttgtgcctggtttcagtatatggcgattgcttaaattacaagcacttgaatttacaaatattttgtgtatttaaatggctcattgtacattacatatccctcctgaaacttaacccatgccatttcacagacccttccatggtgtttttctctttcctccagttcactagcctcactcaccaaagactttattggtctgggaattctattatgacccagaagtgacttggaaggttcctttcacccaacaacacattctcactacctttcttttcttttcaggggcatcatttacatgctatgttgcacagtcagaatggattttagcataaagtatgggttccaatagctctcgcattttattatttatttatttgtttagagacagagcctcactttgtcgcccaggctggagtacagtggcacaatctcggctcactgcaacctccatcccccaggttcaagcgattctcctgcctcagccttgtgagtagctgggattataggctcctgccactgtgcccggctaatttttgtatttttagtagagatggggtttcaccgtcttggccaggctggtcttgaactcttgacctcgtgatccacctgcgttggcctcccaaagtgctgggattacaggcatgagccaccgcgcctgggccagctctcccattttatatctctgtggcattgaggaggtttcttaactctctgaacttcagttaccccatgaataaaatgaagataatccactcacttttcactttgttctcataattattatatgagaacacttataaagcaactagcatatggtaggtgctcaataagtattttcatttacaggttgattaatgttgccttagatgatttttgtcaggcatctatatctacctctttttctctaatttgagtaccttcctaccttcctttttttttttttttttttggacagagtcttgctttgtcgcccaggctggagtgcaactgtgcgatctcagctcactgcaaccttgacttcccggggctcaagcgatctccgtgcctcagcctcccgagtagctgggattacaggcgtgtactaccatgcctggctaacttttttttgtagtttgttttttagtagagatgggatttccccatgttgcccaggctggcaagattttagaaattagtggggttttttgtgttttatttaatggtattggaaaaacactccttttattgtttttcattgtgaatgtgaaggattctagccatgtttcaggttgaagaagcttcttcgcttagctcagaaacctgtttatcgtttaatttattctttttttttttttttttttgaaacggagtctcactgtgtcgtccaggctggagtgcagtggcgcgatctcagctcactgcaacctccgcctccgggttcatgcgattctcctgcctcagcctcccgagtagcagggactacaggtgcccaccaccatgccctgctaattttttgtatttttagtagagacggggtttcactgtgttagccaggatggtcttgatctcctaacctcatgaccacccacctcggcctcccaaagtgttgggattacaggcgtgagccactgaaccctgccatttaatttattcttttgtgaggatatgtggagaactagccaagacccgtcacagtggtttacgcgtgtaatcccaacactttgggaggccaaggcgggcaaatcacttcagctcaggagttcgaaaccagcctggccaacatagcaaaactctgtctctactaaatatacaaaaattagccaggcgtgttggcccatgcctatgtacccagctacttggaaggctgaggcacaagaatccctcgagtctgggaggcggaggctgcagtgagccaagatcgtgccacttccctccagcctgggtgacagagcaagactctggaaaaaaaaaaaaagaaaaagaaagagagaaagagaaaaggaaagaggaaaaggaaaaggaaagaaacaagaactcaccttcaaaggaaaattggaaacatggctcagtaaattacagacaccgttataaactcaaggccgctaacaaatacagcttaaatcagaatgaaaggtaataggtagtgttgatacctgacttgtggaggaggaaaaaaaagtaggggcaaagagaaaatatattattgaaaacttaaaatgctgaggatggcagagggttataaagtaaaccaatatgttttcatgatgacatgtagcctttaaaaatggctgaatctaaaacatatttatgatgcccattattttatctagtggaaattttcaaaagcaaaaaccaggaaatgatgaaggctattgacacattcagaaaatattctgagcagtttgtgggtctccattgtaaagctacagttgaatcatttttacaagtgggtatgaataattacaattttatattttgtcctgtggtaattaaaaagcaaatagagccaaattatcattaagcgtaactaacagaaaagtaatattgatagatttacatgtttaaaaatataagccaacccatgcattcagtattttatcctcaaacaaggtgttccagctttagttgacactcagataaaaagcaaactagtggctgggcatggtggctcacatctgtaatctaagcactttgggaggctgaggcaggaggattgcttgagcccaggaattcagaaccaacctgggtaagatatcaagaccctgtctctattttttaaaaaataaaaatagaaaataaattttaaaaaagcaaactagaatatatctagtaggtgctagcagaaggggaaaaattctctaagcagagatttgtgtaaaaatgaagggaaggttaataagtatctagaaactgtaagtgttgtataaaagaaggcttatagaccattggtaaatagatgtaaaactcaaggaaacttttaaacgtgcccaaagttcttaagtatatattaagatggtacaaactacagatgaagtaatagttaaccaaatatactaacatgcacaattgcttaattagtctatttgtggaatggtttcattattcattcaactaccataagtttaatgcagactgttaggtgctagggctacaaagacggataagatactcctccagtctagtagaacagaaagacacaaaaataatcttggttctcatgaaacctaaaaatattcataaatgtagaaaatgaatttagaccgtgcccggtggttcatgccagtaatcccagcaattagggaggccgaggcaagtggatacctgtggtcaggagttcgagaccagcctggccaacatggtgaaaccccgtctctactaaaaatacaaaaattagccgggtgtggtggcaagcgcaagtaatcccagctacttgggaggctgaggtgagagaattgcttggacctgggaggcagaggttgcagtgagccgggattgcgccattgcactccagcctgggtgacaagagtgagactccgtctcaaaaaaaaaaaaaaaaagaaaaaagaaagaaaggaaaaaaaaagaaaatgaatttaaatacagccttttttctcagcataaaataatttctaaatataaaccttgtgtgaacaaagaaattcacttataacccaatataatcaaatctaaactaagaacaaatctcatttaaacattgttatttctttgcaataattattgcataccaaaaaagagcccactatgagttaatgttacttaaatagaacattgctcagcctacaaatgaaggtcagcagacaccagtgtcttggaataaaatagccctttggcaagaaaacgagccacaccccatttagtttttacaaaaataaaattctttccagctttactaaattgtagatgttgcgcccagcatgtacttctgcagtagttgattctgcagctgtggaaatattcatgtatgcagaagtccccaaaaacatctattcaccattacttgcacatgcagctcttatactttctgtagtaaagtattccgttaagttttattttgactcgtggataatagcaagcaactacaggtatagctgacaccttaatttcctgccttgaacttctggccacagactttatttttttattttttgagatggagtatcgctctgttgcccagactggagtgcagtggcataatttcggctcactgcaacctccgcgtcccaggttcaagcaattctcccgcctcagcctcttaagtgcctgggattatggtgcataccaccatgcctggctaatttttgtattttttagtagagatgggttttcactgtgttgaccaggctggtctcgaactcctggcctcaagcgatctgcccacctcgacctcgcaaagtgctgggattacaggcatgagccaccttgcctggcccattgtcacagaattcaaattgagcaggaatacgtaggatttcaaatctaacagttgtttcatttggtgggatagcatcaaagccatgtactgtgaccactgtatatggttttcttcaagagcagcaataaatttctgccatgtaccatgggaaagagctgtacttttagggagaaaggaaataagccctgagaaaaagccccattttcctagttcctttcacagttcacctggcacacaacgggtcttgatatttatatttgaaagagtgaaacatggatggccataaatgctccttgctgataacgattgaattgggaaaatctaatcaggaaatcagtgatttatgaattacattgcataaaatacataatgatgggagcctgtaagaagactaaacaaatggcttccttagtttatttttcctttaggttttagttgttttcagtgaatattatgagtgaatgttatcgatagtgttttcattgtgagaactgctaaactgtagagtcaaagaagaaattgggacatattaatattttgacttttatgccagctttattgagacataatatcatactttttttttttttgagacagagtttcgctcttgttgcccaggctggagtgcaatggcacgatctcggctcaccgtaacctccgcctcccagattcaagcgattctcctgcctcagcctccctagtagctgggattacaggcatgtgccaccacacctggctaattttgtatttttagtagagacagggtttctctatgttggtcaggctggtctcagactcccgacctcaggtaatccgcccacctcggcttcccaaagtactgggattataggcgtgagccaccgcgcccggccccataccatctatttttatagattttagtatattcacagataacatgcaaccttcaccagtcaattttcaaacattttcatcacctcagaaagaaaccccatacactttagctatcaccttccacagcactctacccctgcaaccctaagcaaccactgaactatttcctgtctccattgagttccctgttctggacattacatataaatggagtcatataataggtggtattttgtgactagtttctttcacttagcctaacattttcaaggttcacacaccttgtagcaagtatcagtactctattcctttttatggctggataatatttcattgtacaccatattttgtttatccatttgtccatcgatggatatttggggttgtttctacactatggctatcataaataatgggacatgcaaacattaagtgtctatccatgagtcccctaatgagttagaggtggtgctgacaagataacatttcacttattaccactctgctcttaatataaatccttgctttgattaagcactaccgatttttccatctaagtttttttgttattttttgttccttgagacggagtctggctctgctgcccaggctggagtgcagtggcaccatctcggctcactgcaagctccgcctcccgggttcacgccattctcctgcctcagcctcccaagtagctgggactacaggcgcccgccaccacacctggctaattttttgtatttttagtagagacggggtttcaccgtgttagccaggatggtctcaatctcctgacctcgtgatccacccgcctcggcctcccaaagtactgggattacaggcgtgagccaccgcgcctggcctctatctaagtttagctattttttttcttgtttcctgatgcttattggcttatcatcgacttgttctcaataacgttttccttagtagtatttatactggaataatagaaagcctgtaaatgctgtataatcatcttttctaaaacttattgtataataaacatttagcacagttttgtttaatcacattttttgaacactaaggagcaaaggcaagcagtattaaggagtacaaaagtacatgataaatgctttgaaatgcaatgggttcaatcaaccaaaagcattattgagcacagctaatatatttacttttaaatgtactattcaagtgtgaaatatatccatatagaacaaaattcaaaactcacaaagggccataatgataagtaaattagcctctaacacttaatatttttaagaagacattagtgttttacgtttaggtattttgacagtaagtttgagggagtctttatcttttgaccttttggggtgaatatgagaatgaaggaatataaaaagatgattaaaagaatcaccaggccggaaatgacggctcatgcctgtaatcccagcactttaggaggccgagacaggagaatcacttgagctcaggagtttgacaccagcctgggcaacatagcgagacctcatctctactaaaaataaaacaaaattagccaggcatggtggcgtgcgcctatagtcccagctactcaggaggctgaggtgggagggttgcttgatcccgtgatcacgcctctgtatttcagcttgggtgagagagatcctgtctcaaaaaaataaaataaaataatttcctgcaatttcagattattcttttaagcacccttgaccccagattcaccagatcaaaacagctaatgactcatagaactttactctgtcattattttccagattcaacccacagcgaaatttttgggatccagtctccttactcttatgggcaggcggaaccttgcagatcctttaggaaaggataggcttccctgagaaaggtgggctggagttaagtcaaaaaaaaggtgcaactttctggagtcccatttagaacttcctgcgtatttaataggcctttgctaattattaacaatgtgcctggcacactaacataaataaaacagtgtgccatcgtttgaagagctgagtctaatccacctactgatttttacaaaggaggcaactgaagtctgattttggcttgcctcagcatagagtgctccaggacaatggtggaggatcaggtcgccatcactggagacccagattgtagtaatggaactgatccatcattcttctcactatatatttaaactccatgtccagggtcaactttgtttagtagcagtgcctcttccctgaatcagtttgtatctacacttaatttctttcagagattaataaaatgacaaatgctatctcaataaagttaccatgaactctctgaaactcatatcacccatgactaaagcaacttgctttgagtctgacaagctcttccctagctaatggaaatgcattagcaatagctttacagtggtaagctatttttctaggtcatattcaacccagagtagtcacatgctgacaaaacttcaatcctaaacactgatcataaagagtttcctatattgtatgtaatatatccaaaagtttttgaaaactctaattccagtatattgaatatacattatagggtttatcactcctgatttttttttaattgagacggaatcttgctctgttgcccaggctggagagtagtcccgtgatctcggctcactgcagcctctgcctcccaggttcaagcagttctcgtgcctcagctccccaagtagctgggattacaggcgtgcaccaccacgtctggataatttttgtgttttttgtagagatggggtttcgccatgttggccaggctgatctggaactcctgacctaaactgatcctcccgcctcggcctctaaaagtgctgggattacaggagtaaaccaccatgcctggcccactcctgatttcttctaaactggattttatcattctcagagtcagtgtttcctctctgtattactccttgcctagaaaaaaaaatgtccatttcattcatctattcattgacttattcaagtacttaccgagcaccttatatatgtcagatactattctaggcactggggattacagccgtcaatgaaacagacaaaaatcaccgtctttatgaagcttacatcctactaggggagagatagaaaataaacaatgattttatatattagatgctaatgtgttatggagaaaaagtaagattaatggtataggaagtgggaagaagggtattgccatttcaaaatatgtggtcacagaaggcattactgagagggagatatttcaggcaagatatgaaggaaatcaaggagtatccatgtgaatgtttggggagaagtgtcacttgaacaagtaaaaaatatttctaataacagatacctaaatcatcatacattgatgtgtttcagccctgaaattttcctttatgacaactcctttttattttggtattgaacagaaaaaaataactttcacccagatcaaacactctagtggagtcatgaactgactatatatgctaagaatattgtgtcagaagttatgtcaaaaaagttttgaaaagataaagctaggcgtggtggctcacgcctgtaatcccagcactttgggaggctgaggcaggcggatcacgaggttaggagatcgagaccatcctggctaacacggtgaaacctcgtccctactaaaaatacaaaaaattagactggcgtggtggcgggcgcctgtagtcccagctactcgggaggctgaggcagaagaatggcgtgaacccgggagacggagcttgcagtgagccgagatcacgccactgcacaaaaaaaaaaaaaaaaaaaaaaagataaagtgggaataatgtttaaagcaggatatagaattaatacaagtaaatgttcttcattttccctattaatttaattatactatattctgtgtttaattctgaattagattttttaattaaactttttattttgagataattgtagattcacacctacttgtaagaaatggcacaaagagatcctgtgtacctttacccagtttcttccaatggtaaactcttaaaaaaccatagtacaatagcaaaaccacaatgttgacactgatacagacaagaggcaaatgagtttcattaccagtagaatcccttttattgtcctttgataacaacacacacctccttcctcccctgacctccatttttgaccccaggaaaccactaatctgttctccatgtctataattttgtcatttaaaaatattatataaatggaatgatatatagtatgtagcctttgggaattagctttttttctctgagcgtaattctcttagagattcaacctaagttgttgtgtatgtcaatacctcgttccttttcattgttgaatagtattccatggtgtgtatgtaacaaagtttatttaaccattcacccattgaaggatatctgggccatttccagttttttagttatcacaagtatttgtatacaggtgttagtgtgaacttcagttttcgtttctctgggattaatgccggaagagtgcaaatgctgagttgtatgagagttgcatgtttaattttataagaaattgccaaagtgtttgcccagagtgactgtaccattgtgtgcttccaccagcaatgtatgagtgatccagtttttccacatccttgccagcctttggtggtgtcactgtttttcattttagccattctgataggtgtgtagtgatagctcattgtagttgcattttcagtttcataataactaatgatgtttaacattttttatgcacttatttcccatctgtttgccctcttcagtgaaatgtctgttcatgtcttttacctattttctttcatttttgagacagggtcttgctctgttgcccgggctggagtgcagtggcgcaatcacggctcgctgcagcgtcaacatcctgggctcaagtgattctcctgcctaagcctcccaagtagctgggactacaggtgcacaccaccattttattttttgtagagttggggtcttgttatattgcccaggctgatgtgaaacgtctggcctcaagcagtactccgcccttggcctcctactgtgctgggattacagacatgagccaccatgcctggcccttttgtctgttttctaattggattatttgtgtttttactgttgtggaattttaagaggtctttatgtattctagagtctaattctttatcagatatgtggcatacaaatattttctcctcgcctgtagcttatcttttcatcttctgaacagaatctttcatagaacaaaaggatttatttggtgaggcccactttatcagtatttccttttatggattgatttttggtgtcatgtccgagaactcttcatcaaatcaggttcctgaagaatttctctttcccccctaaagttttatagttttatgttttacatttaggtctgtgatctgttttgagctaacttttgtgtaaggtgtgaagtttgggttgaagtttcttattttttgttttggactgtgtttgtcctcgtctactgacatggttttttgcacccttgtgaaaaatcattgaatatatttgtgtaaatctgtttctgggttctcttctgttccgttgttttgagtatctgttgctctgtcagtatcacactgtcttgattactgtagctacatagtctgacttaatgccaggtggagtctattcaccttatttttcaacagttttagatgttctaaggcttgttcctttccatgttaatttttaaaagaagcttgtctataactacaaaaactgttctaggattttgagaggaattgatttaatgaattagacttttgaaattgcatatgtaatgttaataaagttaaaaatggtaattctgttaaggaaaacaatttagttccttccaaagtctaacgctagttcttattttctgaagaaatgtgtatttttatgattttgaaattattgaatgaatattaattagcagtttcttttttattttttaaattttttgtgtggagatggggtcccactatgttgcccaggctggtctcaaactcctggtctcaagcaatcctcccgcctcagcctcccaaagtcctggtattacaggcgtgaaccaccatgcccggccagcagtttcctttcagccataacatgaatgaccttttttaatggccaaaattgaagtttgtcaggttctaaatcactaatatgtttttgaatttaaaaatttttgaaggtttacttctggaatttttaagaccaaccattagatttataaggctgttaataagattcctaaacctattgttttgccttaaggaaagtatggtttaccttttgtgttatcccaaacaaattcatctccccatatagcaaaatggaatatgctactaaatagttgaaatttagggtaatggagtttgggatatgtttattattcatgaatagtaagtcaaaagtttttaaatgaaaacatttgtgtattctcatgctttgattgttgattctgcaaaataaaatcttaaaaattacaaaaagcatctgataaacttcttaatttaaaagaacactcagaaatttactttcaggtatttaaaaaaagagggaggctatcaaactgattaggactgaagaagaactgaagagataatgtcaccttgttggttttgggtgagggaaaattgaatgagatcatgctttctttctgtcttgctttctcaagataaagcttttccactcttctgtctgcttactgattcagggtggcaggcacaaaacaaaacgttccggttatattttccatcctgtttatatttaaattggctgtttattctttaataaagtgtataactgttggtctataacattatgaatgtgggattaagtggttagacttagcaggaatttgaaaatcagggtccaaatgtactaccctaagtacagtagcagaattacttctataaagaaaacttccctaagttacagcatctggctcatagcattatcattacagtgaagtttaccatcactcatattagtgatgtgttacttcccacttactcctaaccctgcttaggtaatgcaaaactataatttagaaagtgtgatttaaagaagatgcaatataatggtactcattgtaaacatatatccagatttctttcttcacatataatttatctgtatttttaaatttattttgtctaatgaaagacttttaaaagctcattctctcgagcagtgaattctcagctagtgagccaggacagtctgcctcatcaaaagaattctgctaattgctttagccaatttctgaggtaataagctgggagagggaagaggttggttactcatgcataggtgactttttgctaacagtgtgatttttaggaagtgaagaccacaaaagctttttgacttgtggcagaattcattatgatgagactttagctgtaccaggtaacagattgccaaataaaacaccaaacaagcaagattggtcagttacaatccagtctgtagtagtctgatccagcatagtgttatgtttatggattcaattccctcctcgaagtcatacaattgaggcatctcagtagaaataaaacaaaataaacaaattttgtagggaagctcctatacatttgaatggtaagggcatataactattaatactttatgagaccatggtattttgcagccaatcttaaggataaatctacattgtgttcaggattctgtgttgggccagacttaacaatgaccattatgtgtagaaaatagcaaccattgttgctgaattaaactctctctggagatttaaacatttttttaaaaaattaagctaataggccaagcgtggtagctcacgcctgaatcccaacactttaggaggccgacgcgggcggatcacttgaggacaggagtttgagatcagcctgggcaacgtggcgaaagcccgtctctactaaaaacacaaaaagattagccaggcatggtggtatgcatctggtcccaggtactcgggaggccgaggtgataggatcacctgagcctgggggaggttcaggctgctgtaagctgtgattgcaccacggcactcagcctgagtgacagagggagactctgtctttaaaaaaaagaaaagaaaagaaaaagctaataaaaccttgatgacaacatagccaaagaaattaatcagagaagagtggtgattagaaacagaaagcatagtggaatagatgaattacacctggcaaaggaactctaaactatattatgtaaagctcaggacagtctacttgtctgaaaaagaaataccaaaagtatacacatgcaaaaatttggatttttcagctggactttttgtgaaaggttccctcccaccccaaattcaaaagaagtataaagcaggccattcatggcaaactcccaatgaaatggaattaatttgtattgtgttttgaaagtgtatatatgtgcttgcaggaattacatggaagaattatactgacatagagtggctctcaaagtgaataatggaatcttaaggatgttttattaaacagcgagtcaactatttttctccgtgaatgtgactccacaatgatagtggaagtcagaaaatatttcacatgcaaatatatctgaaattcttcatggatgtatttaacgctttgaagtgatggcaacatctggtagcaagtagaagccagcgtcttaaaagctatggcttcatgttactacttcatctgaattagtcatttaaaggggattttatatgtcttcctaaaaactgacgaggttaatcttagactagggcaggctggcaggaaatgctaaagcggctctttcttttgaaggttttgttattccttgtgaggtcaaaaagtagttgttttaaagtttggaaagctaaagcagtgatgttttgactcttgacagtgagatgtttttctttttttttgggggagggtgtgtgtggcaagtttgaggaaaaacttgatacactgagagttctttatactttccactccacttattttctctcaaatgaatttattttctaaaggtgcagaatttagaaattcgtttcaattaccaaatctgagcatggatttggtgctattagaagatgtaaccaccatgtgtttggccagattagctttcaggaatgatcgtatcttacagagttagccaatggaacaagagtagatgccttttatccttatttatttgctttgcattaaaaagacaaatgctgaaagtttattcttgactatgaaataaaccactataatatatgacactgagttaattcctttaggatgctatgtcttccacatacatccatttaataaatatttgttgagtgcctactgtatgccaggcactgttctataagctgaaaatagattgctggacaaaacagacaaaaaatcactgccctcttagagcttattaaatacgaaaacagtagagcaatttaaaattatttaatgctatcactcagcttttaaagatcttcactgaatgagttttgagaacttttgcacatattatctacagcttgaatagggaaaaaatgacattttgtttgaaatctagttcaagaagctagaagctgataagtaaagtaaatattttattctgtgatgatcattttcagttttcatttatcagtgttatacttaggcctcttgaggaatgttactagtttaacttgtggatttcctcctgaggatgggcttaatttgtattgggggaggtggtgaaaggacctagtagccctggaatttaatgtaaagtcgtggcatttgtaaaactatcttctgtcatttgaaaaattatagaatacttaaatgtatttaatgctccctgtggaaaatgaatgtattgctcagttatttttgcctatgtgagtagtacaagagctgactcaaaggagatgacatgatggttcctgtcctgaagtgaaataagatgatgggttgtggtggaaaaatgatgtggtcatgcccatatttgctcacatctcttgttcgtttccttttatagagggaaaccagggaaagtctcatttcttattttttgtttcctttttgtattttctttcatacgccatttccctttctttttttcttaaaattgcattatagtgacttccaattcaattggctcaagttgtacttggtaatgacataaagaaataccgcttagaaaggtcatagtggaagcattatacccattttagggaattgattatatatatagacacagccactctgagccccttgaggatatgaaaagcatgttgcagaaatcctcatatttcctgatgccaactagtatagtgccttttacagaatatatgcttaatcggtatttatctattgaacaaatatgagccatgaaatttaattttgctctccaaaatcccaagtcctttatataagtaggcagaaattttaaaaagtctttttttttgtttgtttgttttttgagacagagtcttgcactgtggcctgggctggagtgcagtggtgcaatctcagctcactgcaagctccgcctcctgggttcaagattttctcctgcctcaggctcctaagtagctgggattacaggcacccgccaccacgcccagctaattttttgtatttttagtagagacgggatttcaccatgttggccaggctgatctcaaactcctgacctcgtgatttgccctcctcagcctcccaaagcactgggattacaggtgtgagccactgcacccggtctaaaaacttatttttatggaattattcaaatacataatgtaaaatagcattaaaaacccccagctttaacaattaccagtatttcatgttcttatttcatctttgctctccccttttttgagatttgctttaaaataatccgcatattgttttaccgataaatactatagtatacttcttagtttttaatattttaagatagtagtgtttgcatttcatatggagttttacttttaaaccctttctgtgctactttatgcaagagaaagaaattcttaaccgcttatcagaagaaaaatctaatttttttttttttgacggagttttgctcttgttgcccaggctggggtgcaatggtgtgatctcggctcacagcaacctccgcctcccgggttcaagccattctcctgcctcagcctccgaatagctgggattacaggcctgtgccaccacacccggctaattttgtatttttaccggagacggggtttctccatgttggtcaggctagtctcgaactccagacctcaggtgatccacctgcctcggcctcccaaagtgctgagattacaggcgtgagccactgcgcccggccaagaataatctaatttgctgtgtatgagtaggatgttaactcattttgtaacatatatttcctttcttaatcttttaaaaaattttattaaaagtttctaaacaggccgggcgctgtggctcacacctataatgccagcactttgggaggctgaggcggacaggtcatgaggccaggagttcgagactagcctggccaacatagtgaaacccggtctctactaaaaatacaaaaaaaaaaaaaaaatagccatgtgtggtggcaggtgcctgtagtcccagatacttgggaggctgaggcaggagaatcgcttgaactcgggagggggaggttgcagtgagccaagattgtgccacgcactccagcctggaggatggagtgagactccgtctcaaaaaaaaaaaaaaagtttctaaacaacattgtacatgttatgtcatgactgtcatgataaagtcttgccttttagacatgaacctgattcagcaaaatgtgctttgaagtagataagctgtagatttttgtcttgcctgaattgatattaaagagatgttttttcttttcacagttcaaaagtacagaactcaggttaaaacctagatatgtaattttgttaattttattttcagtttgaaaattcttgttaaaacctgcatactttataggtttgctgtctctaaaattagatggctccttcataaatattactgaataaagcaccagttttcaaaaagtgtggcacatgggctcatgggggttaaaattactttcatgataaaactaaattgttatttgttttttcactgtgttaacatttgcactgatgatgcaaaagcagtagtgggtaaagctgctgaatcaagatagtggccccacactgtagtgatagccactgtattcctcagcaccataccatcacctttagaaaaaaatcttacaacatgcatttcatttacaaatgtacttgatgaagcaggaaaaaataattgtattaaatctcaattcttaggtatgcatctttttaaatattgtgtgtgatgagataagacatacccataaagtatttctgctgcatatggatatatgacgattgtcttgagggaaagcacttgcgcagctgtttgagttgtgagctaaactagctgcctttttaaaaatagaaaaccaggccgggcgcggtggctcacgcctgtaatcccagcactttgggaggccgaggcgggcagatcacgaggtcaggagatcgagaccatcctggctaacacggtgaaaccccgtctccactaaaaatacaaaaaattagctgggcgtggtggcgggcacctgtagtcccagctacttgggaggctgaggcaggagaatggcgtgaactagggaggcggagcttgcagtgagccgagatcgcgccactgcactccagcctgggcgacagagcgagactccgtctcaaaaaaaaaaaaaaaaagacaaccagttttactttgaaagattgaattaactgattattcagacccgagtatctaacagatactttatttttaaaaaatgaaccaagtgtgcctctcactgcaagggaaacaactaagagtatttgttgccaatgctaaaattagagctttcaagcaaaattcaaatttttgagaacttgcattggtcaccattttatccgatcaatacttaggcttttctagtgaaatcgacagtataattaatgaaaataatgtgttagattttgtataatgaaatgtatcagcatttggaagacccacataacttactgaaacaatatttttccaaataactaatgtatgatgttacaaaatcaagcatgggtaaaaggcccattctaagtgcaagacagacaaatagattttgaaaaaatcattgatattgtatcagactctacattgcaaccaacctttgaaaaactaccacttctctcgagttttggtgtagtattgaagaatatctgtaagtatctggaaagcctcttaaagtatttctttctttttacaacagtttatctgtaggaggccagatgttcttcatgcactggaaccaaaaccggtattgcaaaagattgaatgcagaagcagatatgaaaacccagctttcttgttctaggttaaacattaaagcgatttgcaacaatgtaaacaatgccacccttgtcactacactttttttgaaaatatagttatttttcattaaaaagcttatgttaacatgtaatgggcttattcttatttttaaacaaataaatatcttaaaagtttcgtagtcgcaatttttgatgtgacaaatacactgatagatctaacccatgtgtcaccaaactctttgggatcctcagatcctgaggccaaaaagtttaggaactgctgagttgggttttttgttgttgtttccctccttatccctttgccccacccctccacttttctcctattcccctctcctttcttttctttttttgagtgagagagagaccctcaggatagaaaattgtagagcatgtgagttattcctttgtatgtttttattagctacgaactgaacatgtatgtcttttaaattcattcattgccccatgtgtagttcgatgtattttgaccttttcttttatttattttaaaattttgattacttagttacacaaataaagagctaataaatactatcagggagacagcccttggaatattgaattttatattttcttctgcgacagtcttgctctgtccgtgcagtggcaagatcacagctcacctcctgggctcaagctatcctcctacctcagcctcccaagtagctgggactacaggcgacagccaccatgcccagctaatttttttgtattttttttgtaaagacagggttttgccatgttgcccacgctgctctcgaactcccgggctaaagtgatccacccacctctgcctcccaaggtgctgggattacaagcaccagccaccacgcctggccagaatattgaaattaagatatattctgacttatttttccccaaatatgaaaaaaatgattacatatatgacttgattattaaaattgacacatccatgcaacaagtttatatacctaatgctgtgcctggtatgaatttcctaaactttccaatatagtcccaaaattacagtagtagtttcttgaatgtaaacttgttgcctgttttatatgttagatccctttgcttctatgcttcactcactatgtttgtttgttcgctttgtttttataagtcatgaagatggaaaaaaaactgtttcatgaaaggaaaatagatgagtgttgttgaggtgtgtcattaagcacagtgggagaggcctccaatgtacgtgtcacacatggaaagtatacctagtactgggtgtggtggagagcatgacgtctggatgaaagttgtaagagactttaaaaatactatgcctagcttttgtgttacaactacatattccactgatacttatgtgaaactcccataacttttcgggttgtacctcttttttccaccctggggtgggagtgtgtccacaagtgcatgtgtgtgaactcttaactttgtgtttgtattttgagatggagtctctgtggcccaggctggagtgcagtggtgcaatctctgctcactgcaacctccacttctggggttcaagctgttctcctgcctcagcctcccaagtagctgggactacaagggcacaacaccaatctggcttttttgaatttttggtagagacggggtttcaccacgttggccaggcttgtctggaactcctgacctcaggtgatccgcccacctcagcctcgcaaagtgctgggattacaggcctgagccaccgcgcccagcccggcctgaactcttaactgtatggtttctgtttgtaacatctagagagagtgacagtgagaatttggtttccgtcggctttccttagcattcattttgatgaatttgggatgcaatttaaaagctgttttcattctgtggcctgctgatgaaaatgtagaatttattgcagaacccttgccaccgtcttgcattcccaaaccagtgttcattacccatagtaaaaaccgagatcctgttcacacacatgcacatacacagacacgctccccaccgcccccgtcacgcacacacccacacacacctcggatggtgagtgagatagaagtttagtttacatgctaaaactggttaaattactgatgtggtagaactgtcttttagcccgggcacagttgctcacacctgtaatcccagcactttgggaggccaaggtgggtggatcacctgaggtcaggagttctagaccagcctggccaacatggtgaaaacccgtctctactaaaaatacaaaaattagccgggcatggtggcaggtgcctgtaatcccagctactcgggaggctgaggccagagaatagctggaacccgggaggcggaggttgcagtgagctgagatcgaaccactgcactccaacctgggcgacagagcgagactccgtctcaaaaataataataataaataaaagaaacaaaaaactggccgggcgcggtggctcacgccttgtaatcccagcactttgggaggctgaggcgggcagatcccaaggtcaggagatcgagaccatcctggttaacacggtgaaatcccgtctctactaaaaatacaaaaaaattagccgggcgtggtggcgggtgcttgtagtcccagctactcaggaggctgaggcaggagaatggcatgaacccgggaggtggagcttgcagtgagccacgatcccgccactacactccagcctgggtgacagagcgagactccgtctcaaaaaaaaaacaaaccaaaactgtctttatgtcctacctagcatttactaagtagaagatgtgcccttttgaagggcatgtctattcctagaactttaactacaatgctttgcagtagaaatatatgctattgtattaaggtgaagtgactttagaattagtaactcggtgttgacagatcatgctgatcgaagattagccttggagtttggaaagctggagagcatgtatattccagatgaccaggaaaggaaaagtcagaaaaacagtttttaagtagtactgttataacgacctgtaaaacttgaaacgagagaaagctgtcttctaaaatgaagaattacatatttaaaacattaatttcctcaatgatactgctacatatctgaaaagggtggttacgtagcatttgggacagacccgtctcagtggtttgaggcaacaggtgtggctgaagaaaaggtaaggctggggaaaaaccaacatttctggtctaaactgatactgtcttcttacctgaggcagtttcctatgccctggttttctctgtctgaaaaatgcatgataacacatactcttcaaattagctcaaaatgcttggtagttacctactattccctgacaggccacaggcagatagttctatgcttgttttagaaatggagaatttggtactcagaaaagttgaagaagcttcatttcattcacatagtgagtcagcaacaaggacagacggaaaaacatgtcctatgactcctgccattgtattccttctcttctgcattgtgttgccttttgatatttcacgaaggttttgtgattggtgaaataaattaaagcacttccatgaaggagacaaaatgtaacccagtgtctgctgatggtggttagtgacgaggacaggagaacactgcctcataatggggactatccggtgagggctccttttcacaggtgcccacactgtgagtcacctccttatgctgagagttcggtatgctatcataaaatactttgttgtgtattatttatgaaggactagagtatctattgtctcactttctttcattctcatgaggtagattacagcagcagatggcattatgcatgctttatcccagacacaagaaaataatatctgccacttactgagtaccttgctggacccagacactcttacatatttatatcttcccattgggtcatcccgtggaccttgtgaaatatgtggaatagctccattgttatagatatgaacccggggctcagagaagctaagtaatttgttcagggtcacacagacttacaggtctgtcagactcctaagaccctgatgctttcattgtgctgcatttccttcaaattatgaacttgccctatgtcagcacagaaacggcctcttcagcctagcccagtgctccaactgattgttctctctcataaaaggcactcacaactaaccacttgcttgatttaggaattcactgattagattgctagaccagttaaaggcaaatttcaataatgagagcagttatcacgtatctagtacttaccatgcgccagactatgatctaaatttatgacacatattaaatcatttaagccttacaaccatgtataaaatagtgaactgcgatatgatggagttgctcttatcttcatcccgggatgagaaaatagaggcagaagagttttaagcaatttgcacagttaataaagtgtggagccagaatttgaacccaatctggctccagacctctttactacagctctcagttagaaaattatttctaactgagatatttcggttcagcaagtgttggcttagttcctgtgtgctatgccagcagaaaatatagttcctacacagaagagcttacatttttgacataaatcaaaatgtatatacttgaaataaatgctacaacaccttagcatatggggtgtaaatgttgtgtatggatcagcatgaataatagagactgttagtgagtggcttgagagttaatttgccttcgcaagtaatgttcttgactatggacgagtgacttgggcactggggagaagctgttccatgtgttctaaaataagcaggttacttggctactgttcaaactctaaataggtatatgggttgtagctatttgacctgaactaactttaaattcccctgagtccttatatgattttggggaaaaaaaaaaaaggaagaagaaaaaagaaaacttttctctgtaaatgctgcatttaaattagaatttattaaattctctgcaaaataccgccaggctgacaggaaggggattcgtaagtattgtatcattcttttgtcagggtgttctctttttctagcaggaagtgttgtgacttgctttctaaagttgcaattgtaagaagaatgttgggtttccagattgctcttctgggcgtgggagaaggttctgtctatcagtgctgcgagaaaggaaagaaacaagtttgctctcagcgggtaactattttaatattattttgacaggctctaactttgagattactaaatctaaatttaaatactaaatgattaagcaggaatttacgtcaaaaagcttgaaattcctgttatttatttgggtaaacatttggagtcactttaaaaatattatttattcaagtagaataaaatttttgttaagagaaaattttgaagtttagattctaacctgttctgtgtgtattctgtatttttctttatttagagaatgtttagggagtttatactttttaaaaatgggttttgaaatcctaattatacagccgtatttatcaagttaagtatctaaaacactaaataatagaaattattgtctatatttgtggtgggggtgggatttcaaatgcttttgatcccagttacatggtttttcaaaattctgtaaaatggaggttgaggtggctgtcatgacagaacatgtcacgattagattgatattatactcttcctacgtgagttaaatcaaacagttgtcttagtgtttataatttacaaaataataaacatcactggtgattaaattttgatggcgttattggtacttggcagcaatagtgatttctggtgctcacatacattaggattttccatcacatggttgtcatataagtttaatttccccatatttctggcaaagggaagtatagctagttatacagtcaatcctcactctgagttgagtcacctctcggactggttgtacttaatatgcgcatatgaagtaaaaagtgaagcatgaaacaaaacaaaccagttttttcaattaacaagtgctgtatttgctaacatataagcaaggtatataacactgcaagaggcattttcagtgacttgccgatagctttctgcttcgtgtatatagtgatttgagttgtaggtcacaatattttatggcatttttattttgaattgaagtgaagcatggtaactagtctgatcttgcctagcctctctctctctctctccctccctctctctctctctctctctctctcacacacacacacacacacacaccccacacacacatatccctgaaagttgcccttggcttcactcaaacatatgttaattttcataagaaaggaaactggtggaaatacttcttaggtatgaaaattaattaatttcattagcagcagatttattttcccataaattattcagattttgggggtagatgtaaaagtttacttaggcatggaagacattagaccttttaaaagcaaagtgggctatttcaatctaagaagttagttaatgtaccttagctttctgaagctaggggaaggagaggtgtctttttgttgtgtctttgggtttgaaatagtattcttcatcctaggaaaaagggcttttagactataattgagacttgcattaaatagctgcaaaattcttgcctgagaaacgtttaaatgatgtctttaatctgaccaaattgaattgaatatttctattattggaaaaagctacgtattaatttatttttaaatagccattgctttcagatcttatctttgtttattaagtataaaaagaggaaaggaaacttttacctaaaatggaggtatttgatattcctccaggaaatgacacaggattgggcaccctttggggtttaagtgactcatagatattggtactgaaaacaaaacaaaacaaaagatcagttagaatctagctaatgatcaattatagcacagaatagaagtatttccagaaaaatgaactcatttcttaatagctatgtaggggtgaaatcacaggatttctgagatttgctttaaaataattcatggaagagagacagggaaggagggagggagaagaaaggacaggaagagagaatagatgaaccaagcaaatgtggggaaatctggataaatgtagaatctgtgatgggtttatgggtgttttttgtgctattttctcttgtatatattgaaaatattgacaataaaaaatgttagtagacctttagtttggggcaatttatatttattttctttcttttttttttttttttttttgagatggagtctcactctgttgcccaggctggagtgcagtggcacgatcttggctcatgcaacctccacctcccgggttcaagcagctctcctgcctcagcctcccgagtagctgggattacaggcacccaccaccacgcccggctaatttttgtgtttttagtagagatggggtttcaccatactggccaggctggtcttgaactccttatatttacttctaaatgtcaacttttatctataaattgcaggcctgtcaaaacatgatgtatgcatgatgtgtatgactgtaaaggtgaaatgtgctgcttgaatgccaaaatggttgaaagtaaaaactgcttctgaaaaggtttatttctgtttgattttcagctaaattcaaaggacaggtcacaaacatcttgaagagttttttagtatcttgaagtattaaacaagggtagttaaagcatgataacaggccaattgtatgtgaagaatgtgaagacgttattgaacttgactattttgttcacagctttctccaatagagtatgtgtttttaaaaccacgtgagaggactatatagcctgcatgatgtataggtctgcgcactttccctactcacctccatcgaagtttatttattgaacaaacattcggtaggtgcttgtggtgagccaagatacaaagtcaaataagataccaaccgtgcttttaaggagctcacaggctcgtggaggagatagagaaagaaatagatgtcatcacgctgaaagctgaaaagggctataggaatatggggaaggggaggaacgggttagcaactatgaccctatgacgcatctcctttaaaataatacaaggctgggcacagtggctcatgcctgtaatcccaacattttgggaggcctaggtgggcagatcacttgaggtcagtagttcgagacaagtctggcccacatggtgaaaccccgtctctcctaaaagaataaaaactagccagatgtggtggcgcatgcttgtaatgctagcaactgtgaaagctgaggcgggagaatcgcttgaacccaggagtcggaggttgcagtgagctgagatagagccactgcactcaagcctgggtgacagagcaagactctgtctcaagaaaataataataatataaaataaggctgggtgcggtggctcactcctgtaatcccagcactttgggaggccgaggcgggtgggtcacctgagatcaggagttcgagaccagcctgatcaacctggtgaaaccccatctctagtaaaaatacaaaaactagccaggcatggtggtgggcgcctgtaatcccagctacccaggaggctgaggcaggagaatcacttgaacccaggaggtgggaggtttgcagtgagccaagatcatgccattgcactccagcctgggcgacagagcgagactctgcctcaaaactaataataataatataatgtaatataatacaaacagaaaattggagatggtttaattggttgtgggtattacagtggtagaagagggctaaaatggcttagtctaaccccatgcataactttgcaaataactcttctgctctcatctctcttccccgcccttcttaataaacctttatttctttcttatgcatccacaggggttattggagcagtgtacgtgcagaacagagcaatctcttcttcacattaaagagtagactgatgtttaagtctcccttaaaggttttagatatatccaaggccgaattatagttattaggtaggcagctacttggagttggataaagggtagagttagccttcagtcacagatagagccttctaaagttcatttctcaattgatttggaatttgaaacatattttgtcatggaaatagtagtagggtttttcaggttactttacaagtattcctgaaattttatattatgttatctggcatgatatggttttgttctatgatatcttattttattttcattgtattctatgtgaattgtagaagcacagttgctaaatatatccagatttatgttccatcagccagttactttattctctagttcctgatactatacaatctaatcagtgtatataataatgcctcatgagaaaatactgtcaattttatttgaggtacctaatgatgtcctctgtttagttgtacaatttgcagctgaaatattaagtagaatgaacagaagagctagacctgaaaaataacttaccgaagtaaagtctgctatacgtggtgattatttctttcatagatgtttgctcaccacattgactataagaagaaatttttggctgggcatgatggctcatacctgtaacctcagcacttttggaggccaaagcagacaaatcacttgagcccaggagttcaagaccaacctggagaacatggcaaaaccccatctctccaaaaaatacaaaaattagctggggtgatattgcgtgcctgtaatcccagttactcagggggctaaggtgggaagatttcttgagcccaggagttggaggcttcagttaccatgacactgcactccagcctgggcgacacagcgagattctatttcaaaaaaaaaaaaaaaagaagaaggagaagaagcaatttttgataatgctgatgtgctagaattaatgcacagtaaaacacttcaccactttttcttctgcttcaacctttcctagacttttaggactaggaacctatgacacacgtgagggcatttaggttttgactcccttattttgactttcagagcaacaaatcattaaataaaaattatgcatatagcctcttaagcctttacaattactcctttaccaagattccgtgaaagttttctaaaatgagtcaagcaaaattccaagccacttgttcttgagaaaaatcttgaaagaaaaaatttttaaatgaaaagtaaatcacatagatacttgagtgtttgttttatattaagactaagttattagcactgatacaatgggagtggttgttcacaatacttagcattcatgaggctgaaattaagcagtattaacaaagagaagcagaagcctgtcatatgtaggaatgaatgtgtcataggagaaagtaagcgtttgtgtgcttttttttcagaatattgcctgttttatgatcagtgccaatttaacaccaatgttttaaataaatgacttttagaactctgtatgagtctttactgaactcattgtctatattctgtatgttttatacaattaaagttttggttattttagttcaaggcttaagtgaatcccttatccttttaaataatgaaaacaagttagtattagctggagggggttactatctccattttctggcaactgttcttatttctcgatatcatggtcatatttgttaggagctttttaagttattttccaaaggctatatatactaggcatggaccttctctctgcaaagcaatgtgtagtctctttgtttttgtttttctgggaagagtagttaattggctgggcactgcagctcaagcctgtaatcccagcactttgggaggctgaggcaggaggatcacttgagccctggagttttagaccagcttggcaacatagtgagatcctgtctctacaaaaaaaaaaaaaaaaaagaaataaaaattaaaaattagccgagtatggtggtgcatgcttgtagtcctagctactgggggtgggaggtgctgaagcaggaggatcacttgaggccaggagttggaggctgcagtgatcatgccactgcactgcagcctggacatctcagcaagactctatctcaaaaaaaaaaaaaaaaggaaagagggaaaaaacagttaattacctttcctccaacacatgcttttgctttttttttttttttccagctatgcttggagaaacacattattattattattattattattttgaggtggagtcttgctgtgtcgcccaggctggagtgcagtggtccaatctcggctcactgcagcctccgcctcctgggttcaagcaattctcctgcctcagccccttgagtagctgggactacaggcacgtgcagccaggccctgttaatttttgtatttttagtagagacggggcttcaccatgttggccaggatggtcttgatctctgaccttgtgatctgcccgcctcggcctcgcaaagtgctgagattacaggcatgagccactgcgcctggctgagaaatacatctttttaattgtgcttcacagctttgtgtcctgggcaaagtcaacgactatcccaggcacttgtttattccctaatacaatttagggaatgaagttatggaactctacagacttcttagctttcaaattctcattgctgtgatcactggatattgggaatactgggaattttcactccctctaaacattgcagttggttggagtattttattcattttttatgtttatttttttagaggcaggcaaccatagctcactgcagcctcaaactcctgggcttcagtgatccttctgccccagccttcctagtagctaggactacaggctcaggccaccatgctggctgatttaattttttttttttttttaagagaaggagtctcgctatgttgtacaggttggtcccaaactcctggcctcaagcagttctcccacttctgcctcccaaagcactgggattataggcatgagccaccaccctcagcctcagttggtatattttgtaaaccatgcctgtgtaaccaacatccagcaatgagagtaaaaggtgaagtttagactgttctccagaaacaaacaatcatgaaatgagacttgcaaagcaaagaattacacaagtttttgtgtgctgttcgtgaaagaaggattttcttttattgaagaagattgttctctttgaccaagtttaagaatctatgtaaagaaggtagataaactgaaccaagtaggacaatggaagtcccagttagactgactgtcctcatatccacttatgtaactatagggagaagtctataattaaatttcaaaattttgtggcaagattctaaattctctgggagttgaagagaaagatcagtgggaggtggagtcattgggaaacgtgctttgggagaggatgaggcttctgaaccttgcttgaagggtgagtagaatttggatagagagagaggaaaaatagaggagagtattctaagcatgagacgcagatagagagagaggaagttcttaatggaagacaggaaaagcagaagagaccagaataaaacaaaaggtactgatagaggagaatccagaaccagctgtaatagaaacacagttctgtgagagtactgggaagataaattttatcttgggtgcggacaatctgaagatacttcctgaaataggcttttgaagtgtctagatagatgggtgaagagcattccactggagagacccagtggtctctccagggagtggaagaagcgggaaaatacatggcctgtttggggaataaggtctcttgagagtgttgggttcaagggtgtagtacatataatgggaagtagcattggaaagatgggcagacataaagctagaagtcaagtcagaaaagtgtagggccttgaatgctgtcctaaaaaggtgggacctccttttgcatggaatgtttataagatccgctcttcaggagattatcaggagattagcagtgtaaagattgcactggaggaagacagaacagcaggcagatctgataaaaaaaaaaaaaacttttgtggggttgggggagggggaagggatagcattaggagatatacctaatgtagatgacgagttaatgggtgcagcacaccaacacgacacatgtatacatatgtaacaaccctgcacgttgtgcacatgtaccctagaacttaaagtataataaaaaaaatatataaaaagataaaaaaaaaacttgtggagtaggccagacatgaggtgataaacagatatgacggaagaatctcagatattgcaaggcaagaatccagagggatgggtggttgactgatcctccctttgttttttatggtcaaactgcagtctggagacagaggaaagtgggaaagttgaaaacgagacctgatttggcagaagaaagagttagaaaaaaacagggaaaataatgtggcagtaagttagattggagacacttagactttcctaacttgaatcgtcctcactgactttccttctcccttggccacttctaaattggaccctgatctgctgctgcgagtgtgtctgtcactaacacaaggcacaatacccttaccagtgatgtctctctgagaatgcccttactggggatgtctatctgagaaaatcctacttgcactcaaagacagagttcaagcctcacctcggaaaaaacttttctgacgcctaccatttagtatatatgactgtgatggcatgattgcactaatgttgtatctttgtttttccatctgtttcccccactagacagtaagctcttccagaaagaaggggatttggatcctaattgtctcttatctggagcacccaacacagtgcctggtacatactaagccttaagttaatgcttgattaatataaataaataagtgggtgagtgtggtagacattcaagctgggaatcttctaaagtcattaggaaacatgagactggagctttagtaatcatagtatgaataggtgagttttagcccacagtgttgcacacccatctaagctagagactagtgttgagctgttcacttacctaactagggaggtggcagggtggcagtttctattggtaaaggtaggtatgcaaagtgtgggtgttcaaaagcactgcctgttttggatggaggaaggtgacaacaccccttttctgatcattcttgaactgttcacacataatggtggctaacttgtttattttcatttatagtgaaataatgtatttcttccatgttttgtcccctctttgttgctttcttgttcattttaggacctcaagtatgtgttgcccagtctctgatttaagtaatgagcttctcttttccaattctatttaccatactagtggctgggatgaagcctgtggtgaatatcctgtttttatcttttggctgcctttcaatttaaaaaaaaaaaaaatcaagtttatgatcaaagttggttacccccagatgagtttcccacgtgcattctctttctcctggacctcatggtactgaatgacacagatgaataagtagattattcagtcagctgcattcctaaagtgagtgagtgctttaggagataaaataggcacccccgtcccccttcaaatacctttcagaatttgaataatagtttcaggtagttgtaggtatacctttctcagcaaagatctgtgtttagggtttatgtatagttaaatgagccggtggagtggtttcataattgcagtattgttagtcaaactctgtaattagagatgacttcataggcataagattcttctatgggtgacgccctgaattcatacccaattgtacactatatccttttatgaaaaaacaaacaaacaaggttttgtttgcttttgttttactcccttatttgaaaatctgttttcctgtgtcttatatgtttagtgaagaagggctggcttttttctacagctttcccttttcctttacagaaatggcaggcataggagctaaggaggaaacagaatttgggacagatcaaagtgctttgcagatgagcgaattcagaaaaacgtagagactccaggaggttttatttttgataagtattaaaattgctgagtttaaatggaggaaaaatatatctctatttctttgaatgtcagttctctttctctctccctctctctcatcatgtaaataaagtccgcttttgcttggtggcacacatctgtattctcagctactcaggaggctgaggcaggaggattgtttgagcccagaagattgaggctgcactgagctgagattgcaccactgcctgggtgacagagtgtaaccctgtctcaaaaagaaataaacacataaagtccacttttgtgggaagacagactgggaaagaggacatatttgaaaatcagggtttttttccttttgcctgtcaatcacatattgtgaaatcggggttaaacttttattcagcaagtaatactttctcttcacctttttctagtactcatgaaaaaatttgcaaattaggaggaatgtgacaatattgacaagctgttagctattttgaaaagtgatcctaaaatatttaaagaaaaattgttgtttgtttgtatatctcctgtctgctctttaaattgtgtttagaaactggccttacggaggaaccaaattgagtcatggataaaaagtgactgacaggttttcctttaggcccatccttcttaaattactttgactaaagacttgtaatttttatatatgagggagacctattatactctgtagtcagtaattatagggagatgagataacttttcatttatcccatgtaaaaggctattagtagaactaatgccttatatttatttatacagctcttcacaattaacccaagcattcatttattccctattttctttcatgaaggatttgaagttgctatgtaatacttcatagttcacaatatgctgtcatacataccatctgtaatcttcattaggacctgggggaagtaggtattattatcactattttcaaatgaggaaacttaggctgagacagattaattaaacttgctcatggacacattactagggaatagcagaaccagagcaataatcgatgccttctaatttcacgtccaacatctttctgttaaaacatactacaaccttgggcgcggtacaacagcttggtgtactggtacttgagattaaatgaagtgtctacagggcagtattgatgtcaaatcttgtgttttgctttgtgaacccatccgggatgttttagtaactttaagggaaaaaagtcctatagtacaatgaatgccccatgaagaggaatagagcttctgttattttaatttgtaagatctttattttttaatatcttcactcatttccaagttacttaatgtgatgttttctctcaagatagtactttactgcttgacttccttaaagacaccatcaagtacctatgagtagtcttaaggacagaccattttttaattcatagtggcataaagaaatctacattaaacaactttattttaagcttcaaatggcaaaatgtacaattgtatcagctagagcatatattgtgagctttttaaatttggctttatattttttagtcttggcccaggtacttcagagtagcatttctttatttcctttcaaataactgtcaataaatgaatatgggtttatttaaattggaaagtcctgcattaaactattctgttatcctgaaacaaccttgtctggaaatacggttttaaggatatgtgcatgttccaattccttctttttgttctcattgaagtgtatctctttaatgtctctgatagatgggaaatctgagttacatatgcaaagtcactttaggctttttaaaaggcaattagaaataagaaacttgaaaattttaaaatatatgtttaatgcactggattaatttttggactaaactggtgccctaaaattatttctatgagatctaagcatttcttaattcatttttattttttactttttttattgagacagggtcttgctctgtcacccatcctggagtgcagtgacgttctcatggctcactgcatcctctacctctcgggctcaatcggtcctcccacctcagtttcccaagtatctgagactacaggcatgtgccaccacccacgatgcccagttaattttttgtatttttggtagagacgaggtttcaccatgttgcccaggctggtctcgaactcctgagctcaagcgatctgcccacctccacctcccaaattgctgggattacaggcatgagccagcacttgctaattttataggaagaaaaaaagaactgcgtttctggccactctgagaagaaattaataatccttaaagtctctagagacttttttcttctaaaaaaatggatatttgtaccttttattgcagtcactaattcactttatgtcatattgtaattattcatgtttgcttcgcagattgtaaattccttgagggcaagaactaggtgtatagcagatgtctaaaatattggtaaaattgtttgagaagtagcggggaggggcaggttggggagaaagagatttctacaggatttaatcagaacccaactggtcagcagggataaggggggcggggggcaggaatggtttatgtccagaaccatcttatctaatttcttttttttttctttcttttttcttttcttttctttttttttttttttttttttttttgcagtgatgcactgatggctcactgcagcctcgacctctcaggctcaagtgattctcccacttcaacctccagagtagctgggattacaggcacgcaccaccactcctggataagttttgcatttttggtagagacagggtttcaccacgttggccaggctggtctcgaactcctgggctcaagtgatctgcccgctttggcctcccaaagtgctgggattacaggcatgagccactgcacccagacctaattttcttttgcatagaagtgatatggtagtgtgagagtaagctcagttgtataggtttgttttagttgttttttacccacatactttaaattattactgactcactatctgcccaaactggaaaggacctttagagataaaggagagaggccacatgttttagatttctgagatggtcttacttttaaattttctgtgccattgttctccttggtgtgtgattcatggagatgtgtaataattctttattaaaaacatgattgcttaaaaggggtgaagaaaattggaataaatcctatgtcgtatttttgtaatggggagtgttgaacatattagtgaaacagaatatttttagaattactactattcgtttgcatttaacttacgaattttaaaaaaaaatttttttggaggcgaggtctcactatgtttcccaggcttgtcttgaactcttggcctcaagcaatcctcccgcagtgctgggattgcagttctttttattcttaatctttaaaatgcctaacttcaggcctgggcgtggtggctcatacctgtaataccagcactttgggaggctgaggtgagtggattgcttgaagccaggaattcaagatcagccagggcaaaatggtgaaaccccgtctctacaaaaaatacaaaaattagccaggcatggtgtcccacggctatagtctgagctacttgggaagctgaggagggagaatcacctgggagggaggagcctgggaagtcaaggtcgcagtaagccgtgatctcaccactgcactccagtctgggctacagtgtaagaccctgtctcaataaacaaacaacaacaacaacaacaaaaaaaaaacccacaaagcctaacttcattactaactgaagaactttctttccctcatagatcctgagattactctgaaaggtattttcatccaacctgtctactgagaagttatccatctttagtggcatcttgatatcatacataagaaaagtttatgaataggccagctttgttttatatcttttttaaagagtctagtgttatttaatttttttttttttttttgagacagagtctcactctatcacccaggctggagtgcagtggtacgatctccgctcactgcaacctctacctcccaggttcaagcgattctcctgcctcactcaacctcccgagtagccgggattacaggcacccgccatcacacttggttactttttgtatttttagtagagacagggtttcaccatgttggtgagactggcctcgaactcctgacctcaagcagtccacccgcctccacctcccaaagtgctgggattacaggcgtgagccagtgcgcctagctgatggttttatttaatttttaaaacaccagtcactgtatgtgtctgttacattatggtaaaaacttagctaatagcatcatatggtcattttaaaacttctccaggatttgagaaacctgagtgtgaattccagtcctgagagcccaggtcttctaataggaaaaaaaggagattagaatatttagctcataggactactgtgagggtttaggaaattaatatgcaaatgaatttatataatgtattaataatacttggtgcatagttgttgaagggattaattttattaaagttctgttttattgagtgccttactatgtgccaggggctgtgataaattctagaaatagcaacaattctgtgaaaaagatagatgtagcccagctctcttatgaatccctccctaccacttccagcccctacctctctatactgagtgttacacttcttggccaaaacataagttggtgagtaatttgttgccttttaataaaatgtctaaaagggataaatgtaagatctcaaaatgtattttgtatagtttgtgaaatttaacccgtagtatatttttttggaaaggcaacatctttagggcagtggaactactctatgtaatatgttaatggtggatacatgtcattatacatttgtccaaacccacagattatacaacactaagagtgaaccctaatgttcaccagagtcttagggtggtaatgatgtaagttcatcagttgtaacaaacgtaccactcaggtacaggatattttggtcaatgactgatcgaatgtatgatagtagtcgcataagattataatactatattcttactgtaccttttctatgtttagatatacggataccattgcattacaattgcctacagtgtttactacagtaacctgctgtgccatttgtagcctaagaggaataggccataccgtatagtctaggtgtgtagtaagctataccatctaggtttgtgtacgtgcactctttgatgcttgcacaatggcaaaatcacttgacaatgcatttctcagaacacatctctgtctttaagcaacacttggctgtatttgggaactctctgtaacttctgcttgattttgctgtgaacctaaaactactctaataataatgtctattggccgggtacggtggctcacacctgtaatcccagcattttgggagaccgaggcgggaggatcccttgatcccaggagttagacaccagcttgggcaaggtggcaagactctgtctttacaaaaaaagagaaagaaataaagaaaaataaagtctaccaaaaaaataaatcagaagagagaaaaaacccaaaacaaaaaaggagaaaggaacatgtaatcattttcatttttctttgtccaaaattattgttataataggtttgcatttggaaattatctactgtgatacagacctcctctctttattgccaggatcagcaaagtttttccatataggttcagatcataaatattgtgtgccaagaggtaaaatcaagaatattatgatattaatatcaaggatataatatattatttctatcagtttttattgacaaaattcaaaatataataattgagtacaattttttggtaatacaattctgataagaatagaattctttttttctgggataacatttcacttaattgggttcaaagttaatgtgcccccatcatcaaaatggactgcaaaaattttcctttaataaccatatccagcttgaggtcatacaaaaacaactggtgatccagttttggcccacaggccatatgtagtttgccaacctttgttctgttagttaaatagatcaataaggccaaattggaaagggtgtatactcagataatataataatttacatgcataagaatgtgtatattagcacacatgtgcatttttatatcaaaaccagctataatttgttttgtttcctctttattcttcctttaatgagagtgattgatagatgtcagtatgctatttgaaaatcaatgtcttcacagtgaatgattctaaagtggcttaatgggaaaatgatactttccgtgaatcattggtcacataatattgacctttagctttggctcatataaccaagaatttctattatgtagctttttcctgtcactgctgggtactttggcccttccttaaactttttgaatgtaatttaagattttgtccttagaaggaaaattcagaaatattttttctcaataaattttggtaagtgatgacttctcatttgttttctttattaaagctgtatgtagagacatggtaacctattcagattgttttgatagtttgaaattctgtttaaattatccctaagatgagaacttagcaagagtgcttatatttatcacaattttttaaagtctgaaacgtttttggtttttctttagatctttaaatggatgagatggctaccactcagatttccaaagatgagcttgatgaactcaaagaggcctttgcaaaagttggtgagtattttttgtagtaaaactatagggaagcaatatttatttggtctcaaagttatttctctataaatatcacatgaatggttaatcaaaaacattagggcaagatagttaaaatagatgggataaagttttggaagctatacttaaaattgttttatttcttttttttttttttggtcgagtggtagctgatattatttccaattttatgtagtatttaatatggtcaaattttttagaccacagttccaatccttaactggtgactgttatgtatggttcctgaaattttcatgccaaattttagttattattatattttgtatctcatatctttctgaagaggtttgaaactttcaccatattctcaaagggatatgtgaccctcgaaaacattagatgatgttttacccttccttaattagtttggcgttattgacttttttatgggttttctgtgcctttggttactgcagatcgttctacctcgccacgttaaattatagcttcagtataagatgagaaggcatagcatgctatttgatttatcctttatcatcatataacatgccttacaattgagcagctatggaaggtaaatatggagtatttacattccaaattttagtgcttgggtcaagtctatagacaataatgagaaaacagggtgagaacagcctacttatgtaaatacatgaatcaacatgtgcttagagaggtagattattattatttggtatctccttgactgaagggtacagaattagctcatatgatgatttgttatgtaaatcagaatttgccgttagacctgtgtcgaaaatcccattagtggaaaatgaggaaatatacatttctgttcccatatatttatgatcaacattttctatgaaggcattcagtagtagcagtgtaccttgggaagaataatgaccccagccagagtgaccattcataatcccatcaaaattttaactagaaaaaactgaatattcctgaatctaacatgatcgcgcgcacgcgcgtgtgtgtgtgtgtataaaaatagcagttaattaccttgccatggataccacttactgtaagaaaaatgctacatagtttaatatataacagcaagtgaattcttggctgcaagagtttttttttttcaaaatgactctcattcagtcaaaatagtcttataattgttttaggagtgcatttttgaaccttttttaaaatttatattcatctttcagcattagcagcagcttaatttgttatttatgaatagaatttcagagtaggcaccatgccttattaagtactcatctcctcaagtaaatgctgaatacaggtcttgtcctcatgtgcagcatcttggaaataattacgtgcaatattccttaaaaattaaagttaattcagatattgtttacctgatgagacttggaatacatttgacgagtaaaagaacttcattgtcccttaaaagcttaatgacataaagaggattgaccaattatcttcatagaggaaggagttaaattgtattaagtaagggatcaatgagaagtttgactgcaagaaaaggtcattgtggagctattgtttaagtagagtttaagataggcgtacagtttgccaaagcccctgccaggcatatgttcctaacatactcaggctcttattactatatatgctgtaaagaattctggaatccagaatttctgcctattgtgaatattattcttttgtagtctccactcagtatctagcatagtgttgcacacatgttaggttctcagtaaatatttcattgattgaaacccaaggaactatatacatagccttttgatgtactgggatttttgtcattatcaaccatacattcagagggcctttgttgtgaagattttcattacagtggaatttattattaaaggtttttgccattaaattgtagcatataaaatttatatatatttttcagcataataaaagcttgtgtgtacactccatcttttagaaactcatttaaggacccagccgagtctttcgattttctttaaaaaatctttgtagttttaagttgttgttacttacagaaccctcaggcaaccgtcaaaggtgttatagaattttttttctaattcagggacactttattttaaaaacaagctctataacttattatcctgtgaaggacagtttttcctttttgtgggggtgggttggcagagaataggaaagactactttgtctcagttcaattgcgacaaaatatggaaatcattagatgattttccccatctattaacaataatagccttgattatctccttagaaattcagcaaaatcatagcgtgtggagaaaatctctgtaattactgctaatcataggttttgttcaatcaattaatagtgctttgaaactctctttactagcaataaattgagtattagaatttaaagttctcttttcactcactttctgcacctgcttagttttaagctccaagctcatgtaattattttaattttctcaacaattgtttccagtgcttcccagtagcagaaacgttagttatcagtttttgtacttcatgatgtttcaaatttaatttaaatgctgtaatacataactatttctaaagaagaataaataaaacctttcaaaacacttaggtattaatattttaccatctagaaactgtcttttacattctaagcctttaatcttgctatggaaactagtggtcatttggatgattacttgtcataaagaaaaattcatgtaatgtaaacctttgcagagttgctttagtactgcaaacacttaccttgccttgccttttttccctcctgagcactcactactgaggttttttaaacatgaattcagcacttttgaaataaaagaataatgggtttcttaaatgactaggaatagtatgggtgtattcctttgaggtttcccaccaaactaagcaaaaaaaaattggttgtggtgattgtagctataccagacttctctcatcctaggaagttgagttgtttcaaattacttgatattcgctagtatataaaaaccacatcaggatgatgccacaaaaaaaaacagtgctttagtttaatttactttcagtattcaataaaagaacaccagtgcatatttgtttaattatgccttaaaacaaaaacaaaactatagcccgtctaaaaaaaatgaaactaatcagtgctctttcattgtgccatctggttaattatatatggattattagaagtggaggtctcgggatagtcggaaaaccatgtttcaaaggtgtggaagctagttaggagtacacatgtgtgggtgcatgggtaaaagcaatttttatttttatttttatttttattttgagactcctgggctcaagtgatcctcccacctcggcctcctaaaatgctgggattacaggcttgagccatggtacctggccagccaggtatattttgcttcatgcactagatgcgttcctgaaaatcagcaagccaactgtaaatggattttatgtagtgggatatattttaaatgtaaagagaaaatcttatttttttaagtgaagcctgctttgaatttttttatttttttatttttatttttaattattttttgtttatttattttttttgagacggagtctcgctctgtcacccaggctggagtgcagtggcgcgatctcggccactgcaagctccgcctcccgggttcacgccattctcctgcctcagccaggtggcagactacaggcgcctgccaccacgcccggctaatttttttttttgtatttttagtggagacggagtttcaccgtgttagccaggatggtctcgatctcctgacctcgtgatccgcccgtctcggcctcccaaagtgctgggattacagacgtgagccaccgcgcctggcttacacacatgtatttttaaaacgagagttgcagcaggggaaaaatgatggccaaactgctggaaattttgagtcagaaaaggactgataaacatttttgattgcctggtctcaccctctaaacttgtccagccttctgctgtacttgacctccatctttggaaatccactagtacagtgaattctaaagcagcaacctccagtctacccttagctggaactcattaaactgcctcttatatttgctgcagtgagctacctcaaaaggtataagctgtgagaagcaaaccccatgtttagctaagcatctggagatgtttagcagctgccttttctaaggatttaatgcctaatgaaagcttgatttcactgcttagatcttgggatggaatatagtttaaattcttctgcccaagtcttttgaccgagtcttttaagtcagtattttgtgagctttcatgggcattcaggattgtgtatgtgtgtaaacccattattgttagataaatagattccttttgtcatttctttagtgcagaaaatttgtagaatatgttggtcaaaccaaattgaacttttaaatccagcttttccaaaaggatatgcatctgcacttgctaggctttcttctttaagtcctaatgagcactgtcctgagtgggctaatagagaggtcgcatgtgtattccagatgagggcacacaatatgtgacctcttcataaagaaagacaccagatttagacagattcaaggatgtttaaagcaacacacacacacacacacgcatacacacacaacccgagcgtcaaagaaaatcctagtctttcttactgtcaaatttatgagacaaagtagcaccccaaaagacgcttttgaagtgatagattgcagcacgtaccacctggacatgggcagtgtaaaacagcagctaaaatcaaaaccacttggattctggcttagctttctccagacaagtacttaaaatagcttaaataacaggatgcaaggggagggaaaacatttccttttaaggatatgcattcttggtgtgattcaaacttctgcaggaacatggctgtgtaataagtttatttactttaaggtttacttaggggagggcggcgggggagttaaatagtatttaaaataatacttggtaaaagagaataatgagatttcctttaaaacaaaatgcagatgtgaacctacacgtgtcatcagagagagagagagagagagagagagagagagagagagagagaaaggaaacagtccttttaacagttgattcttttcttatgaattcagtcagtggccaatatgaaaaatgggcctgtctggtgcagcactgggagctgcgtagtgatttttttttaagtatcataattttcttcttttaaaaaaaaacgctttgtcaatttactcaaatttagccctttactttctgccagaattgtgttcagtgataaggtagagtttcctttatccagcttctccttaatgtccagccatactgaccatattttctaaaccaaaaggttgagaagtgctggcattgaaactgcactgcacaatataggcagtatggtaatttatgtctgctttatcagctggttggaaactatgatgctgaaacagaagagtcttcaaaacacagagcttttcccactccataccaatgtatagttaatgagaaaatggcaagtgagccaaaaaggtgttgcagagtattggcagcatgaatgagaaaataaaggactgccatcattcctggtggttgtgattttagtttccagttgttaaaacgacttccaatctaggtatgttattttgggtcagtttattattaagttctcatgtttatgtcaaaactcagaataggagaaattcaccatcaaacatactgaacagcaacattctaattccaatgctctgtttttaaagtggacactgtaaccacaaataaggacatagtcttatgatttcaaaaaattaaattgtctttttgaaaaaccttgccacattattcttattctcattttgcttttgaataacaaaaaattatccaaaattcattttgggttatttggaaatcattcaggtacctcagctattttattttacacataaggaaaacatgactcaaagactatcatttagccagtttgtaaaacgaaactacttttctccgatgtagaaaattagattgaatagtcatcagcatttatgtttattttttaaaattacaagttagtcttagaagtagactaaaagttgtgagcacctgatgagatggaagctttctaaaatcccattatgctacctttttactggccttccaaaccacgttagatctttgatattgtttaaggatgtgtttttggttttttgactgagggttcgaaataaaattagcataaaactctttaagaataattgcatgctattttgtctctcaagtactttaccagctgggaggttttgtaaaattaattgctagctgcatttttaggctccctctgccttcttgtttaaattgaaattattttcttcaaaatatatgatttaagagctctaagaaaggcttgataaaattgactctaactaacactaaaatgcctttgatcatgggaggtagtgtaatttggactaacactgggggctaaactatgggaaaatggcagaataggtaaaacttttagaagacgacgcacattcttgtcatccaggaaagcctaaggatatgtattcgaagtgactcaaaatttttacaaggattttgtagccacagtttcaagtaagacccaggggttccgtttgattcatttctgtatctttggtatgtagcccagtgggtgtcttcccacagggtaggtactcagtttgctctggagggtgactcatacctaaacaagtgcacatctcctttctcagtaaagccaaagcaggtttctacatttggaacaaaagagatcctgaccagagagctatcactggtggtccacttgggccctccttgatgggtgtgttcacttagaaaaccaaattacagatctgaaggctgctgggtagggacaggattagaacaaagggaatgagattgaatgttatttaagggatatttctgtcaagttttggtttctcgatgaattgccattcagtctttgagtgctatttctgtatttctgtcattgttgtttagttttgtttctaaaatgctcatctaggattagagcattctttctttggtcaattcctgagaatcagtgattctacaaaaataatttttttccattgcttattatacacaaaagattgtgctacatattggggtgggagatacaaagatttaaaagaatctttatcgggagatttgcagcctaataaggaagtttgtcatgtaatgacaaattcttattcctccaatttcctttaaaattttcctgtccctttctaaaagcatttcttactactgcccttacttcaaaatgaaatttccaaatgtggttattttatgttaattatgttttagggtggctacttcctggcatcttttaatcacatcagtgaactgtcttctaattaatgttcaagagaggttatttcagggaggatacaggcaaatagtaatttctccctgcgacccaaacttctggagttttttgtttttgcttttgagacagtgtctcactctggtgcccaggctagagtgccatgatgccatcatagctcactgcagcctcgaaatcctgggctcaactgatcctcctgcctcggcctcccaaagcgctgggattacaggcatgagccaccagtcccagccaccagacctgtagtctaacctaatacaaataggcagccagataaactttctgggccttagtcagtttcatatagctttgaatccactgtagttctcccacatctaatttaaaacatctctaccttccacttccattataacactgagaatacaaaaagaacaaatcctgttacatacctgttatatactccagtctaaactagagtcaaagcacagtggctcatacctgtaatcccaacactttgggaggccaaggtggaaggatcatttgaggccaggagtttgagattagcctggtcaatatagtgagaccctgtctctacaaaaaatacaagaaacaaaaagttagctgggcatagtggtgagagcctgtagtctcagctactcaggaggctaaggtgggaggattgcttaagcccaggatttcaaggctgcagtgagctatgattgtgccactgtactccagcctgggcaacagaatgagaccctgtctctaaagatacttttttaaattaaaaaattggctgagcttggtgacttatgcctataatcctaccactttgggaggccaaggtgggaggatcacttgaggccaggagttcaagaccagcctggccaacatgacgaaaccccatctctactaaaaatacagaagttggccaggcatggtggcactgtaatcccagctactcaggaggctgaggcaggagaatcgcttgaacccaggaggcggaggttgtagtgagccaagatcatgccactgcactccagcctgggtgacagagtgagacttagtctcaaaataaagaaaatagcttaaaagaaaaaaagaacccactgaagtggacaacgttttgatagttaaaagaataagctatctcttcctccaaagatatcataaaaatgaaagaatattatacttaggtaataaggtgcagtagtgatcagaatgttatcactctgtatctgtatttaatatgcgttactattctatctccaggttttaaaagtgtttgtgtgaggggagggttgtgaagtcttgtgtattctgatttagaatcagtgtgatagaaccaaaaaggaactttagagattatgtggtccaaagcactccttttacagatgagaaaactaggacctgaagaggtaacttgtgcaaattaatagccaagttgagataagacattgtttcacattattcccactgtgtgtctcttcaagcatgtatgctgtgtttctttcactatgccacacttactctctagtactgaactccactgtaattttagaaaggatgtaggaaaaacaagttggtatatgcatgggagcaggtgtatttaagcccaagacattcataaaacaagagccactaaaattttgcctcagtgccatggggattactttgttctttttagcaactgcagacattattgatggattgatttctacatagaaatactttacatgtagaaataaagagtttgatgtatgaccttttataaatccaaagcaaagaaagtgaatatacatcctagggaaattaagtgctttacctcaaaggaaatctaagtgattttcacactaagtattgaatggtttgttattgatgttttaaaagtacagatattttaattagccaggcatgatggtgcccacctttggccccagccatgccggggagctgaggcaggaggattgcttgagcccaggaggttgatgctgcagtgagccatgctcgtgccactccagcttgggcaagagagaccctgtctcaaagaaatacaaaagtaaaaataaaggtacagatgttttaattcatagatttaaaatgtagtaatcaatgtttaagaaaatttaatacttaaaatagactgcattaaaactaaacagaatttcatcagcattcaaaatatttgcaagatggttccatgcagtatacttaatattttaatttaatttaatttttaatcccccagagcattcttgcaaattgcaattttagtaattgaccaaaaattggacaatgtgaactacacgtagatcacacttagaaagaaatgtcagtgtattccatggaatacattggcctagcagagcttataagatcagctagctccctgaccttatctctcattttcccccttgttcactctacccaagtcatattggatctttacttttcccgaaacacaccagacacactgcagcatcactgactttgcatttgctattttctctacccgaaatctcttgccccagatagccacatgatttgcttcccttacctcatggaagtcttcattcaaatataacctcatcaaagtggccttccttacccattctgtctaagtagtagcaccaccaccatccctgccccccaatatctctataacccagggttactcaacttcagcacaattgacattttaagctgcataactcttgtgttgtacatacaaggaaggggtcatatccattgtaagatatttagaagcatccccagcctctacgcactgtatgccaggtgcttccagttatggcaatcaaaaatgtcccctgggggcaagatagccccagtctaaccccttatgcttttttcttttttttttcttttcttttttttttttttttttttttttgagatggagtcttgctctgtcacccaggctgcagtgcattggtgcaatcttggcccaggttcaagtgattctcctgcctcagcctcccgagtaggtgggactataggcgcccaccaccatacccagctaatttttgtatttttagtgaagacggggttttgccatatgggccaggctgatctcgaactcctgacctcaagtgatccgcctgcctcggcctcccaaagtgctgggattacaggcgtgagtcactgtgcccagcctgctttatttttttattttttattttatatatttttttgagacggagtctcactctgttgcccaggctggagtgcactggtactatcttggctcactgcaacctccgcctcccaggttcaagcgattctgctgcctcagcctcccgagtagctgagattacgggtgcccgccaccacgcccagctaattttttgtatttttagtagaaacggggtttcaccatgttggccaggctggtctcgaactcctggcctcaggtgatccacccgcctcagcctcccaaagtgctgggattacaggcgtgagccaccgtgcccggccacaatacattttcttaaatgcgctaaggtcatcttgagtcatttctctgttcaggttgtttccttctattataattaagtttacatatgaaaatcagtgagacctaaggaacagaagatatttgaaattacttgtgaacatcaaactttattcacaggaaaatatatactcaagtggttacaaccctcaggacattagcctttttctcaataaattaacttttggtcattgatcaggttttttttttctatttttaaaagcttcagaataaacatcattcatttaatcagcacttcaagacatactctgagaaacttcagtagtacaaaaattaaaaggttatttatagagtcatattaaatatctgctttcctcagtagtgcatttatttttataaactctatatttgtcttgaattaatgtttgtttacattaactcttaaaataattggcactgaacatgactgcttaatttcaggtgtactttgaaacagaatcagcattaagttcatataagttctttttggagcaatggaagaataagaaacacaaaattcctatacttacagtagaaattgttctataccatggaagtgttttgtaggtttacgatctattagttctttttttaaaatcctattagcgccaagttaataataattgtattagccaactatgcttccttgaacttagggatgctctttttaagtaaatctacttacacattgcttaaatcacaggatacatgatgtaaaaccttgctttttccatttaaatgtccatttccctttcaaacaactttatgttccccacaataagaaaatattttatgtaagtgagcttatgaactgaacctcaaatgaagggaaatactctaacttctgtctttcaattttttttccttttttgcttgctctccttttttacaaagatctcaacagcaacggattcatttgtgactatgaacttcatgagctcttcaaggaagctaatatgccattaccaggatataaagtgagagaaattattcagaaactcatgctggatggtgacaggaataaagatgggaaaataagttttgacgaatttgtttatgtaagtatgtgaaaattcacaattattagaagtagtagatgttccctcgtctagtgggatgttatagtattaagtactgttatgttaagttcttaaatatatcatattagtactgttataacatttctgtcatcctgcccactaaatgtacttcttttagctgctggaatatcttaacaaacgaattgagaaaaagagcactgcagaaacaaagatataacatgataagatgttaaggtgataagttatataaggcgaacagtctcctttcatgtcatcattaaagggcagttatcaaggtgctaagtgacatctttgaagtgttctctctcccgtggtgaacagtgtgctccaaaattttaataatacaccctgactcacagtctcggaagcttcctgagctgaactttctcattaaaaagttgttttccactcttgtggtaggggtatttaactgaaccattctctctaggatgataattttgataattaaaagtttgaagcatatcttttcagtccattggaagaggcatttaacatttttgttttcttctctagtttcatcaaatattcttcaaggttaggggctgagtttttaattctttcacccccccaccccactcccagaacttagtttggtgttctctactcagtgcctggaaaatgtatacatggcacatggttcttcaatgcctaccactattggctgctagcaagtgaggtctagattttttagacttatgccattttcagtctgtatttattgacagtgtatttgagatacgtgttaaaaatagctggctgggtgtggtggctcacacctgtaactccggcactttggtaggctgaggcaggagggtctcttgaggccaggcattcaagaccaacttgggcaagttagggagaacttgtcagcttgggcagcttagggagaccccatctgtacaaaagaaaatttttaattagcccagcctggtagctcgagcctatagtcctagctactcaggaggctgaggcaggaggattgctcaagcccagtagtttgaggctgcagtgagctgtgataacaccactgccctccagtctgggtgacagagcaagaccctgtctctaaattaataaattaattaattttaaaaataaaagaatagttgttgcttcttccctcaattaaggatacctttaagattttattggtgtatttattattaatttaaggctgagtttgactagatcttactagggattcctttcagtatatcacaaactagttatcagtgcctaatatttatcacaaatgtcccagcgctcctatcctcctttgtcatggtttatttttccccaagacaactgaaacgatagcatgtacttccatcagtaactgtggctcaccatagcaagtgaaattttgaaatgttctttccaattagaattaacacctttagaacactgtagtagtccaagaagcaaattgactaagtaatgatgcctactcagctgacagcattttgtgattgtttttaaaatgcacacttgtcggccgggcacggtggctcacgcctgtaatcccagcactttgggaggccaaggcgggtggatcacgagctcagaagatcgagggccatactggccaacatggtgaaacccggtctctactaaaaatacaaaaactatctgggcgtggtggtgcgtgcctgtaatcccagctactcgggaggctggggcaagagaatcgcctgaaccagggagtcggaggttgcagtgagccaagattgtgccactgcactccagcctggtgacagagtgagactccgtctcaaaaaaaaaaaaaaaaaaaaaaaaaagcagacttgtgtcataattataatgatatcgttcctgccgttttcttttgaaatactgatttcctcccaccatttttttgtctccagttatggccaaagccttttgttttgaattctatgttcaatagtaagttgcagtttatttgcaatttgagcacttgcatgttttctgatgtatcacttgctccccttttaactgcatggttaattgtgaatttaaagtagcgcagagcagcagttaactatgattggctgtttttgataaaatgtattgctcagaattttttaatctattagaaagaacagaccaaaatcaataggatttgcagtgtgtcattatattaaggacaaaattgtaaaagtgtctttgaaaatgatcttggggaaattgttaattttgtagattttgaaatgtagtttttacacagctatttgtggcttttaagggaggaggtgtgattaccttagtatattctttaaaagtaaagaacatgcacaataattttggcaacaccagggctttaagaaaacaacattcgtgaggacattttaggttagaatatacattttagaattggaaggaatcattatgtttacactcctacacttttcaaatgaaaagaaacaaacttggatttctgaaaaaggaagtgacttttcctttttgcctaacattacacagaggactagtggctttttccagtacctccctgctattcaagaaatttgaaatatcaaggacagtaaagtaacctacctgaagttttcagatgctactactactatgactgtattaaccaaatgtctgtccgcacccatctgccttgtcatcagtgaaacatcttacaaattgtcaaacaaaatatgggtagagcttagttatccaagaaatagaaatcatgttattcctgttagatattggcataaggaaatagatacaaacatgttcttgcttgttaggtttctgctttttctttgaattgttgcttaaggggtgttaattgcaaaccagactacaaacaaaaacagtttatgttaatttcagagaaatgtctgtgtgtgtgtgcgcgtgtgtgtgtgtgtatggcaaaaaacagtcccaaaattatatgtatgtaaactttaaaggtgaaaattaaatttaataccctgctttttaaaattctaagcacttcaaaactaaaaatactggatttttatgcttacaagataatgggactttttttctttgattgttaaactagtatggcactttcagcagagaagtaagctgcccagaacagtcttggacatatagtaaatactatataggtgttagttgctggggtagttctttctttaaaaaaaaaaaaaagaagttatgtttttcaaatattactaagtttaggcctacaagacattccaaaataatggaaaaattcaatcctgcctctttggaaacattttggaaataagccccaaacactggaagccagtcaattctttttttgcaattctttctgaaatctttctttcttaagtcatatgcctctggattgttttggtttggccactcgtcctgtgttgagctaactctggggtcaaaagaagttagccggttgctgagagtctttgagagaaagaaggcgaaacttaataaaaggaataaaaaacatatatattccataacggagactgaaaaagatgtatagatcaagagtggttatggcttcctgaaaaaagtacagcaggagttagctcacagatgataaagcaagtctttccttgtggagagaaaacagcacaaaacagtgagctcattagtatcacaacgggcagctttgaaaagattcattgagaagactccagcacagtagtcagccttgtgctatctctgatttcagagatttcttgtcaagccaaagcttgtactcaaatagttttatcatccacttaagcgatttctttactaaagtagaaagtaaaatgcaaattcttgtgtagtgaatcaatatcatagacacaaatcttcagttctttcttatcatttttactttttttttttttttgagacggagtttcactcttgttgcctaggctagagtgcagtggcgtgatctcggctcactgcaacctctgcctcctgggttcaagggattctcctgcctcagtctccagagtagctgggattacaggcatgcgccaccacgaccggctaattttgtgtttttagtagagacagagtttctccatgttggtcaggctggtctcgaactcccgacctcaaaccatccgcccaccttggcctcccaaagtgctgggattacaggtgtgagccaccatacctggcccatttttacttttttaaaaccaagggaatagaggaaaatactatgaaactaaaagtttaagcttagctggaataatttatttgaaacaatttagaaaatgaaggtcatgtaacttttgcaagacctttgaaaattaacaaacttaattacaactttgcatttcattgccaagcataagaaggagttttactaaagctatgtaaataattgcattaggatatatagcagagacattctatatatatgtatatatatgtttaatttattttcctttttttttttctgagacaggatcttgctctgttgcccaggctgaagtgcagtggcccatcttggctcactgcaacctccatctcccgggttcaagtgattctcatgcctcagcctcccaagtagctggggttacaggcatgcaccaccacgcccacctaatttttgtatttttagtagagactgggtttcatcaagttggccaggctggtcttgaactcctcctgacctcaagtgatccacccactttggcctcccaaagtgctgggattacagatgtgagccaccgtgcccagcctacttttctagttctagttattagttcgaattcccagacgttctcttttttaaatatgaattaatccttttttctgtgacataaacaaatttggatttattttttagctgaaatcatgatcattgaaacaacctaagttttagaagtaaatgattcttgaagcagaagcactcgtaataagaaaaataactttacatatctcattctgaagctgtaacacttttgtcattgcagggacttgtggtatgttaggcatgaagaaatgcacacctttcagattttaacttattagacaatgaagtagagttcagaaagaagtagactagtgactattgtcttttcacagagcagctgcgttgttatcaaaaggagagctataggatcaaaatgcatcacagttaaggcacagttggactaaaaaatcagattgtaaataaaaatattttaatcatttgaaaactgcctgaagtgtgtgcgtaagctccatactgttgatacttagtgaaagtcagtataatggccatagagcaggaagggtgatttcattggttgtgtttagtatttagagtagtgtgtatgtgtgtgtctgcatacatatacaaacatagacacacacagacatttattctaaaattccacctccaaaattactggtaaagctagcacagaatcacaggtatggaaatactgagtaagcttgattttgtaaaatttaagtgcttactaactattctctcaaacaaaattttatttgtaagtccaaagaaagttaggatttaatttaagaaaggtaacaggaaaaaatgactaagtaatagggccactgacaacacatacagcaacttttctaccagttactaaaagtcactttctctagatggattaattacaaaaaggtaccctcctggaaagacaaaatacaacaaggcactcctttcggtctgacacagtcctgtgcgagacacaaggcttggttagtatagcttgggctggatttctgcttctgctcgtgcctgctctgacacatacaacctgaactgttatgtatattgtaaccctgttctatgaaccgcagacataggctgcatcttcctgagatgtgtgtgtgaatacatatctgtcacgaatgttaaaggtctttgaattgcatttgttcagcaacttttccattaagtcttaagttttctttcaatgaatccacttaaatggaattctaaacgccatttaaagaaagttgtatacggtttctacatcttgctcctgttttactggctttgactaatttagccacgcacattggtggatcaggaacacatttggaattaggtacattccaatacctcagaaaaatatagacagatagaatgtccaatcagatagctacacagtactaggatgtgaaacttactgtgttataacttgcttttgtacaattagaatgttccttactgtgaagagaagctggacttcataaatgccccaataagacaatcactgaaaagcctctttttggtgtttattcttgatagtcatctattactaccagcttaacacattttttaactgcattattctgtaacttttgatttaatgaattcttaatgagctaccccattatactgtaaaatagttttttggttaaatcataaaattttatctttctttgcattaagaatttttattaaagtagggggattcttcaatgttttctctccaggaaaagaataaagccttccttgtttgtagaaaattaacagatttacctgtgcctttgaaccacattagtttttggcttaaagtgagttcaatgcatgtagcgcttaatgtttttgacaagtgtgtgcaattgacattctggtgcttcattttcagaaggggtattgtagtacttgtttagcatttcaaaaactcaagcccagttttttgtatcttttaacatcagctatggaaaaaatgtaagtgatcaagatataaaagaatataaatatgcttattgtgcatagtttgaaattaattgtgaatcaacaaaattactttaattaatagatttttcaagaggtaaaaagtagtgatattgccaagaccttccgcaaagcaatcaacaggaaagaaggtatttgtgctctgggtggaacttcagagttgtccagcgaaggaacacagcattcttactcaggtaatcattttatatgcaataggttaacacaatgtgctaagtgggatggttgctgtaatgtcaaggacgggctctagaaaaacattaccttctaattaagaatacagtagaagtcctttgtgacatgtatttaggcttgagactaatacttgtcataaaggcattataagtgtttattgtatggctttgttagcttgcaagagacaggatacaatccatgtaatgacaggctttattacagtgcattatacagtaatataaatataatttttaaggaattttgtaacttttctgaggactggttaacgtgttctattctttttcttaattttgtaattcctaataaccactgtgttgcatccaagtgtctgggtttccacacagaataaccacatgtttctgacacattaactttcagcactactgcacaactattttaggctttggagtcaaatatttaataagttagagtatgaactaatgtcttgttatttaacataattttagaggaagaaaaatatgcttttgttaactggataaacaaagctttggaaaatgatcctgattgtagacatgttataccaatgaaccctaacaccgatgacctgttcaaagctgttggtgatggaattgtgctttggtaagatgttagcttgttttatatccagatatccaaaaatagccttccatataattgatatatttgtttctgcatgcttgacaggttcacctcaagaaataactagaatggaaaattatccaggttctgcctttttcatttaatctctaggtctgtccatgaatctaaaattcagccataaatcgacaacctctttatagggaagctctcagcctccattttcttctcaacaccaggccagcagaacattacaactttgttgaacttaagtatgtcagtgtctctttattctaaagtaccacagcttccaaaagaaaaaaagaggctactcttcagttctcactctccaatgacctatttctaaaaaatgcttttgtcactgctgctgccccacagccaacagcatcttggcagacataacacaacattatcaacactgccagtcgatgttccaatttatagaggcagtgtcacacagtggttaatagcatgctccataatcagtctgcctgacttctttctattcagtcctgccactctgaagcggtacaactgtgatcataatactcaacccctttgcatttcagtttccatctgttatgatctccacattattatacttatctcacagggcttttgtgagcattaagtaaattactacatacaaagtgcttagggtagtgcaactgacatatttcagataactatatatatataaaatatatacatatatatgtatatatatacatatataaaatatatgtgtgtatatatatttacacatatatattttatacacatatatacaaaatatatatgtatatatacaaaatatatatgtataatatatataatacatgtatatatgtatatatatgtataatatatgtatattatacatgtatatatgtatatatatgtataatatatgtatattatacatgtatatatgtatatatacaaaatatatatgtataatatatataaaatatatattatacatatatgttatataatatatgtatatatacgtatataaagtatatattatacatatatgttatatataatataacattatatatatatatatatgttgtgtgtgtgagatggagtttcgctcttgttgcccaggctggagtgcaatggcgcaattttggctcaccgcaacctccgcctctgggttcaagccattctcctgcctcagcctcctgagtagctgggactacaggcatgcaccaccacacccggctaaatttttttattattatttctttacttttagtagagatggggtttctccatgttggtcaggctggtctcgaactccagacctcaggtgatctgcccgcctcggcctcccaaagtgctggggttacagatgtgagccaccgcgcccggctgacagtatatattatagtatacacaattcttctttttgcagtagggtcattttggttgtttgaaaagctgatattaaaaatgtaagataggctggtcatggtggctcacgcccagccctttgggaggcagaggcagcaagatcgctgaagaccaggagttaggtccagtctgggcaacaaaacgagaccctgtctctacaaaaaaattaaaaattaacccaacatggggttgcacccctttagtcccagctacttgagaggctgaggcaggaggatcacttgagcccaggagtacaaggcggcagtgagccaggatttgcaccactgaactccagcctgggtgaccctgtctgtctaagaaataagaatatatatatatacatttcctttgtgttctgtttacaagcagtgaagaaataatttcccatgtgtgtgttttgtttttgtttttgagatggagccttgctctgtcgcccaggctggagtgtagtggcgtgacctctgctcactgcatcctccacctcccagtttcaagcaattcttatgcctcagcctcccgagtagctgggactacaggtgctcaccaccgcacccagctaatttttgtatttttagtagagacagggtttcaccatgttggctaggctggtctcgaactcctgacctcaagtgatcctcctgcctcagcctaccaaagcgctgggattacaggcatgagccaccgtgcccggcctcccttgcattttaatatagagagaagactgcaagtttccctctctggggactcaccctgcagaactcaaaaaatctataaattgtaaaaataataagagataatcatattgaactaactaagatttgaattttgcatggaaagaagcatggctttctttctgtagaaaaaaatttattagggcagtattatgaacatctaatatgttagagccaggcatagtggctcgcacctgtaatcccaggtacttggaggctgaggttggaggatcccttgagcccaggagttcgaggctgcagtgattcgagctacgatttgggcctctgtactgcagcccaggcgagagttagaccctgtctctaaaaaataacaaaataaaaaataaaatgttaaagtctaaatctagattttaccaaatgagatttttcctaatgagtcacagactatagcctacctaatctttctctcgccactatactgccagcaccaaatatagtgtctggctcattgttgaggcactcggtaaacatttggtgaatgaaagaatctcatgctcaactaattttactgttttgtggaaaagactcatttccaatgcaggattttatctgtctttaaaatatattcaataaagttccaccccccacttttttttttttctttgagacagggtcttgctgtgcagtgattcaatcatggctcactaccgccatgacctcttgggctcaatcagtcctcccacttcagtctccaaagtagctaggactacaagcatgcgccactatgcctagctaattttttttttaactttttgcagagatggggtttcaccatcttgcttaggctagacttgaactcttgagctcaagcaatctgcctgccttggcctcccaaattgctagggttacaggcgtgagccacactgtacctggcccaagttttgttttcaatatccaagttattttctttcataaaagaatgagaaaaaattaaaaaaaattgaaagagaaagcatgctacaatcctctgctcagagatacccaactactatgcacatattttggtctttttgggtttttttttttttaacggcatcttgctgtgttgtccaggatgaagtgcagtggcatgatctccgctcacttcaacctccgcctcccaggttcaggcaattctcctgccgcagtctcccgactagctgggactacaggtgtgtgccaccacgctgtgctaatttttgtatttttagtagagacggggttttcccatgttggccaggctgttttccaactcctgacctcagatgatccacctgccttggcctcccaaagtgtgggattacaggcgtgagccaccatgcctggccagggttttatttatttatttatttatttatttttcttttgagacggggtcttgctctgttgcccaggctggagtggaatggtgtgatcgtagctcactctaactttgaactcctgggctcaagctgtcctctttcctcagcctcctgggtaacctgtactacaggcacatgccaccatgcccggctaatttttttatcgtttttgtagagacagggtctcactatattgcccaggctggtctggaactcctggcctcaagcagtcctcctgcctcagcctcccaaagtgctgggattatagacatcagccaccacatcaggccttggccttttttatttttagtttttattttccatatgtgtagtttattatgatcaacatgataaaagtcatctagctgcattttttagagtacatgaaagagatgttatagtaagctttaaaatatttgtaaatatttacagccactttataaaaggaaatcagctctttttttttacatcagcctttttttaaatttttgtttcagtaaaatgattaacctttcagttcctgataccattgatgaaagagcaatcaacaagaagaaacttacacccttcatcattcaggtatgcattgttctcccctccctttaacatgaaattactgtttgaggacctgttctgcagacttcagcctctgcactctgtaggctcccaatcaatccttgtaaaaactgttgagtgtgggattgttatccagattatacagacagaactgggactcagaaaggtttctgagcttgcctgagattaatgttggaactgaggttcaaatcccattctaatttcaaagccccatgttcttttcatttcataatgtgttcaagcactacagagataagcagaagtatataagctcttaattaactggcgtgcttaagaaatggagcatttttttttctatcaagtgaatattagattattagcaaaattccctcagagaagagcacctcttgggatgtggacattgataacttctaaaactcttttgggcatatgcagtactgttggtctctcacccatttaggcatttttggaattataacactttactcacatggatatatttactgtggtactcagccttttcatttagtgccagcatacttcaaaaggtaccaaataaaaatacaaagttaacttctcatgagattctgcaaaaggcaatagcaataaggctgaaatttgtcttagctaggctttctaacacaaaactctggaatttgttttttgtgacacatatatggatgaaattaatacagggtattaatttcctcattgaatgttattttcagtgaagggagaaagtagactgctaaaaaatggaaaggtcaagaagcaagtgtgtaatttggctgtcttgcaggaaaacttgaacttggcactgaactctgcttctgccattgggtgtcatgttgtgaacattggtgcagaagatttgagggctgggaaacctcatctggttttgggactgctttggcagatcattaagatcggtttgttcgctgacattgaattaagcaggaatgaaggtaatggaacacagtcattctggcagttgtttattggttatttttttctagtcatgcagactttcgtgctctcacttaatggaggtgattaaatggtggtaactagaatgaacataaggtaatgctatagagttattcaggaaaatagcctaattacatgactctcttctttactagtaattcacatttgtctggcactttacaattcattttgcaataatgacacaaaagcacagagagattaaggagctttcctgaagtcctcaaacttgattatctatttttttctgttctgcctacacaacttctaccccgttgccaccctcagctccaccattttgcaccatcttcttttttggagacagggtctcactctgtcacccaggctggagcgcagtggcacaatcagcctggctaacatggtgaaaccccgtttctactaaaaatacaaaaaattagccaggcgaggtggcacgtgcctgtagtcccagcttctccggaggctgaggcaggagaattgcttgaacccggaaggcggaggttgcagtgagctgagattgtgccattgcactccagcctgggcgaaagagtgagactctgtctcaaaaaaaaaaaaaaaaaaagaaagaaagaaaaaaaaagagagaaaatgtaagattgcaaccgggtgtgttggaccatgcctgtaatcccagcactttgggaggccgagacaggtggatcacttgaggccaggagttggagaccaccctggctaacatggcggaaccccgtctctacaaacaatagaaaagttacctgggcgtggtggcatgtgcctgtagtcccagctagtcaggaggctgaggcaggagaatcgcttgaacctgggaggcagaggttgcagcgagccgagatcatggaggcagaggttgcagtgagccgagatcacgccactgcactccagcctggtcaatagtgcgagactctctcaaaagaaagaaaagaaaaagaaaatataaggatgaattatatttctgttaaaataggattgagccttcaagagttaattgattaattttacttaaatacaaataccaccgtgtttctagactactttaatcaaaaggttaagtaaaagattcccaaattgtaaacatctttcccccaaatccctgactttttttttttttttttttgagacggagtctcgctctgttgcccaggctggagtgcagtggtgcgatcttagctcactgcaagctccacctcccgggttcacgccattctcctgcctcagcctcccaagtagctgggactacaggcgcccgccaccacgcccggctaattttttgaatttttagtagagatggggtttcagcgtgttagccaggatggtcttgatctcctgacctcgtgatccgcccgcctcggcctcccaaagtgctgggattacaggcgtgagccactgcacccagacccaaatccttgactttagaagtgttaaataagaacaacttatacaaacatatgacataatgtgaagcttgcattaagcttaaaggccataacctcatttggtatttgaaatgtgaagaataacagagaaaagaataaattgtagtattatgttattatatctgttatatatttatcttttttagtagattatgagtatcttgaaactaggaactatgtcatagtagtttttgcacctctattacttaacagtgtcaaaagactgaatgaacttggcatgaccattattgtgtcatataataactgtgggatttttttttttttcttctagccttggctgctttactccgagatggtgagactttggaggaacttatgaaattgtctccagaagagcttctgcttagatgggcaaactttcatttggaaaactcgggctggcaaaaaattaacaactttagtgctgacatcaaggtaactgttgaaagaatcacaacattttggggggatataatagctggaagatttcatcccagcttaacagagagaaaatcctaacactgtatcaccaagccttgttgtctcttggccctgaaggtagattttagaagagtaatagagccagataaggtacattagcacctatgttttattttgtgggaaaaggtaaaaatattatgctaatttatcatattataatgctaatttgttatatcctgcctattggtaaacatggagtattaaagaataggacatgactattctattcttaactgcctttcccaagcctcagtgtacctgttagtaaacacacctagaagagataggaagggcctcatgatttcctcttcaccttttttatttggcttctctcctgtcattttatcctacctttagttgtgagttcctcgaggatagcaatgagctcttatttatgtctgtgtatcctacctcagcccctgctccagggccctcctactaaagccaacttaaaacatagtatgtggcatatacaagaccctcatatttcttgcattgaattgaatttttttttcactcactgtttatcatgagcagtgggggaaaactaacaatggaggaagacatttattacatgttgcctttggcttctcatgcagagggccaacattaccatagcaaacattgtgtggagttctccttaactgcctcaattctgtgtgacatccagatgttggtacacagggaataaacttaaggatcttcatcagatgtcactgaccagcaaggctgtgaaaacaatactatgtgatgatatgattttgttcagtgatgagaggaagcagtgagttgcctgtactactgatttcatccatgaaaattaagagtagccccaaaattataagaccaactgaccctgccctctcttttaattacacaatatgtttggccaggtttgttgttgttgctgttgttgttgtgacagggtctcacttcgtcacccaggctggagtgcagtgctgctaacatggctcactgcagcctttacctcccaagctcaagcaatcttcccacttcagcctcccaagtagctgggactacaggtgcacaccaccaagcccgattgatttttttttctttttctgagatggagtctccctctgtcactcaggctggagtgcagtggcactatctcggctcactgcaacctccgcctcccaggttcaagagattcttctgcctcagcctcctgagtagctggaattacaggcatccaccaccacgcctggttaatttttgtatttttaggagagacagggtttcaccatcttggtcagactggtctcaaactcctgacctcatgatctgcccacctcggcttcccaaagtgctgggattacaggcatgagccactgtgcccggcctgatttttttattatttgtagagatggggtctcactgtgttgcccaggctggactcaagctcctgggctcaagtgatcctcccacctcggcctcctaaaatgctgggattacaggcatgagccatggtacctggccagccaggtatattttgcttcatgcactagatgcgttcctgaaaatcagcaagccaaccataaatggattttatgtagtgggatatattttaaatgtaaagagaaaatcttatttttgtaaatgaagcctgctttgaatttttttattttttattttttaaattattttttgtttatttttttttttgagatggagtcttgctctgtcgcccaggctggagtgcagtggcgccatctcggctcactgcaagctccacctcccaggttcacgccattctcctgcctcagcctcctgagtagctaggactacaggcacccgccaccatgcctggctaattttttttgtatttttagtagacatggggtttcaccgtgttagccaggatggtctcgatctcctgacctcgtgatctgcctacctcggcctcccaaagtgctgggattacaggcatgagtcaccgcccccggccatcaatatttttaaaaaggaaataattgtttggtaatgtgaaaactaacttccagtttatctgtattcaagttcaaattttcacctgtaaagcccttttcagggtagtaaatacagattttgctgggtctgctctttacttgttcttctcaagagcataggtttattataaattgtttgtgtagctttagcaagtaattggaagtgaaagcactttcgcaattgtagtacactattccttaagaggtaaatgctatgcccccaaatgatagaatcggagttggcattttatgaattgctctgaaatagctttcaattacctgattttccccattcttagaatcatttatggcaccaagtttcaaactcacctgggtaactggtttaaaaggcacctttctgggcagctcccagacatttatatttggtagctcaggaattggattcagtaattcacatattgagtaacttcctcaggggttagtatgcacatagactatgagaaacactccttcatagcctgtctggaccttcaaagcccagtaacaggaaactattaatatcgtagctggaaggtggtcttcacatatggcaggattaaggaatcttgactcaaattccggtcctctagcattccaaagatgcaggaatttacttgacacgtgtgtaaaggttcttaataagcgtttgtgcaagtacaatagttttcaagctgtgttttgtggagttgtccacacaacctgaattcatgttgactgtgagccaaccccattgttttatgtattgggattctaagaaaacaacattcaagtgatttagtccaggggtttaaaacgaaaagagacctttgttttgttaagtacattcagatcatagagggttcagtgttattttagcaactaaaatgtttaccatttaatgcttttgtcatttaaatttacaattaaatacatctttaacatagctaatctcttcttcgtaggttgtggtatatgcattgtgctttgtaatgatataacctgtttattttctctttcttctatgcttcctggatttctgctctcctacttttttaaatgcttgttttgtctgtcaagcttattgacttcagtaattcagtgaaggtacagaactggttatatgtttattagcattattgtattgatgactttaataattgcgaagtcatgtcaaaatccagttcatccatatgcaagacagatataaggcagatagatggacttttctggggaaaacacctgttaaattaaaaggcagagatttgtgccatttattctcaaaaaatccaatgcaaatagccttccaaacatgggacaataggatacattcattccttgtaactgtgatctcactgacattttcaattctttgtaggattccaaagcctatttccatcttctcaatcaaatcgcaccaaaaggacaaaaggaaggtgaaccacggatagatattaacatgtcaggtttcaatgtaagtataagtgctcttttgaattctacaatcttgcaaaattattgtcaatttcttataagtacaataatttttataatcgtatgaagtagagttggcaattttaagcattattttaaaatgtattactgtacatgtaattcagaggccagaaaactagctttgatttattttgattgttagtgaattccatcgttgttgtggtattgatttatatggatggcataaaatattcaaaacaagtatggggaaataagtaactagaagctaaccttttccaagtatttggattacaaccacagtaatagatttagtgactatatgaaaaccttttccaagtatttggattataaccacagtaatagatttagtgactatatattcatattcctgtgttgagagtaatgtgattatgttttacaaactcccaatctatgaaatctaatttagggaattactctcagagaccatgttccctggttatgtcactaatttgtttagtgacattggacaagttccttctcaaaattggatttcactttgttcatccataaagtaaggagttagagtgaactatttagtcccaagtttctaggaatctgtggtttttgtacccattagatatggaatgcatgctactaattaacaaaatccacatatctagcctattatgccataggatggagtggattacattggctaaaccatttttcttctctttcttttttttttttttttttttgagacagagtctcactctgttgctgaggctggagtgcagtggcaccgtgtcggctcactgcaacctccatctcctgggttcaagcaattctcctgcctcagcctcccgagtagctgcgattacaggcgcccaccaccatgcccagctagttttatatttttagtagagatggggtttcaccatgttggccaggctggtcttgaactcctgacctcaggtgatccactcgcctcggcctcccaaagtgctgggattacaggtgtgagccaccgtgccttacgtggctaaaccatttttatgctgcccttatcagaactgaatttgtaactgacttgtgtgcttatatttctgtctgtatgttaaatgcaaaactcttcagctcaggtcactcttggtagggatgaggggccatcttgtccaagaagggagctgtctgggttggctagccatgtgatctgataccagggtaaatggcatcagtatgctaaccgattctgatacaccccttctctagtcaatcctttccaattgatcttaaaacactcttttgtctcttccctcttcagaatccgacaaggattcttctgttgactctagaattcagtctgaaatgttctgcttggcactcaccctacaaatcttgctctaaaatctagccagtgttatttccccaaaagtctgtgttccccaccccaaccttccttcccaccaccacccaggtgcctttgctcatgctgttctcatggttttcagtgtccttcatctttttcagctttacaccttctttagggtcttttttttttttttttttttttaagagacgaggtttcgccatgttggccaggctggtttcgaactcctgggctcaagcaatccttctgcctcggcctcccaaagtgctgggattacaggcgtgagccaccacgtccaaccaaggcctaattttaactctgaacagttttacctgttttttatttcaatttaacttttttctcttcgtctttgtaatggaaaaaatcccttcctttcgtcctaacttttttaatccttcaattccctgagattaatccttggtcttgccttccaccattctccctacgctcaaaagaaatcagtggaaatagattctctgcttctcttcaattcaagcaacagttcacaagcatttcccttgggatttgagcatgacatgaatgaaggtgtctgtcttctccctcagccagggaagcctacttccacagctcagcacaacttcctctctctctagctcgctctccagcagtgccctcctttctagttccttctgctgcataacacagccccagaggttccagggttccaaggagtccactctgtcatgaagctcattgacttaatgcacagtacccagaagcctcagtgaagttcagctgagagccagtagaaaaaaggagaaactccaaagcagaaagtagtaaatcagcaaaataaaataaaataagccaggttgaagagaatgaacccacaatttacagaaaatgaacaccattttctaaaggagacttaagtaggactacagttaataccctttcacatttaataattaattgagattcattgtagataaagtacatttgaaaaaaaattttaacataattctactgaaaatatctgaatatttaacttgaggtggcttaaaaggacaattgaagctgttttcctattgagaaggaaaaaaggaaaagtggaaccagagaaagtgaagatggtgaatgtatatttttctctacagattttcaaacaaaatctgggagtttcccccaaccttttacgtaacttctttcttaatgcaatttagttaaatgtactcagtagtttgctgtgtgatctggcgccatctagtgtatattacaggtactgcatctccaagagggccaacctttttttttgcattcaaaacaattttataataagtaccatatgttagctaaaagaaagtagaactgtatacccagactatgacagtggggaaattttctatatttttagtgtggcctttgacaaagtcttccgattttgtttcaacaggaaacagatgatttgaagagagctgagagtatgcttcaacaagcagataaattaggttgcagacagtttgttacccctgctgatgttgtcagtggaaaccccaaactcaacttagctttcgtggctaacctgtttaataaatacccagcactaactaagccagagaaccaggatattgactggactctattagaaggtaactaaaaacctcaatttcgaatgtgtgggactatagagtagaaatacataggccacaatgattttacaatctagacttaataagtttttttatatctacaagaagtagatggcagatgctgagtaaaaactggcaggaaagtacgatacaagtgaacttttaaagtaaagtagtcgaggccgggcacggtggctcacagctgtaatcccagcactttgggaggccgacatgggcggatcacctgaggtcagtagtttgagaccagcctgaccaacatggtgaaaccccgtctctacgaaaaattaaaaaattagctggggcgtggtggcacatgcctgtaatcccagctactcgggaggctgaggcaggagaatcacttgaatctgggagacggaggttacagtgagccgagatcgcgctattgcactccagcctgggcaacagagtaagactccatctcaaaaaataaataaaaaaaataaaaagtagtcgagtcgcttaatgtaaagccacttagtaaatcagtatttagttttaatatttagggttagaccactttttaatcctctcatcaggaaaaagtgcacatatgcattcagtttgacctgtaaatttagcatatatttatgtttcattcatccacagtcaatgtaactggaactaaccccaactcctttcacctttacctcctcaagaaacaaatgataatatatactaatttttttttaagttttggaaaggcagagtttaccttttccagattatatatgtgtgaagcgtagtctataaaaattaagaaatgcagccaggcgcggtggctcacgactgtaatcccagcactttgggaggccaaggtggccagatcacctaaggtcaggagttcgagaccagcctggctaacatggtgaaaccccgtttccactaaaaatacaaaaaattaggcaggcattgtggtgcgcacctgtaatccagatactcgggaggctgaagcaggagaatcccttgaacctgggaggcagaggttgtagtgagctgagatcgtgccattgcactccagcttaggcaacaagagcaaacctccatctcaaaaataaataaataaataaataaataaataaataaataatgcaaatagtaattcattgagtgtccactgatatttctataaaaccagtaacttaactgataacatcagttactttgagggatgcagattcgaggaaatattggagaaagatttgagaaggagactataaaaagttcataaacctctaaattgcttaactggttagaataaggttgtattctttaattttaaaataaattcaaattttaaaaataagcctgtacctagagagaatgtatgtacttagaagaatgcttggaaactcgtattatcgaaaaattctagatctgaatagagagataaaataatctaatatgtgtattggcactatatgcacatacataaagtgtttaatgaatcagtaaattttgtgaatattcttaacaggagaaactcgtgaagaaagaaccttccgtaactggatgaactctcttggtgtcaatcctcacgtaaaccatctctatgcgtaagccttcctactgctattgtaaacagttacgaatgtcatgaatggatgttaaataatgacagctctaaagattttctagatattaatttgtagctattatttatattggaaaatgtcaagtggtgatttccatcatcattttccaaatacacaaaagctttaagtattcctttacatgatcgttaactgtaagtgatagaatatataaatgtctttatagtaccctagggagcaaatactttatattttgaaacagctgtttgggaggttgaggtgggggcattgcttgagcccaggagtttgaggcttcagtgagctatggttgtgccactgtactccagcctgggcaacaaagtgagatcctatctctaagagggaaaaaaaaagaaaggtaaaaaagaaagaaacagagaccagggaatcctttaagtagaccatccacaacaactcagggactttggttcattgttctctcagcctggaacgttctttgctcgcatatagtggctcgtatccttactgtattccagtcactgattcaaagatttcctgactaccacctgctactctctaacccctaaccctagttcctttttttcttaatagcacttacatacacccctaaaattgtttgtttattgtcaacaaaccaataccccccgtattgtttgtttatccatgtacttgtttattgtctatctctctgactctaatgcaaggacagggatttttgtcctgtgggcccagcctctagaacagtgccttgcttacagtaagctctcaataaatacttataaatgaatgggatggtcttagctctgttttcagcacagattgatagaaaatatgagtcttgggtattatttatggttttatatatcttgtttgacaatgtagtgttactgtttttaaggaaagtcaagtcccagcttcctgaaaacactgattacattatttttaaatcattagtgacctgcaagatgccctggtaatcttacagttatatgaacgaattaaagttcctgttgactggagtaaggttaataaacctccatacccgaaactgggagccaacatgaaaaaggtagataattaagttgctgtatatatttgttagagtatttttattctcgattaatttcttttgtttctaaaactcttgacgctgagcttcttgaggacaaaactgtgtcttatttgtttttgtgtgctgatacctagcattatacaagacacacacacacgtatgcagattaaacaaatggaagtctttaaccatttactcttgtgcctttgcagctagaaaactgcaactatgctgttgaattagggaagcatcctgctaaattctccctggttggcattggagggcaagacctgaatgatgggaaccaaaccctgactttagctttagtctggcagctgatgagaaggtatagtacacaattttagctgtttagtctttactatcatacaggtctgtgatttagtccttactgtgtttaataagtggatatgtcgataactacacttttgaaatatgttatatttacactccgaaatgagtttaattaatgaatatatgttggatgttaagtgggagatgcttccttgcaagttaggcagcagaactatggttagtcccttttttaaaaaataggaagcctgacacacagatttcggcctcgtttagtgtcagtgaattaaaaaattgtcagaacaaaattatgaacatcttcatgctcatttgaaaataaagatctctctctgtaatgctgatgaagatcactataatgctgaaaagcattcattatgactgggcaccagccaaagcacagcttattttatgccattaccgctattggaatagtacaaaatgtgcctacagtgggctgttggacctgctcattaaagcactgtcaatctgctcctctctcaccactacaaagagtagatcagtagcaagccactactgcttgaaatatttttttcacatagtgtgaatctctttccatgaaatctttagtccttgaaatttaaggaatataggggccaggagtggtggctcacgcctgtaataccagcactttgggaggccaaggagggtggatcacgaggtcaggagatcaagaccatcctggctacacggtgaaaccctgtccctactaaaaatataaaaaattagctgggcgtggtggtgggcacctgtagtcccagctactcaggaagctgaggcaggagaatggtgtgaacccgggaggcggagcttgcagtgagcaggagattgcgccactgcactccagcctgggcgacagagcgagactccgtctcaaaaaaaagaagaaaaatttaagaaatataaaaagtggaagataaagcatctttctgatgtttgcatttttcctcataaagtagatggtgacgttttcttctgctgcctctcttagatataccctcaatgtcctggaagatcttggagatggtcagaaagccaatgacgacatcattgtgaactgggtgaacagaacgttgagtgaagctggaaaatcaacttccattcagagttttaaggtcagaatccatatttgactattaaatattatgtttgctggataacatctatcatttgggaaggcaacttttggcttctttgtgagtgagaattagtgttgggctaatggcacaattctttacgaattcactgggctttgtttttggcacttgatataagtaagcacatgttaatttgtatgtatcaaaattctcagatttgttctcctttcacactaggacaagacgatcagctccagtttggcagttgtggatttaattgatgccatccagccaggctgtataaactatgaccttgtgaagagtggcaatctaacagaagatgacaagcacaataatgccaagtaagggagactgctaatagtatgaaaagaacgcagctttgtagctggacagatctgaattctaattcaggttctgccatttaagagtggtgtcaccttgggagaaacctcttggagcctcagattcctcatcaataaactgggggcaataatacttaccttagattttataaagattaaatttttaaaaattataagagcctagccttgtgcttggcctactaggtgcttagtcggttgttgcttcagtggattacagaaataatgtagcatgtattttaatgcaaatcaggtaaaactttacaaggaaaataagagcttagggtgttcatctgtctgtctcattctttttttaaaaaacgcattatccacttatgtctcttttactatacatagatcattcttactacatttattgaatttatcttcatcagttcccatattaacagaatgcttgctagccctccacagaagactatgccttgaaagtttcttgcatttcaacaatattcagaaggtcttttccaccagcctattttcttcttcaccaaaggcctagagtgtgacctggcttcatgggtgacccatgaaaaccttactagttagacattgaaaatccatccacagtcctgcattaccgaacagctaagaagcattcctgcaaaactttggagttaggcacattatttcttttttccttgaaaaatatttctagcagatatgacaaaggtctaatatccacaatatatcaagaactcttgaaatctctttttctagaaactcgatgatttaattatctttaaagattctggttccaacacacctagaaatacttcacggattagttgagatgtgttcctgaaaatttccctacctggacatctcagttcttctgtcccttcgtctaccttttctagtttttggtccagccactctgtccacgtaccacgtagactgtctcccctctcatgaatacttggaagtattcattgcatctgcctaacaacttgggttttgcatctagcatgattttccacctcatatctctaagatgacttgagtgtgtgttattatgtgtgcaatgagaatattaacatggattgtatagacagcctaggtaattatatatataaagttggtgcttcaagcttaattctcacctcacattggagaaaaagagtgaataaatattattagccccaaataatagagcttaaaaacctactgtaacttcaaagtgaaatcaaaacccaaatcaaaagaaaacaaaaagcaaaactgttctaattggaactatcaatatggaatttttgcatcccagcataataattatatatgaggaaatagatgtcttacgtggtgtccttaactgacaagaatttcatcctgattttgtttccccctaaaataggtatgcagtgtcaatggctagaagaatcggagccagagtgtatgctctccctgaagaccttgtggaagtaaagcccaagatggtcatgactgtgtttgcatgtttgatgggcaggggaatgaagagagtgtaaaataaccaatctgaataaaacagccatgctcccaggtgcatgattcgcaggtcagctatttccaggtgaagtgcttatggcttaaggaactcttggccattcaaaggacttttcattttgattaacaggactagcttatcatgagagccctcaggggaaagggtttaagaaaaacaactcctctttcccatagtcagagttgaatttgtcaggcacgcctgaaatgtgctcatagccaaaacattttactctctcctcctagaatgctgcccttgacatttcccattgctgtatgttatttcttgctctgttatcttttgccctcttagaatgtccctctcttgggacttgcttagatgatgggatatgaatattattagacagtaattttgctttccatccagtatgctagttcttattcgagaactatggtcagagcgtatttggatatgagtatcctttgcttatctttgtagtactgaaaatttgccgaagtaactggctgtgcagaatgtaatagaagcttttcttattcttttattcttaagatcagtatctttttacagtattctttctacatgatccttttttgtacatttaagaatattttgattatattaaacaagactgctgattttgctactttttttaaggggtcttcaagtaagtaaaacatacatcgtagctagaagaaaaatgtaccttaaatttgcatcttccctctcatacccaagctgtaaacaattgaaatattttgtcttaaatcacttggttcaatacatgcttatttgttttaaaacctgtatcatcaaactctctctctaaatttaaaatgctgttgaatatgatacttttgaggagagagtgtgctcagaacttagacgggatttggtaggccaagtatgctaagtgtacaatatattttttaattttacacctgaaacaaagaaatgtggtcactaaaaataaaagtatatatgtaggaattaatgtactcttgctttgtcaagctgtttgctatagtttccaaggtattatgttactctaactctgaaaagtgatgtaatctggtagcaatgtagtagttcaaataaaggcatttacataataattagtctgttcttcatgcttttgtctcttaggaagtatgccaatgtttgtcaggatttttttctttttgtttttctgatgtattctgtaaaatggtgtttgttaaatttgagttttgggagctgaattagaggtactgaattaaggacagtacaaatgaagtaaaaaggttttctccaatttaccaaaatttctttatccagttcctgcttttttctttcttttccacctccctcagtcttttcaatgttctatgatatacatatcctgaaacagtggggatctgaacagtcacagaggagaaatggttcatagtagatcttctcaatctcatccatatatgacatttttggctggataactctgttggggtggggagaaggggctaccctgtgcattgtaggaggtttagcagtattaccggcctctacccactagatgtcagcacatgcccggtggtgttgaccaaaattgtctccagacataaccaaatgtctcctgggtggcaaaatcatcccttgtggacaatcagtgcccatttaagcctttgtgtgaatgagtaatataaggtgtagtctactgaggatttggttacatagagatactatataatactttgcatttataatctgagagatggaaaggcctttttaaatatcacctgaattccaaagacataaaattaaaaaaggatatatttgacaactctacttttgcaaatatatatgtataataaaaaagatcaaaatatagataactaaaaaagtgagttcagtctcagattatagattcttttaatataaaaataggatttatgagtgaaaaaaagacaaatctgcaaacatactagggtaactgatgaagtaaggacaattacatcttaagacctgtcttatgccttgaatctgccatactcattcacgttcatcttcgtcgaagtacaaaggttcttctctgtaagccctaacgccttgaagtgcctctttaacaagataggaaagatatattacatgtggccctttcttcaaaaaaggagctgatttcttgggtggttcactatacagggcccacagcctgtaggagtgtaccatgggatagttaagtgttcatataaagcagtggacctgacacacaatttttttcctccaaaaactaatttcaacaaataagaatgtggaccaaaattagcaacacattcagaattctgctgggcgtggtagctcataactgtaatcccagcaatttggaaggctgaggcaggtggactgcctgagctcaggagctcaagatcagcctgggcaacacggtgaatccccatctctaccaacatggtgaatcccccatcttttccccacacacctgtaacttcagcactttgggaggctgaagtaggaggatttcttgaggccaggagtttgagaccagcctggacaacacggggagactccgtctgtataataaagttagctaagcatgaggctgggtgcggtggctcaagcttgtaatcccaacactttgggagaccaaggtgggtggatcacctgaggtgaggagtttgagaccagcctgggcaacatagtgaaaccccatctctacaaaaatacaaaaattagccaggcatggtggtggacaccataatgtgtcccaccagctactcgggaggcttaggcaggagaatcacttgaacactgcgggcagaagttgatgtgagccgagattgcgccactgcattccagcctgggtgaaagagctaaactccatctcgaaaaaaaaaaaaattagctgagcatggtggtgcatacctgtggtctcagctacttgggaagcttaggcaggagaatcacttagttcagttgatcaaggctgcagtgagttgtgatagaaccattgcatcctaaactgggctgcaagactccatctcttaaagaaaataaagatgatattccccctctatcctaatatgctgagagattgattttttaaatttttgtcatgaatgggtgggtagattttatcaaatgctttttctgcatcaatttatatcatcataaaattttcttctttaccctattgatacggtggattacattgattagtttccaaagattaaacaaaccttgcatgcctgaataaatcccacttggtcagtgtataattcttattcattgttgaattttatttgctaatattttattgaggatttttgcatctaagctcagaatgacgttaatttttatttaaatgtttggtgcaagtctccagtaaaagtgtccaaacctggagatatttctttaatggttatggggctattcagattatctatttaatcttgattgcgttttgggtggcttttgaattttgaggaatttgttcacttcttccatgttgctgaatttgtgaccataaagttttcgtagtatttccttaattatctttttaatagctgcaggatatgtaatgatatcttcagtttgattcctcacagtggtgatttatgtcttctctctttttaacctttgtcagtcttgctagaagtttatcaatttcattactttttttaagaactagctttttgtttctttgtttttgtttttctattttattgatgtatggttttatctttatgatttccatctttctgctttctttgaatgtgttctgctctttttttgttgttgttgttgtagcatctgtccaagacaaccgtaaaaagccactaacctcaataaactacccatacagaattatctatttctcctttcagccatatcagttttattttgttttttgttgttgttgttgagacagagtctcactgtgttgcccaggctggagtgcaatggcgttggcttgcggcaaccgccttttccgggttcaagcaattctcctgcctcagccttctcagtagctgtgattacaggtgcccaccaccactccctgctaattttttttttttctatttttagtagatacagaatttcaccatgttggccaggctggtctcgaactcctgacctcaggtgatccaccagccttggactcccaaagtgctgggattataggcatgagccaccatgtccggccacaccctgctcagtttttatgtattttgagactgtgttgtttggtgcttacacatttagggtcaccatttctttttagctaattgatctttttctgattacataatgtcactcctagtccccagtaattttctttgctctgtattctactttatgtgatattaatatagcctagccattcctgctttttaatgtttacataattgtcattttctattcttttattttcgagctgcattcattatgcttgaagtgagtttcatgtagattgcatatcgttgggtcatgtgtttttatctgtgttttaattttttgcttgtttgtttgttttgagatggagttttactcttgtcgcccagactggagtgcagtggcgcgagctcagctcactgcaacctccgcctcctgggttcaagtgattctcccacctcagcctcctgagtagctgagattacaggcatgtgccaccatgcccggctaattttgtatttttagtggagatggggttttaccatgttggccaggctggtctcgaactcctgacctcaggtggtccacccgcctcagcctcccaaagtgctgggatttcacaggcatgagccactgcacccggccattccttttttttttttttttttttttttttgagatggagtctcctctgttgcccagtctggagtgaagtggtgtaatctcggctgactgcaacctccgcctcccagcttcaagcgattttcctgcctcagcccaccacgctcaggtaatttttgtatttttagtagagatggggtttcaccatgttgggcaggctggtctcgaactcctgaccccagcctcccaaagtgctgagattacaggtgtgagccaccatgcccggctgttagccactgcacccggccttaattattaatagttagacattatttactttgaaagtaattattgatatgttaaggcataagtgtgccattttattatttagtttatgtttgcttgctccactttttgtccttctgttccctgcctcttatcttttgatgagtcacttgaacgttttttaaaattccattttgatatgtcaatagtgttcttgaatatagttctctttttatttttattttttgagacagtcttgctctgtcatccaggctggagagcagtggcactatcacggcaccactgcagtctcaacctcctcccgagctcaagtgatcctccccgctcagcctcccgagtagctaggactacaggctcatgccaccacattcagctaattagttttgttgctgttgttgtttgtttgttttggtagaaacgaggttttgacatgttgcccacgctggtctctaactcctgggctcaagcaatcttcctgccttagccttgcaaagtgctgggattacaggcatgagctacctcgtccggccaaatatgtcttattttttaaggacttgctctaggtgttagtatatacatatgtaccatatcacagtctattactaagcaagattttagcacctcaagtgaagtacctcactttcatttagatcacttgactctctctacctgttaaataaatataaatgctttaagcagtttctctacatacattgagcaccgtgttagatgatataaatttggcttcaactctcaaatagtacctttaaaaagcatgaagagaagcttagtttattatatttacctctgtcataaccattctatttttctttctttcttcctggggtctcagcatccttaggttatagtttcctttctctttggaaaactccctttagcctgttagccattgtttaataacaggtcttctagtaaaaaattctctgaggtttacttcatctgagaaagcctttatttccctttccgggactctttttacaaggtcccatgagttgagccttacttgctactagaccttggtgagcttatcaagagtctagactagaattttacctctcacaccaagaaatgtcacatacttgataaaatttaaccttcttagtaagtgactttgtgatctgattcctgtctagccctgtctcttactactcaatgccattctcaaattgtgtacccacaaatatacaagcacacattgtttacacatgcacacacacacacatacacatatattttgactaaatgagatgccagtaaatttgagctactttttttagcaagagatatgcaaaacacacatgctcacactaactctgaatttatactgttgttgcctataccttgagctggagttggaggatgaaatgcaatcacgatatggtgtgaggaaccaaatggccaacaatttaaatatgcacaaaggtctctcatttattctaagcagaatgtctgctaattctgtaagaatatatgtgtgacttgaatggtttgcatctcattaaatttaatgtatttggctgatcattctccctggatcacacattattctccagctactgccacttttctctactctcccttccataaaaacttcaaaaattagtctttactttctttctttcttttttttttttgagacagagtcttgctctgtcacccaggctggagtgcagtggcatgatctcagctcactgcaacctctgcctcccaggttcaagagattctcctgcctcagcctcctgagtagctgggattacaggtgcataccagcacaccaggctaatttttgtatttgttttagtagagacgggggtttcaccatgttggccaggctggtctcgaactcctgacctctagtgattcactcgcctcggcctcctaaagtgctgggattacaggtgtgagccacctcacccagcctgaaattagtctttactttctatttccatttcctctactctcaatctctcttggatccactataattaggtatttttccctacgttaacaatcatatagcatgtatcagaaattgtgggtgctcagtgaccattaagttcatacgagagaagaaaggctgaatactaatgagctaagcatccatttttttaggttaaaaaatcataactgcaaaggagggaaataataaagcagaaaataataaaataggaaacgcatgataaagcagatgaataaaccaaaatttggctcattgaaaaccttaatgaaatgtataaaccttagcaagattgatcaagaaagaagaggaaaagcgtgaaaaacattaaaaataaaaaaggctgggcatggtggctcacgcctgtaattccactactttggggacgccaaggtgggaggattgcttgagcccaggagttcgagaccagcctgggcaatatacctcatctctacaaaagatttggagaaattagcctagtgtggtggcatagtcctgtagttcagctattcaggaggtggaggtgggaggatcatttgagaatagaaggcagaggctactataagccaagatcactgtactgcacctcagcctggacaacagaggaagactttgtctcaaaaataaaattaattgaagttaaaaatttttttaaagtagatatgcagatacagtcgctgtttgaactggtaataagatattatgaaaaattcatgataggctgggcgcggtggctcacaccggtaatccgagcactttgggaggcggaggcaggcagatggcttgaggtcgggagtttgagtccagcctgatcaacatggcaaaaccccgtctctacaaaaaatacaaaaattagccaggcatggtggcacacatctgtaatcccagctactcgagaggctgaggcaggagaattgcttgaacctgggaatcggaggttgcagtgagccgagatcacgccactgcattccagcctggatgacagagtgacactctgcctcaaaaaaaacacaaaaaattcatgataaaattgcaaatttgaatgaagtggacaaataactagaaatgcaacatactgtaaaagactcaataagtaataaaaaatgtgaacagttccataactcaaaattttaatctgtattaaaaatcttccaacaaagaaaagcatggcgaccatatgattttactactgaattttaccattcaaaaaaaataataattctcaggccgggcatggtggttcacgcctctaatcccagcactttgggaggccaaggcaggtggatcacctgaggtcaggagttcgagaccagcctaaccaacatagtgaaaccccgtctctactaaaaatacaaaattagctgggcgtggtggcgcatgtctgtaatcccagctactcaagaggctgaggcaggagagtcacttgaacctgggaggcagaggttgcagtgaactgagattgcaccattgcaatccagcctgggcaatgagcaaaattccgtctcttaagaaataaataaataaataaataaatctcatctttaacaaaatctttcaaagtttcaaagtctggaaagacaggtgaaagtccccatctcatttcatcagggtaccacgtaaccttgttaacaaagccagaaaaggaaagtatgagaaaagaattacagggtaatcagacttatacttgtaaaaattctaaacaatattggcaaacctactgcagaaacactttttattataaaaagtgatgtgaagtacatcatgaccagagtggtcagaataagtatttgctaaagttcaaaatccagcaattaatggtttagaggaatagctctgctatggaatccagagatcttgcatatctcctcatagaccttatatgcaacgtgcaaccacattctgacccaaaacttgcctagaacatggaaagatagtcttctaaagagctgtcacaaggatatttctgttctctctccttatcttgtgagagactccctatcttgtgggaggctgctatgagcagtttttcattcaattttctggttccaatgaagcatgggattttccacgttaatctcttttaaggtacagtggaagtctataagaccacttagttgcattctagagtcagctcttcagcaacatagtgacctgccactcctgttgtctgttgcttggccctctggttcaatattttcctgtggaactggggttgcacagagctaagaccatgccaattgcttttgcagtctgtgtaagtaacacattgtctgaatcttttagggctcattgtctctttattagccaaatctgtagaagtgtgataagcctacctagcagctgttatcagctggtgcttaggaaatgcttgatttcttgacacatgatgatgggaaagcctgggagtggtggctcaagcctgcagtcccaacaatttgggaggttgaagtgggaggatcgcttgagcctaggagtttgagaacaggctgggcaacatggcgagaccccatctctactaaaaatacaaaaattagctgggcatggtggcaccagcctagagttctacctactctggaggctgaggcaggaggatcacctgagcccaggaggtggaggttacagtgagctgagatcatgccactaccctctaacctgggtgacagaatgagaccctgtctcaaaaaaaaaaaaaaaaaaaaaaggccaggtgcggtggctcacgcctgtaatccctgcactttgggaggccaaggtgggcggatcacaaggtcaggagttcgagaccagcctggccaacatggtgaaaccctgtctctactaaaaatacaaaaattagccgggcgtggtggtgcatgcctgtaatcccagctactcgggaggctgaggcaggagaattacttgactccgggaggcggaggttgcagtgagccgagattgcgccattgcactccagcgggggtgacagagcaagactccatctcaaaaaaaaaaaaaaaaaaaaaaagaaaagaaaaaagaaaaaagtgaatatctaaaaggcaaaattataaatgtacttaaatatatgggagacgtaggagctatggctaaacatcatctggatttgatcatttgccacaagcaggatgctatgtgaaaaatgtgatggcaagtgtgtgatttgtgactcctataggtgcatccttgcaccctggtgtgcataggtgatgaatgtaagtatagatcttaccaggggcattgtgtgatctgtggaggtcctggggtttctgatgcctattgttgtaaggagctcaccatccaggagaaggatagagatgtctgcccaaagattgccaatttggggatctctaagacctcttctatgaacgtaaaaaatgtgacttcaagaagaggtgattggtgggtggcaagaggtgattgttggttggccccttcctcctccacatcaagctgctgcagccggcaaaaaagacggctactattaccagcagaaagggagtggagcccagggcatcaggagaagtgcctgctagtgtaccagcaccttgccactcctttttctctcttcagccagatgtgtggtagggatggaaaagaattctccacagagcactctggtacactgttatcagagaaaaattgacagattcgttcatgggtttttttgaacttgagaagcaaagctctgttctccatattgatatgttcaccctaaaacaatatcttctaaaaagagataatatttcagtcttctgcttgaggagttgactgtgaagctatgcccagtgaaaaacgtgttcttgcagcagctcttgtggaagttgtccttgaaaaaactttggtgtgtggtcggaagctatcagatcaggaaatgtggacatttaatcttgtaacacttaccaggcggtgttggtttcatgttattttccttctgagaaattggaagcccttctgttgctattatattaattaaaattgatgtttatttgctggtaaaaaaataaatatgcaggagaatatcttgctaacattggaggtagagaaagatttcttaatacacaaaattcacaagctgtaaatactaaaatttatatttttgtctgtatttacatcttctcttctacatttctttttttttttgagacggagtctcactctgttgcccacgctggagtgcagtggcaccatctcggctcactgcaagctctgcctcccaggttcacgc

SEQ ID NO: 688 - DNA, 3287 bp, Homo sapiens
agagccacagctgcaaagattccgaggtgcagaagttgtctgagtgggttggtcggcggcagtcgggccagacccaggactctgcgactttacatctttaaatggatgagatggctaccactcagatttccaaagatgagcttgatgaactcaaagaggcctttgcaaaagttgatctcaacagcaacggattcatttgtgactatgaacttcatgagctcttcaaggaagctaatatgccattaccaggatataaagtgagagaaattattcagaaactcatgctggatggtgacaggaataaagatgggaaaataagttttgacgaatttgtttatatttttcaagaggtaaaaagtagtgatattgccaagaccttccgcaaagcaatcaacaggaaagaaggtatttgtgctctgggtggaacttcagagttgtccagcgaaggaacacagcattcttactcagaggaagaaaaatatgcttttgttaactggataaacaaagctttggaaaatgatcctgattgtagacatgttataccaatgaaccctaacaccgatgacctgttcaaagctgttggtgatggaattgtgctttgtaaaatgattaacctttcagttcctgataccattgatgaaagagcaatcaacaagaagaaacttacacccttcatcattcaggaaaacttgaacttggcactgaactctgcttctgccattgggtgtcatgttgtgaacattggtgcagaagatttgagggctgggaaacctcatctggttttgggactgctttggcagatcattaagatcggtttgttcgctgacattgaattaagcaggaatgaagccttggctgctttactccgagatggtgagactttggaggaacttatgaaattgtctccagaagagcttctgcttagatgggcaaactttcatttggaaaactcgggctggcaaaaaattaacaactttagtgctgacatcaaggattccaaagcctatttccatcttctcaatcaaatcgcaccaaaaggacaaaaggaaggtgaaccacggatagatattaacatgtcaggtttcaatgaaacagatgatttgaagagagctgagagtatgcttcaacaagcagataaattaggttgcagacagtttgttacccctgctgatgttgtcagtggaaaccccaaactcaacttagctttcgtggctaacctgtttaataaatacccagcactaactaagccagagaaccaggatattgactggactctattagaaggagaaactcgtgaagaaagaaccttccgtaactggatgaactctcttggtgtcaatcctcacgtaaaccatctctatgctgacctgcaagatgccctggtaatcttacagttatatgaacgaattaaagttcctgttgactggagtaaggttaataaacctccatacccgaaactgggagccaacatgaaaaagctagaaaactgcaactatgctgttgaattagggaagcatcctgctaaattctccctggttggcattggagggcaagacctgaatgatgggaaccaaaccctgactttagctttagtctggcagctgatgagaagatataccctcaatgtcctggaagatcttggagatggtcagaaagccaatgacgacatcattgtgaactgggtgaacagaacgttgagtgaagctggaaaatcaacttccattcagagttttaaggacaagacgatcagctccagtttggcagttgtggatttaattgatgccatccagccaggctgtataaactatgaccttgtgaagagtggcaatctaacagaagatgacaagcacaataatgccaagtatgcagtgtcaatggctagaagaatcggagccagagtgtatgctctccctgaagaccttgtggaagtaaagcccaagatggtcatgactgtgtttgcatgtttgatgggcaggggaatgaagagagtgtaaaataaccaatctgaataaaacagccatgctcccaggtgcatgattcgcaggtcagctatttccaggtgaagtgcttatggcttaaggaactcttggccattcaaaggacttttcattttgattaacaggactagcttatcatgagagccctcaggggaaagggtttaagaaaaacaactcctctttcccatagtcagagttgaatttgtcaggcacgcctgaaatgtgctcatagccaaaacattttactctctcctcctagaatgctgcccttgacatttcccattgctgtatgttatttcttgctctgttatcttttgccctcttagaatgtccctctcttgggacttgcttagatgatgggatatgaatattattagacagtaattttgctttccatccagtatgctagttcttattcgagaactatggtcagagcgtatttggatatgagtatcctttgcttatctttgtagtactgaaaatttgccgaagtaactggctgtgcagaatgtaatagaagcttttcttattcttttattcttaagatcagtatctttttacagtattctttctacatgatccttttttgtacatttaagaatattttgattatattaaacaagactgctgattttgctactttttttaaggggtcttcaagtaagtaaaacatacatcgtagctagaagaaaaatgtaccttaaatttgcatcttccctctcatacccaagctgtaaacaattgaaatattttgtcttaaatcacttggttcaatacatgcttatttgttttaaaacctgtatcatcaaactctctctctaaatttaaaatgctgttgaatatgatacttttgaggagagagtgtgctcagaacttagacgggatttggtaggccaagtatgctaagtgtacaatatattttttaattttacacctgaaacaaagaaatgtggtcactaaaaataaaagtatatatgtaggaattaatgtactcttgctttgtcaagctgtttgctatagtttccaaggtattatgttactctaactctgaaaagtgatgtaatctggtagcaatgtagtagttcaaataaaggcatttacataataattagtctgttcttcatgcttttgtctcttaggaagtatgccaatgtttgtcaggatttttttctttttgtttttctgatgtattctgtaaaatggtgtttgttaaatttgagttttgggagctgaattagaggtactgaattaaggacagtacaaatgaagtaaaaaggttttctccaattt

SEQ ID NO: 689 - protein, 628 aa, Homo sapiens
MDEMATTQISKDELDELKEAFAKVDLNSNGFICDYELHELFKEANMPLPGYKVREIIQKLMLDGDRNKDGKISFDEFVYIFQEVKSSDIAKTFRKAINRKEGICALGGTSELSSEGTQHSYSEEEKYAFVNWINKALENDPDCRHVIPMNPNTDDLFKAVGDGIVLCKMINLSVPDTIDERAINKKKLTPFIIQENLNLALNSASAIGCHVVNIGAEDLRAGKPHLVLGLLWQIIKIGLFADIELSRNEAALLRDGETLEELMKLSPEELLLRWANFHLENSGWQKINNFSADIKDSKAYFHLLNQIAPKGQKEGEPRIDINMSGFNETDDLKRAESMLQQADKLGCRQFVTPADVVSGNPKLNLAFVANLFNKYPALTKPENQDIDWTLLEGETREERTFRNWMNSLGVNPHVNHLYADLQDALVILQLYERIKVPVDWSKVNKPPYPKLGANMKKLENCNYAVELGKHPAKFSLVGIGGQDLNDGNQTLTLALVWQLMRRYTLNVLEDLGDGQKANDDIIVNWVNRTLSEAGKSTSIQSFKDKTISSSLAVVDLIDAIQPGCINYDLVKSGNLTEDDKHNNAKYAVSMARRIGARVYALPEDLVEVKPKMVMTVFACLMGRGMKRV

SEQ ID NO: 690 - DNA, 34876 bp, Mus musculus
  misc_feature (1)...(34876): n = A, C, G or T/U
ctttctcaaaatgattcatacacattatactactattttgtggtttataactgaatgtacactgtgtgaaaggtaagaggtttataatttctagttcctggtaggcatgatagcacatacctctaatcccagcatttaggacgccaaagcaggaggatcactgagttcaagatcagtctggtctatgtagcaagttccaggacagccagggctacacagaaagatcctgtctcaaaaaaaaaaaaaaaaaaaaaaaaaaagagggaaaaattgggttcttcttattagtattattttcgttcctattatgagtagtttgtatgcagtgtggcacgtgcctgtaagaagacagttttgtggagttggttctttactttctcctttaggtaggaaccagacaagtggtcaagctcacaccaccaggtagcaagcaagcgcttttacctgctgagcggggccagtttcctttcactggcctaagatggctttcaatattatttaaaagttaacaagatcagagctgagtgtggtgtttcatacctgtaatctcagtatttggggcactaagacagagagagatgtatgcttcagggggtcaattctgcgatagcatgagctctttttttttctcccnnnnnnnnnnnnnnnnnnnnagaaatctgcttgcctctgcctcccaagtgctgggattaaaggcgtgcaccaccatgcccggcttgagctcttgataaaataaaaaatcacttaaaataaaaccaaccaaccaaaaagctgacaaaatgaaataatctaaaagttatcaatataataaaactaaatataaaaagctatcaaagtcatcaatgttttcagaaacacttttatttgctctaaaagtctctgaagaaatgttacttcctcaaaatgttcttgcccccaccaccaaggaagtagtttctcttcttattttagtcagttgtctctcgcttcaaagcagtttatctctatctgacatacatatatagtatttgttagtaaattcaaagacgatgttccaagcttgctgtaatttttcactatcaatttctaatttagtgtgtcaaaacgaaccgtactcaaaggatccactagtgtccaattcaaaaatggctgtgccctatctgaacttcctcatggcaaccaaatagcatattgattataacatttttgacatgtttcccccccagtcttttcttgctttaagatgataattataatggtataggagtagcttccatctatcacgtttttgattagcaaagaaatgttagaaacagcgtacttagtaaaggatggcgtttaagggggttactaagcggtagcctcaatggggcattcccgagccagatgtccagactctccacagcggtagcagctgacttcgctcgtcttgctgcagttcaccgccatgtggccattctcaccacatctgtagcacttaatttgggtacaatctttctggatgtgcccaaattcaccacaagtgtagcatttctgttcttcttgccggttgcagtcccgagccagatgaccaggctgactgcagatgtaacagcactgctccctctctcgtttagcctgggtacagtccttagctatgtgtcctcttctcccgcagttgtagcaggtatcctggagaagatcacagtccttggcgtagtgaccagtttcaccacagcgataacaaacatcggactggttggcggtgctgcactggggacctctggtacgacctcttgctgttcgccctcgggttcctcccttaggacactcccgggcccagtggccagagtgtccacacttgaagcaacttttactgctcatgggtacggtgagatcttccggtgagcaggcccacaccccactgccacgggccccgaggctacctgcctaggatggcttagatggaaatggtcgcttttcctggcaggcctctgtgacgttaatgagctttgcacacggcctcaatggccacgtacatcacaaagcctttgggcttttttttttttttttttttttaagtttttttcaagagactggcctcgaactcagaaatccgcctgcctctgcctcttgagtgctgggattaaaggcgtgtgccaccatgccccacacttttctattttattttaatttagtttactttaggttggtttagttttagttttcccagacatcccgatatcatctcaccacctactccagcctcgtcttgaactcaagattcttttccctgggcatcatgagtgctagggctacatatatgtactgttacacacgcctaccttttttggggttggttttcaacacttgagttactaaatttggggatgaatctctttctgttcaggaattctgacctgtagaatatttcctaattcagttagtccctttagatgtggtggcacaggcctgtagtcccagactcaggaggcctacactacagtaacattgggtacgtaacaagaaaacttgattacttcctaaatcacaaagaaatccctttgcatatttgttatgttagcttaattcactaatttgaggcagggtcttgctgtgcagccctgtactacctgagactcacagtttaacacactctattgttagtttattgctgcaaacttaacttgcctgttttgtggaaatgagggcttttcaaatagcctagcttgccttcaagtaattgagaatgaacttctgatccttctgcctctacctccaatactactagtgtactaggactacacgaatgggctgccatgcctgacttgccatcttaactttcaacagaaaagcactatttaggttaggaaagaacaaaatgggggaagggaggaggggacaggggatttttggaggggaaactaggaaatgatgggataacatttgaaatgtaaataaagaaaatacctaattttaaaaagaaaagaattttaaataaataaatttaatttttttaaaaaaagagcaaaattgtagcattcaatataaaaccaatgttattgcttggaaaatatatgcaattaaaaggagttgggatatagctcacctatttgtttaggccatgggtttgatcccaaccaaaacaaaatataaatgcaatcagatattggatttcttgtctcataggtgtattccctactgtttataccttatatatgtacatgtacatttaaacaaatacaaaagtattagggctaagaaaatagcagtcttttaatttttctcttttctggtttgatttaaaaaaaaaaagatttacaccaaaagaatgtatcagaccccattacagatggttggaagccaccatgtagttactgggaattgaactcaggacctctggaagagcagtcagtactcttaacctctaagccatctcaccagcatgcttggttggtttttcagtcagggtttcatgaaggcgaaggtggcctttacctttattctctcactgctgcctcccagtgctgggctataggcatgcaataccacactcaactttaggtgaatgtgtatgtatgtgtctgtgacactggaggcctaactaggtcttacacatgttaggaaagcactccactagtgggctatatccccagcctgatagtctgtctcctttctttattttaatggtgttatactagagtatgcagctagggctaggtttaaatgattttactgccccagcctctccaaaggctagaattcatggcaatctaacctcttgaccttctttattgtatgtatgtatacatgtgtgtatgcatgcaagcatgtgtaataaataatatctgatggttcattttcaaaataactcctcaagacagtcagctttggtagaactagagaggaagaggaaacactgggcccctacattggagcctgcttaagttaactaccctcccccaatttctgctagtctaagcaccagcttcccaactaaaactttagagtgcaagtgcttgctgacaagagcctgatatggttgtctcttgagaggctctgccagagtctgacaagtacagaggagggtgcttgcagccaatcactggactaagcatagggtccccagtggaggagttagagaaaggactgaagaagctgaaggggttggaaccccataggaagaacagcaatatgaaccaaccagactccccacggctcccagggactaaatcaccaaccaaggagtccacgtggagggacccatgtctctagctccatatgtagcagaggatggccttgttgggcatcaatgggagaagaggcccttggtcctgtgaaggctggatgccccagtgtagcggaatgctagggcagggaggtgggagtgggtgaatgggtggaggagcaccctcatagaaagaaacaggaggaggagggatgggatagagtgtttcgggggggaatcatatttcctgggagaaaatcatatttcctggggaaatatctaataaaaaagaaaaaaagaaaaaagaaaagcataaaagttttgtttccaactttttaaggttttcagtatatactttttaaaatttatttctttattataggtaagtacactctagctgtcttcagacaccccagaagaggacatcagatctcattatggatggttgtgagccaccatgtggttgctgggatttgaactcaggaccttcggaagtacagtcagtgctcttacccactaaaccatctctccagccccagtatatacttttaagaaattatccttccttccttccttccttccttccttccttccttccttccttccttccttccttccttccttccttctttcctctctctctctccctctctctcgctctctctcgctctttctttctttctttctttctttctttctttctttctttctttctttctttctttctttctttctggtgaaggggatcaaatgcaagaccttgtgtatgataaacaaatgttttatcactgagctacatccctaaccccagcaaatttatttaaattataatttgtgtgtatatatgtgcatacaggtgtgtgtgtgtgtgtgtgtgtgtgtgtgtgtggttacgtgtattcatgtgtggatgtgtgtgcgtgtgtgtgtgtctgtgtctgtgtctatgtatgtgtctgtgtatgctgtgtgcagaggccagactttgactttagatgtcaaaacaacatcttttcacttcattctttttatttttttcaaacagtgccactcaatgaacctaaagctcgttgaatctacttgtcttaggctcagtcctctgccagccggggatcccaggcattctcctcggggcctccttggcttggctttctttctttctagcaaataggtttctttgggacttttttggtaaattaatggttccaagtgctataatcaattcctttgaataggagacaataaccaagtcaaaagaacaaacgcttgttaattatcagaaaagtttacggccatctggtgtgctgatagagcacagagaataatttttataactaactcaacaaactccttccactcttctcaggctaagtcattaggcaggtccaatcttacatgtcatgtaggtcttacatgtcatgcagctctctactgctgacatttgtcttctctcaacaacaacaacaaaaaacatgaataggttcatctctgttttatatcctgactattttcaagtttatcaggcaagcctagctgttagtaatttgtactctaaagttgtcgttttttaatgnnnnnnnnnnnnnnnnnnnnnnnnnnnnnnnnnnnnnnnnnnnnnnnnnnnnnnnnnnnnnnnnnnnnnnnnnnnnnnnnnnnnnnnnnnnnnnnnnnnnnnnnnnnnnnnnnnnnnnnnnnnnnnnnnnnnnnnnnnnnnnnnnnnnnnnnnnnnnnnnnnnnnnnnnnnnnnnnnnnnnnnnnnnnnnnnnnnnnnnnnnnnnnnnnnnntcttattgtgtagccctggctatcctggaactcactctgtagaccaggctggcctaaactcacagagatcatgtgcctctgcctcctgagtgctgggattgaaggcactgcacattgcttcctttttttttttttttttttttttgaaataggatttcattctatagctcaggctggcatgaaatttactatgcagcctaagttgacttcaaatcattgatcctgccaggcagtgatggcgcatgcctttaatcccagcacttggtaggtagaggcaggcagatttctgagttcgaggccagcctggtctactgagtgagtctgagtcccaggacagccagggctatacagtgaaaccctgtctcagaaaaaaaatatcattgatccttcggcctcatttcccaagtgctgggattacaggatcacaaacacaaaaccactgaacttaggtgctatatcccctgccccaaagctgttttttgtgtctgtctgtctttctttctttctttctttctttctttctttctttctttctttctttctttctttcttccttccttccttccttccttccttccttccttccttcctttcttcctttctttctttctttctttctttctttctttctttctttctttctttctttctttctttctttctttctttcttcctgtctatgtctgtctttttctttctttcttagatttatttatctattatatataagtacactgtaactgtcttcagacacactagtagagggtgtcagatctcattacagatggggttgtgagccaccatgtggttgctggaaattgaactcaggacctctggaagagcaatcagtactcttaagtgctgagccatctctccagtctctctctctctctctgtctctctctgtctctgtttctctgtctttctatggtcagggtgttatatatcccaggtttgccttgaactttctatgtagctgaagatgaccttgtatttgatcattctctctatttcttgaatgctgacattacaggtgtgtttaagtagtactgggcatctgaagccagagctatgtccaggaaaatactctcccaactgagccacatcctcaaaccctaaactacaattgttcctatctcttataattaaaaatatcagagaaattaaattctaggaaagagatatcttggaaatttagagatgatttctaacatttctatttatgtttacagtttgtcagatgaacaaatatgttgtttcccctggtggcaatcaagaaaaactctcttacatggaatcttcagatggaactaagcttgttttacaagaaaaattgtttgaactttattttgttttttgtttttaaagatctatttacttttacttatataagtacactgaactgtcttcagacacacaccagaagaatgcatcagagtcctttacagatggttgtgagtcaccaagtggttgctgggaattgaactcaggacctctggaagagcagtcagtgcttttgacgtctgagccatctctccagacctagtttggagcttgtaagtacagcctgttaattctgcatgagtacaactttgttcgagatgtgagctaacacttttgtagtgaactccaggtaaacttagcttaaaggcttctttcattgctcaaattgggctgaaaagagcttttccatcacactcccttccccctcaaagaaaaagctctttcagaaaccagggagggaattgtcaaagtggggatgtcttactaaagctgaaacatcagaggggttttttatgcatgttacctatatgtccattaggtgtcgcaatatatccaatggccctgccttctacttctattctgctcatgatattgtttcagatgcaggcatgggactgcttttccttttctcctcctcctcctcctcctcgacctccttcccttcttcctcctccttttttcttctttgtcttcctcctcccctcccccactcttttttacttgtatggttctggtgctttgatgctctacatgaaaattcacaattcaatgcaatgatagatagacaggcaggagccagtcggatgatctctcaagatccagggctgaataagaagggggagtggatcttaaggagacccttaaaactcaagattctccacaggaaacaacatgctgagagtgaaaatagcctgccccaagagttctggttccaggtattagaaaaagactttttcttcaggctttgtaacttgggcccacaattaaatctacatacgtatatttccattcccccaaccccccggatcggtggaggctatttttttttccttcaggatcttttgtggtccaagctgacctagaatttgtcatggaggtgaggttgtctataaatcgctggaattacaggcacttatcaccatgccagtggttggttggttggtttgttagtttgtttgttttcgaaacacttggaatattgggtacatcaggaaatatgagggggcctagcagagctccagagaagcagagaaggtcaagaattgtagggtgagccagaaagggaataataacagtagtgagatgtgatggtaaattaaaaaggatggggacttattgattagaaaaggggctgaggaaaggatgggtggtggacgccggtatgagcagaggtaggaaaagaagtgtgggctagggacctgagtactggactcagtgggctgctgtaagttgtagaggggcgctctgaggagagggaggagcgcggcgcatgcgttgcagcacagcgcagcgctcctggagaggctgtgggttcgtggcatccgcgccgcggccgcaagtatagcaggtttcgtacctggtgttcatcgccgttaagtcatcgctgctgccacccaggcacggctctctatgccgccgctccctccaccctctaggcactgcctgccgtaagaattttaactgcgacactcgcttcagcaggaggtaaaggaacgacgaaggacgaaaatgtaacatggagggcggaggagggaacttgtgtcagggagatccttaatttgtgcattttctcctttgaggggagggagaactggaggccagtacgaatccccagccctccaaaaggatgttgcgcattacttaatattatgaaagatttttagacttctctaagcaggtttaaggcacctgagcatcactgttttgtttgacatctatttaaaacaaaacaaaaaaaactttcgagttcttcatttgttaagggtgaatcaaatggatgagtctttaggattaggcttcatccgctttttgttttccttgggggtgagtgaatgtagtttgagactgacagcagcaggcctcgaactcgcggccgttctcctgcttaaactgggattacaggcgtaaatcaccacgccggactctgattcagtggttttaggttggagggtttttaactgtattaaggaatccgtctaccaagtagcctctcccttaggctgctgacggattccatctgggtttgggatatgctttatcgcctacgacgtttttttaattccatgtgtaacttagtttatcacagttaatcctgttaaggattgttgttaatgatatggtttagacactggggcataactttggcgagaaacacgtgcagatgcacccggcatgaatatatatacatatatatgcgcatatatgtatatatattcttcacagagttatctcaccagagtagcagaacgcagtggccacagagattatatatataatatatataatatatatatatacacatatacgtatatatattatatatataatcatacacgagaagggagaatagtaaagataggcgcgctttgcgtggatgccaaaagaggaaccatatcaccaggtggtggcgctcaagtacccttgagaaagcgtgacatgatgggtaggactctgctggcacgggagatcgtggccccttaggcgagggtggggcagagaggagagaaggtgaaatcacgcatgctcactgcaagcagaaggcctctgcgcgggaatgaaagtgcgcatgcgtaagagggagcatgttggccgtttaacactaggtatcgagaactgcgcgtgcgtgttgccagtggcttggctgggagggagggagggagacgcggaacgttctggtaattatgattgcgaaatagcgaggggttcggtaagttgtccttcgctcaaatcgccattttagtctgggagtacacttagagaggcagttctaccattctagttgttgaagagattagtctgagtggagggtgtgaccaaacccactggaaaagaaaaaatcattccagaatcttagtctctccctggtcagtctgataatgggattttaaaatacagaggcaatagtgaggctgcgaaagattgcttccgcagcatgttgcgcttctagtccaaccacattcagacaaagcctatgcaaaagatcctggccgagcttggctctccgcagactcatatcaccagagtagcagaacgttgtgaccacagcgaagtgcgttaaaaacccttgggtttttctcccctacagaacatagggcagaggatttcactgtgtttctaagtgcttctacattggttgaaacctaagatctgagcaaaccacctcctgaaactctgatatgcagagtcatgtcattgtcattaccctgaaaagtaaaggcagtggtgataggaaagtgtcccggggcttacgtcttcccctccaccccaaacacacacacctttctcttctgtggaactttctgcatcatttggtctgaggtagaagtgggagattggaggttggttgtttgcttttctttggctgcagaactgttgtgcctttgaggattgctagtgaaaatctatagtagttaattgcttaaaactagtaatttagcatttagatataggaaagggtacagaagtttaaaatgtcttttctattctgccaatcttttgctgttacagtttcattctctgggcccgtttatcaactaattcatatacaggtctatagtacttactatcacaagagaccagcataaaggttttacataatgcgctaacattaacttatttcgtagcccccacaatcctatggactagataaactattactcattttattaaaaatgagaactttgagaacacattaatttgtctaaggttttatagcccattggatgggcaaggtatttctccaggttttattgctgcataattctgtgttcttagacatgccttatcccttatattgaagggacacagttaagagttctttcaatttttgtctgaaaccataaaccttaaggaaagcattaagaaaagagacagttgtctgttttttaccccagtgcatagtatttggttacccaaatggaagagaacagtgcattgttgctgtggaacccgtgggggtggctctccttaatgttcagttgtcttctgtattttttgttctgcagagggtataaaatggccgactgcaagatgctggacacacttctttttttttaatattttttattacatattttcctcaattacatttccaatgctatcccaannnnnnnnnnnnnnnnnnnnnnnnnnnnnnnnnnnnnnnnnnnnnnnnnnnnnnnnnnnnnnnnnnnnnnnnnnnnnnnnnnnnnnnnnnnnnnnnnnnnnnnnnnnnnnnnnnnnnnnnnnnnnnnnnnnnnnnnnnnnnnnnnnnnnnnnnnnnnnnnnnnnnnnnnnnnnnnnnnnnnnnnnnnnnnnnnnnnnnnnnnnnnnnnnnnnnnnnnnnnnnnnnnnnnnnnnnnnnnnnnnnnnnnnnnnnnnnnnnnnnnnnnnnnnnnnnnnnnnnnnnnnnnnnnnnnnnnnnnnnnnnnnnnnnnnnnnnnnnnnnnnnnnnnnnnnnnnnnnnnnnnnnnnnnnnnnnnnnnnnnnnnnnnnnnnnnnnnnnnnnnnnnnnnnnnnnnnnnnnnnnnnnnnnnnnnnnnnnnnnnnnnnnnnnnnnnnnnnnnnnnnnnnnnnnnnnnnnnnnnnnnnnnnnnnnnnnnnnnnnnnnnnnnnnnnnnnnnnnnnnnnnnnnnnnnnnnnnnnnnnnnnnnnnnnnnnnnnnnnnnnnnnnnnnnnnnnnnnnnnnnnnnnnnnnnnnnnnnnnnnnnnnnnnnnnnnnnnnnnnnnnnnnnnnnnnnnnnnnngggaaatatagatttgataccatgtggtcagatttttttttcttccattcttcacatttgaataggtctccaaacacactaaatactcactgtggctttgtctgtggataaccattcagaggaaaaagctaatatcacccagagacagtgttaactagattgttcactagttttctctctttttgtgttcttctgtatagttgatatagttcatgttatattttctgtttaacattatgtgtatatttccacatttgtcattcaatggtttcatatgtgttaagtattttatgcagttttttagtaaattatttaatcaaaatctttttgtttttattcgatttttgtttcttttttaaaagatttatttattattatacataagtacactgtagttgtcttcagacgtaccagaagaaggcatcagatctcattataaatggttgtgagccaccatgtggttgctgggatttgaactcaagaccttcggaagagcagtcggtgctcttacccactgagccatctcaccagccctctgtttctttttttttttttttttccattttttattaggtatttaactcatttacatttccaatgctataccaaaagtcccccatatccacccacccccactcccctgcccacccactccccctttttggccctggtattcccctgtactggggcatacctctgtttctttttaaaaaaaaaaaacttattattattccagggataggggcatatgtgccatgttgtgtggcggtcagatgtcaactttgaggttggtgtcttatgtcattatgtgggtttcaggaactgaactcgggttggtcactaggcatgtgtggcaggcttcttggcctactgtttgccctgatttgttgttgttgttgttgttgttgtttttctctttcttcatcaaggtccagaaatagaactactcattaaagattgcaatgaatattggtcgtaattgctttccagaaaattatgtcattctttgcacctagtcatttaagtacttaatttttttctcacttaatatgcaaaagaatgatatgtaaaaattattttgaaaaacaatgtatgtattttgtttggagaccgggtcttacatatactgggctggcatcaggatgatataaactgctgatctccacgccttcctccttcattacaaatgtataccactagttcctgttcttgttttaaaatgaaataatgagctcataggtaatgtaggtccccaaacccgggtttcagtgtatatactgccagtatatattattgtatatattattgtcatttgttggaaccagcctagagcttttagctcagtagctaaagcctgaccacttgagttcaaacccagatccacagggttggattagagccaactcctgaaattctcatctccatgtgcacctgcctatatgcacataaataaattcaacaatgataataaaaaccctaggccgtcttacttcaaatgtgaagggtgggaagacagctagctcaattggtagagcacttacttgcctagtctgaacaaagctatcggtttgatccccagcacagcataaaatcagctatggtacgcatgtttgcaatcccatcactcgggaagaaaacataaggaccgtgcttagctacctaattcaagtctaacctgaagtgcatgaaaaccccttccttaaaagaaaaagtgttaaaaccaagcatggtggcgcatgcctatataatcctagcactctctagagaacgaggccagaggattgctgtgagttggctacacagcaaaatcttgtctcataaaaacaatttaaaaaacccaccttccaaaacaaaacaaaacaaaacaaaaaaccctatggaacaaccatggaacgttttttgtttgtttctgaataacaaatttactacaaaagatttgctgtttcaggcaagttgtccagaatcattaccagatttttgtttttgaagggaggactctacacttgacagtaaggcctgtggtgtttaatgttccagtttgagttcagtcacacttgcttatatcttcaatattcactacttagagctgccgggagagagagaatgttgtaaagaactggtgaaatgcttttaaaacatacaactagagcaccggaaagtgaagaaaggaggtcaagcaattaagaagtaccccccctcaaaacaacaaaaaaaatcccaaagcggaaaaacccatcattcctgagaactgcctttattgacaatgttttaccattaaaccacgatagggaaagttagtaaaaatcaataaaagcagagagccattgctttaaaagtcgtgcaaaaatctagatgatacatcttttactgatggatgctcagggttaggagcattttttaaaaagtcgtgcagaactatgggtgtgcaatactaggcactgctgatctttcaaaatgcttaaacattatcctcaacttgtctacattaaaatatacaaatttagtcaggaaatacatgtcagatgctgccactagttattctggatcttttcaagtttaaaggcccttcccggaagatggaattcggagggtcagtactgaccacgtgaaagtaacgctttgttctctggcatccctcnnnnnnnnnnnnnnnnnnnnnnnnnnnnnnnnnnnnnnnnnnnnnnnnnnnnnnnnnnnnnnnnnnnnnnnnnnnnnnnnnnnnnnnnnnnnnnnnnnnnnnnnnnnnnnnnnnnnnnnnnnnnnnnnnnnnnnnnnnnnnnnnnnnnnnnnnnnnnnnnnnnnnnnnnnnnnnnnnnnnnnnnnnnnnnnnnnnnnnnnnnnnnnnnnnnnnnnnnnnnnnnnnnnnnnnnnnnnnnnnnnnnnnnnnnnnnnnnnnnnnnnnnnnnnnnnnnnnnnnnnnnnnnnnnnnnnnnnnnnnnnnnnnnnnnnnnnnnnnnnnnnnnnnnnnnnnnnnnnnnnnnnnnnnnnnnnnnnnnnnnnnnnnnnnnnnnnnnnnnnnnnnnnnnnnnnnnnnnnnnnnnnnnnnnnnnnnnnnnnnnnnnnnnnnnnnnnnnnnnnnnnnnnnnnnnnnnnnnnnnnnnnnnnnnnnnnnnnnnnnnnnnnnnnnnnnnnnnnnnnnnnnnnnnnnnnnnnnnnnnnnnnnnnnnnnnnnnnnnnnnnnnnnnnnnnnnnnnnnnnnnnnnnnnnnnnnnnnnnnnnnnnnnnnnnnnnnnnnnnnnnnnnnnnnnnnnnnnnnnnnnnnnnnnnnnnnnnnnnnnnnnnnnnnnnnnnnnnnnnnnnnnnnnnnnnnnnnnnnnnnnnnnnnnnnnnnnnnnnnnnnnnnnnnnnnnnnccccccccccccccgccctccgcccgccgcgtccgccgcctgaaggaagcttcttttcccgcgcctcgcgcgctagcgcgggtggcagagaaggaagtgacgcaccggggtaaggccgggactcggagcggggtggggggggagttgggggggtctcccggagctggggtgctccttgcagcacatgctgctgaagctgtgccagatgttgggactcacaaataaatttttacagtggtaatctctccttaaagagactattactgttgcccagttttgaaacgggagtgaaaatgtgttgcttgcttgctttattctggtttttaaaatacaaactaatcagatgttctcagactttgtgggaagggtggccagtattctttaattactgaaactagttgctcctgatccatatacgctttgtttagttaggcttactagatacagtggtctaacttatttttattccatatgttgtatgtttcatctattgcatttcttagtctttctccctgtgcgtgcgaattacgtctgtccgtccgtgtgtgtgtgtctttattttagcatgaccattgaatgtctggtcctactttacgtccgtgtgtgtgtgtgtgtgtgcgcgcgcgtgcgcgcgcatgtgtgtatgtgttatatgcgcgttatcttacgtattttagcatgaccattgaatgtctggttgtctggtcctactgcctccacttctctggtgctggtggcattgctacgtttgtttttgtttttatttttacatatttctgaaacagtctcacttaacgtggctcaggctggtctgatgctccctatttaatgctggcttgccagttgtagggatcgttctgcctcagagtcccacgtactaggattatagacctagcaaatggaactttttaaaaatcagagtaggctgtagatctgggggtatgaagttgccgagggagtttaactgctttcaactacatcgttacgctgactttaacctagttggttgcaacctcttatttttcagtatttttctagctgtagatagtattaaattggacttgtatgtagtgggttggatatactgagatattagggtggggtcatgctttacagaaaattgatggaaaacattctttttggagctctgtgcttgtcttaagcattctaccccatgccagcagctgcttcttcaatataagtaggatccggaattaggggaaatttggaatagtttgaaatgtctcctcctccattaaagcatttaaccctttatatccctccccacccccatctccagttgttacagcccgggaagaaattttacatcagccagtataatacaacctgtatttagtcagactgtattctgtctgggtacatagctggtttgctatgagggcaggggaagtttccttttcaaagctcattctggcatattagtaggcctccgtaaatctttatcggatgaataataattagtccatcagcaagcatctgtgtgcttggtaaagtcacctctacaggttctttttctgttttgttttggttggttggttttggtttttggtttttttcgcctctacaggagggtcttgaccatgttattgaaaatggtcagacactttctatttctctctagttaattattttatcggggattttcaagagacagttctggttttgtgtctgcatctctggccttggtatttgcacatttccattgttggaacggctgacatttactttcttttttaaaactcttttttcacagattttattggctgcagacacacgcagcatcttcttgcgctcctccttgaggtggatgggcagctagctggagatgacacaggatgatgcgcatctttcgcacgctggctccaagatctccgctgccaggtacaagggcgcccccgtgcccttgcgctcttcatagtgggcccatgcatatcaatcagtgaacgcagtcaatggggaaacttccttcttgcgagggaactgcaggcccgcgcaccatgagcacaactaggccttggcgtgcacctgcccaccctgcttgcctcgcccggacatgctccactgcgcctgaagctcccacgggctcgtgccgcacgccagacatttattttcatgatggagcctggatgctagattttaactcagcctcacggcccagtgtttgccaaatggctctttttttcttgttttcatttctcattcaacctatgccaccgccaccgttactggagccaccctttaaatatataaagccatgtagccccggggacccctatttttgttactacttttgtgtcatacagtcatactcgttccttaacatttttggctccgactgctttggcaaagcttttgcattcacccacttcgttcaccagggatcctttgaccatttagaaacgcattaagcagcatatggtaatcgcagcacgggaaagttgaggctggaggatcagcatgggtttgaagctagcctgggatacaggagtaaatccctccatccacacccttccgccccccccacccccccatccaaaaggagaaagaaagaaactccttattacttttgcaagggttttgtttgtatgtttgttttttgttattgctgttgttgatttttttcagacagggtttctctgtgtagccttggctgttctggaactctctcttcagatcagaccttcgggctactgatgcaatgtagtacttcctgaacattaactgaacagtttaccaactcctctgctatcattccccgctcccttttaaaaaaagaatttccacttctgagctagtgtctgctgtaggccagtctgcctttgaaccaaactcccgattctcctgtctcagccttcagagtgctgggattgcaggcatgggcactgtacctggcaattaattactactaattttgttttttaacctttatttttatgtgtattggtgttttgcctataggggtgtgtgtaccatgttcgtgaggtgcccgatgacaccaggaagtgtactggaatcccctggaactggagttagagtaggttgtgagccaccatgtgggtgctggtaagagcagccactgctcctaactgccaaagccatctctccagctcctaactttgatttttatttatttatttttttactttgttatgttttgttttgtgataaactttctcagtgtagctcgggctgttctggaacttgctctgtagaccaggctggtcccactacctgtctgcctctaactttttttaatgcactcatttcattttaaatcaagtcaacatgtattagcagttgcatgttttagaaatggttgtggagaatggggtcagggttgtaatgaaaacaaaacaaaacaaaaaaaccaaaacctagttgtttttgtgcttctttctttttttttttttttttttttttttnnnnnnnnnnnnnnnnnnnnnnnnnnnnnnnnnnnnnnnnnnnnnnnnnnnnnnnnnnnnnnnnnnnnnnnnnnnnnnnnnnnnnnnnnnnnnnnnnnnnnnnnnnnnnnnnnnnnnnnnnnnnnnnnnnnnnnnnnnnnnnnnnnnnnnnnnnnnnnnnnnnnnnnnnnnnnnnnnnnnnnnnnnnnnnnnnnnnnnnnnnnnnnnnnnnnnnnnnnnnnnnnnnnnnnnnnnnnnnnnnnnnnnnnnnnnnnnnnnnnnnnnnnnnnnnnnnnnnnnnnnnnnnnnnnnnnnnnnnnnnnnnnnnnnnnnnnnnnnnnnnnnnnnnnnnnnnnnnnnnnnnnnnnnnnnnnnnnnnnnnnnnnnnnnnnnnnnnnnnnnnnnnnnnnnnnnnnnnnnnnnnnnnnnnnnnnnnnnnnnnnnnnnnnnnnnnnnnnnnnnnnnnnnnnnnnnnnnnnnnnnnnnnnnnnnnnnnnnnnnnnnnnnnnnnnnnnnnnnnnnnnnnnnnnnnnnnnnnnnnnnnnnnnnnnnnnnnnnnnnnnnnnnnnnnnnnnnnnnnnnnnnnnnnnnnnnnnnnnnnnnnnnnnnnnnnnnnnnnnnnnnnnnnnnnnnnnnnnnnnnnnnnnnnnnnnnnnnnnnnnnnnnnnnnnnnnnnnnnnnnnnnnnnnnnnnnnnnnnnnnnnnnnnnnnnnnnnnnnnnnnnnnnnnnnnnnnnnnnnnnnnnnnnnnnnnnnnnnnnnnnnnnnnnnnnnnnnnnnnnnnnnnnnnnnnnnnnnnnnnnnnnnnnnnnnnnnnnnnnnnnnnnnnnnnnnnnnnnnnnnnnnnnnnnnnnnnnnnnnnnnnnnnnnnnnnnnnnnnnnnnnnnnnnnnnnnnnnnnnnnnnnnnnnnnnnnnnnnnnnnnnnnnnnnnnnnnnnnnnnnnnnnnnnnnnnnnnnnnnnnnnnnnnnnnnnnnnnnnnnnnnnnnnnnnnnnnnnnnnnnnnnnnnnnnnnnnnnnnnnnnnnnnnnnnnnnnnnnnnnnnnnnnnnnnnnnnnnnnnnnnnnnnnnnnnnnnnnnnnnnnnnnnnnnnnnnnnnnnnnnnnnnnttgtgattcattttactacactgaaaataaaatgaaagaaagtgaaatgaaataaaaccaactctgcctcagggtacagtccaaggtctgctctcaccaaagcaagcattaaaaacaacaaaaccccaccctaatggggcttagagcgaagatctgggccagggttataaaggcttgctcagtcttgttccctgaaccgaaagaaacccaaaatggaggttactttagtgatgagctctttctggaggtgaaaaggtgggacggaccttacagatttatttttcaaactattttcaagtacccatgtagaattcctcattcctagatttgtaggggacattttactgtatttgctttatcttattcattcctgattgttgggcttttttttttaaagttcattttcatttcatttgtatctgatttatcagggtgcagaaaaacagcttcttttttatttttttctcatatattttccatgatgagatgaatattaattagcacagcctacctaaatacaaccatttagcttttgaaagcatggcttctgctcattgtttgctgaaaatcataagaggaagggaagctgtaaagccaggcttagtactctaggcaggccccatcccagtctgcctcaagtactttgtgctggctaagtgtctacaacaaaaggaaaagttgaaataccaaagaaggtagaattagcattagcataactttgaattccagtgatcaggactttacattcacaatgcttgtagttttcctttagtcaattggataaattagaaaagaggacaaaatcccactgtggcatctttactcccatgtagggagtcgctgtggggtgtaagcagaatggcttgcggttacacagagaagcccaggttgaaaaacaacaaacagccaggcaatcccagcacttgggaggcagaggcaggcggatttctgagcttgaggccagcccagtctacagagtgagttctaggacagccagggctacacagagaaaccctatctcaaaaaaaaaaaaaacaaaacaaaacaaaaataaaaacaaaaaacaaaaaaacacaaaaacaaagcccaagcaagatggctgtttatttttatcttgaactctggttgcctctgtgtttgttaccttaatttaagtgaaaaggcagaatccacatcatagtcccttttttttatttcccttagaaataaagatttatattcattgcagggtatatatgccaaagtatgtatttagggatatataaaaagttttaaggatgggcgtgttcacagatttgatagccgtaagtaatggaaaaatctgttcacgcgtaggaaattattaaataaaacttggtgtattcatgtacaatgacaaagctgctgaaaataaaaatattctcaatacccaggaggcagaggcaggtagatctgtagaagttcaagatcagtgtggtctatgtagcaagatccagactagccaaagactacattattgagatcctgtctcaaaaataaatgaatgaatgtagaagaaatctaaaagtaataaagctaatcttataagggatttgctgttagatttgcttaggagacatctaatcacaaaaagtagaattagcgaatggaggtccgcttttaaagctccacaaagatgcgtagttagaaggccggttaggatgctagatgtaaatgattgtttatccaccaggatagaccccctttaggcacattcacataaccaaaggagacaatcagggcttaaaaacagccattaagaccattcccagggaatattcctctagcaactccaagggggcagtacaggatcacaaccaaagttaacttctggcttgctataaagttcttgggatttctttttgtgggagcaggagcataattatgccagatagaaagatcaccctgggtaacaactatttgaaaagaacaatattgctgtgcttaaataattcgggctagcctgggcgtggtggcgcacacctttactcccannnnnnnnnnnnnnnnnnnngcagaggcaggcggatcttttgtagtttgaagccagcctgaacaaaacccaaaagaaggaaaacaaaccaaacaaacaaaaaccagaaaataattctggcactatcattgctttataaatttcccatttcagtggccagactaaatctccaggctctggttattgttaaaagtaatgagggctctgggacatcaaaaaggtttaaggcagatatacctttttcttttcaaggcctctcttctttgagcaagtggtattaaagagcttttcctttattaatctcaaagtatctgaagtgatctcttactgagtgagaaaagggtgttatttctataacaaaatcaattaaaagggcaatcaaagcatggtggcccgtgcctgtcatcctagcacctgggaaggggtggcaggataatctggagtggagtcgtcttcgctccgtagagtttaaggctaatctgggttacttaagaccatctcaaaacaaagaaaatgtctccgatgaatattgacttcgactacattatagtaatttaaggaaatgactacagaataataaacatagttgatgcaatttttatagaatcagagctcctatttgtacctatacatgaaagtagttaggaaaaatggactctatgtcgtggaccttttggatggctttggatttgcccattagcaatagacttgtgatctattttgtcttattttacaaggggttgagcaaggccttacacacattcagcatggcactctgacccagatcctcagataatactcccactgtgatgaggtcttattatgatttggtggtatggtactaggtatcttatcaactcagggccctgcactctgggggactcacgtatacatatttgtaggatgacgcagtatttaagactttagcatccttgcatctgacttaaggctctttctcttcaatgcagtgacttcaacagaagtggagtaaataaagatgatcacagaacttggaagctgacgaaattaattttggaaaagagctggcttggagcatgacagaagaattcgatggaaagaggttcgtggctttcagagaaaggcactgcccagtgggcaagtgtgggcattttacagcctaagtttatacttaacattcattgccctattaggtcatgaaacattctttctctcacccttggctctccagattaaacatggtattatcaggagtggcagcagctgcttgtggctacatagatcttgctcttgtgtttttgttttattaaggttttttttgttgttgttgttttgttgttgttgttgttttttgctttttgtttttgtttttcgagacagggtttctctgtgtagccctggctgtcctggaactcactttgtagaccaggctagcctcgaactcagaaatctacctgcctctgcctcccaagtgctgggattaaaggcgtgtgccaccacgcctggcaagatttatttattatatacgagtacacttttgctgtcttgacacatcagaagagggcatcgtatcctattacagatggttgtgagccaccatgtggtttcnnnnnnnnnnnnnnnnnnnnnnnnnnnnnnnnnnnnnnnnnnnnnnnnnnnnnnnnnnnnnnnnnnnnnnnnnnnnnnnnnnnnnnnnnnnnnnnnnnnnnnnnnnnnnnnnnnnnnnnnnnnnnnnnnnnnnnnnnnnnnnnnnnnnnnnnnnnnnnnnnnnnnnnnnnnnnnnnnnnnnnnnnnnnnnnnnnnnnnnnnnnnnnnnnnnnnnnnnnnnnnnnnnnnnnnnnnnnnnnnnnnnnnnnnnnnnnnnnnnnnnnnnctttcctctcaagaaaaaacaggaaactgagcagttttggctagtgctaccaataggtataacaggtttgggtcgctgctgaattgctggatttgagggttacttcttatgttaagcagctgaaatgctgtaaacatacagtacgatgccttcttagaaccatgggtatgattggggttctttctcctgtgacatctcaccttccaattattcaatcaactcagcgtcttggaggtaggatactagccattgctgataacagcagctgctgtttttcacttactatacaactgtcaaggtgatgaaattgtgaatggtagtgcttggtccagagcccagttttgtgaatcatatactgtctaatgataactaattgaagatttgggactctttttgttcctgagatacggttgcttaggctggccttcggactttcagtccttttgccttagccttctatgcaattaaaagtttatatataccattatgtgttctgttgtgctgtttttgtcacgaatatggatttatagaaagctcgccaaggagtcatatttgtctcccgttcaaagatagggctactgaagcctcagaggaaagattatagagctcacagacatttgacaggttggtgtagttactatgtacttctctacccagattaatttcttcttatctttttatagtgctgggagcccaactcaagactgatgtgtgcttggcaggcagtctacccccgatctcagtcctccagcctttcggccttttttcctttttggagacagaattgcatcatatggcatcctacacagtcctgcctcagtctctgcagtgctgggattgtaggcctatgccacctagcctttctacaatacaaacaaatatgaaaagaagagggacttctttggaaaggagtacagggactatggaagagatgaaaaggtaattggggaatatgatcaaaattactctacacgtgcatgaaaatatgaaaagatacaatttttaatgcaaaagtttggatgatgagaataaaaatacaggcctggaggggtggctcagtggttaagagcactgactgctctttcagaggtcctgagttcaaatcccatcaaccacatggtggtagctcaaccatttgtaatgggatcagatgccatcttctggtgtatctgaagacactgactgtactcatgcataaataaataattcttttttaaaaatatactgcttatagctataaatattagatttatgtatgtatttccttatgccagggagtaagtcaaggtttcagactacccttgaaacaagggaaggagggaagggagtaaaagtggggaatctttgatagatttagatgtctagatgccaaaggaggaaaaataaaactaacattgggtttcaaacttgactattccttgtcaatttgtttctttttcctctctacagataatattgtcagaaattatgccgcttttgaagagataaactgaactcttgattctgtgaggttattaaagaatattaattttcaaatcacggtaaaatcttggtaagtgactcagtgactctacttggcttgctcagttaatgagagcagaccagaaaggaggtcttaactaagcatcaaacaattactccacagttacccgttgtctggaaacacattgaaatagcttaccctccctttcctcatgttagacatttatagatggggaaattggaaattgtctagtggaagatagatttgattcaatctagaaatggtggtgtattctctgctaaaagatttttattaaagattttgtgtgtgtgtgtgtgtctgtattaggatctcaatatgtagtgcaggctggtctaagacatagcagtccttctgcctcagtctccctatccctggtaaaagcctgagctaccactcttggagtataacagattccaagatcatactttttctgatgatggtacttaaaatattatttgttacataacaaatcatctgggatgcttgttcaacatacagattgctgggaagttggaattttgtcatttgtggaatctgtcccttacttatactgaggttttctgcttagattcagcaacacatgaggataatcattgtgtccatggaaaccttgggaagcagttgaaagcctgggtaaggtgtcaatacttttgggtgaggtttctcattttgaaacaaaaggaaagtggttccatgtggcatttccatccttcttcaatagatagtatgtgcttacctgagattattttaggtgttaagaaagccctgcccatggggctggagagatggctcagcggttaagaccactggctgttctttcagaagtcctcagttcaattcccagcaacctcatagtagctcacaaccatctgtaagggatctgatgtcatcttctggcacacaagtatacatgcagacagagtactcatatacattaaataaataaataagtcttaaaaaaaagaaagaaaaagaaagccgtgcccttatgggactttcctttttgtgggttaaaaaagagagagagttatatactatatgtataatagagcatatatattaaattgagtttttccctttatgatttgaaaaattacattgaataaagttagccaaaacatagttagccaagcatagtggctcatgcctgtaatcccagtaggactgaagtaggaaggttaccagtgtgaggctatcatagtcgacatagcaatcttcctgtctcaaaacggcagcagcaggtgcctgagttaataatagaagcagtgtcttctggtttcctcgcttcctcctttctactgttttttctgtttattttttaaacttgacagtccctcttgcctggagcattaacacaacgtggctgcaaagttagtcctttcccgctaccatctcctgaatactgggactaactacacgtatgcacgaacctgcccatctttgcctctgttaacagctgccactgtctcttcacgacatgatggctgacctaggtgagtggaaaaatcataggtgtagggtatcttttcgttgcccctcttttggctagactccaaacggctttttttttcttgggtgctacacggggttttggacctactaaacaattcctctaccaatgaactgtatctctggctctagggaagatatttttgaaaaagggtttagcgtttgccagatcctatgcgtgagtgacctcaaaagagaagaggagggtacttctcaatgacaaagcagtaagtagagaaatacaggcctcactttttgttttagaagtgccgtttctaagcacaagtcagttgacacgacagatatcctcaaatggtttggggagatcatgtccttctcaacctgatcaacctgagggccagaagagctaaaatggctcctaaggaacggaagctgggcaccagaagctcctggtctgctttgctttggtttggttctgtgttgaggatgtacctagtgctcatcttggtgctctgccatcgagttataccaccagctcccaagctcctgcttgatatagaaggttttattgaaacatagtcattttcatttattactgtctgtggtcttttgtgctactgcctagctgagtgattgtaccagctatgtggcctgtagagcctggagtattaccatttggccttttgaggaagtttggccattgccagtgtaagttaactcctctccccattttatttctatggtacttgcctttacaacggatcctacaaattgaaatcagtttcttcctgcattgcttcccaggaaaattaagatcaagaatgtatattggagagccgggtgtgatggtgcacgcctttaatcccagcacttgggaggcagaggcaggcagatttctgagttcgaagccagcctggtcttcagagtgagttccaggacagccagggctacacagagaaaccctgtctccaaaaacaaaaacaaacaaaaaaagaatgtacattggagaggcgagagagatgactcagtggtttaagaacactggctctttcagaggtcctttgttccgttcccaccaaccacatgatgactaataacatttataaggggatctggttggtgtccttttctggcatgcagacatacatgattccacaacactgtatacaaaataaaataaggaaatcttttttttttaaaggggagaggggagtgtatatcgacagagcgggctatggttgtgccctcctgtgatctcagcttttggggactgacttctcgaagagtaggagaacaaggccagcctcagtcacatgagacccatctgaaaaaatacgaaagcattttcagactggatgtgaatacagaaagagctcttttatatgcctcatggagccaactaatttattctctatggctctcccctttctcttttcccctttctttgcatggatgccttttaaaatccagtttttgtttgtttgcttttggttttgagacagtgttatactgcatagccttagctggctggaacttgctctgtaaactgtctagtctcagagattcacctccgtcttgcctcctgagtgcccggattacaggtgtgtaccatcacacacagccttatctggctttttaaaaaattaagaaattactataacatgcgttcatgcacgtgtaatgtgataggtgagctttttattacttgatgccatttattgagcatctagtatgaaacttagacatgttctcttgtgaaattttgtcccaaaacctggaagagttgccattnnnnnnnnnnnnnnnnnnnnaaaaagatatatatgtttttcaaacatatataactttacccctgacgcactgctaataaggtttggattttctttttccttttttttttgtcacttgttttttaatccttcaatggtattgtgctgtgttgtccagactggtcttaaattcctgagttcaagttattgtggctttactcatagtaggactacatacagtgaacgcacaacactggaataatagaattggaatttttggtgttgttttgtttcttttgagagagggtttctttctagtcctgcctatctcagatctcactctgtagaacaggctggcattggattcatagagctctgcctatctatgcctcttgaagggtggaccaccatacccaagttaggattggatttttaagtgtcttttgaaagttgtttcctgctttgacatggggattctttggagatggctttctctctctctctcttcttttttttgggatgctgaggatggagccttgaggggggcactgtggctgtgacccccttccccgttttcttcatgagcagcactctaccttgttctctctgccatggtgatttcttttttgctgtaggttggaaggaacagagccagttggccatggactgaaacttttggaactgtgagtaaaaagaaacttgcccttcttttaagctgtttgtcgctggtattttgtcatagagacagtagttactcgccatagtctggtttctaattaggggtagaattagatgttaaaagcatcatgaaaattgtcattttctttcttctcttcacccccatgctgatttaacacagggcctctttgtaagcagcttgctcttatcactaatctatatatccacggccgctttcgcccttgcggttctagaaattgaacctagggtgccacacacatgctaggcaaacagtctgtcactgaacttagttcaaagtctactctaccaccccagaatggtcagatgtatgtacgtgtgcatgctttaccagtgagctatacccacagccctctcatttcctttaaaaaaaagttttaaattgttattttatgtgtatgagtattttgcctatattgatgtgtgtaccacatgcatggatagtagagtccagaagtgggaaaaagtccccaggaggaatggccagtattcttaaccactgagccatcttttcagcactcccaccccattctgctacactttttatttaagtatttgaagtttcacagtgtgctggagagatggttcagtgattaaaagccctgactgctcttccaaaggttctgagttcaagtcccagccaccacatgtggttacttataaccatctctaatgggatcagatgccctcttctggtgtgtctgaagacagctacagtgtactcatatacataaaataaataaatcaagaaggaggaggaggaagaagaaggcgacgaggaaaaagacgaagaacgtgttttgagacagggatcttggttaattgcccaggcttccaatgaattcactctatagcccaggcaaacttatacttttgtttttcctgcctcagcctcccagtagctggaattacaggcaattacaagcctttgtcaccatgcttgacatcttgacattttttattttcttgttgacactgctggcatgtggtcctagggaccttagggatactagacaagaagtctaccagtggacaccagccctattacattttaaaatcttagtgggtcagaacacataaggacctcagtttctgttctcaacacctacataaaaagctggctatggaaggtagagagatggctcagcagaataaaaaagtcttgctgctcttgcattggataagagttcggtcctaatgtccaggtcaagtttcctagaactccagctccaggggttccaatacgcttctagcctccatgaactcacacatacgtatacacataagagtaaaaccctagaaaacaaagcctggcatgaccatgagtgcatgtaaccccagggctgttgctgacagacatgaggaggcttgttgccactaagtctacctccaggttcagtaagagatcctatgtcacaagaataaagtacagagtaatggagtaggactagactcttagtcccctggcctctacatgaacattgccctgaatgcctatatgtataggtacgttacatacctgcatatatatgtatatgtagaaaaatataatattcagaaatccatagctgctaatgggaatcaggaatcaaaaagccaattttaatatgttcctatgtaagtacctttgttcttcccaggcatatcatactgtctgtctgtctatctgtaggaatgactatcccttcttcagactcactaagcaaaagagtgacctagtgatgtttcagctaacaccattcatagcagtttctcttctatagtaccttctgtcaagggcagctacgaacacactttcttcctctccttatcttttctctcttttcaaagacatttatttatctatctttatgtgcatgagtgttttgcttacatgtaggtatgtgtactgtgcatgtgcccgatttctatggaggttagaaaagaatgttaaatcccctgaaacgacttgcagacagttataagcaggcattgaacctaggttctcaggaaaagcaataagtgcctttaacagctgaaccaatcctccaggtccctgtcctaatcttttgaagacagggaacagcttttggtttttggtttggtttggtttggttttttatttgtttgtttttcaagacagcgtttttctgtgtagccctagctgtcctggaactcactctgtagaccaggctggcctcaaactcagaaatctgcctgcctctgcctcccaagtgctgggattaaaggagtgtgccaccactgcctggctttttaattttcttgccttagatctttttttaagnnnnnnnnnnnnnnnnnnnnnnnnnnnnnnnnnnnnnnnnnnnnnnnnnnnnnnnnnnnnnnnnnnnnnnnnnnnnnnnnnnnnnnnnnnnnnnnnnnnnnnnnnnnnnnnnnnnnnnnnnnnnnnncagtcagtgtttttactcactaagccatctgagatgccagcccccagggaacagctttaggtagtaataagcatggagaaacagaagagattaggaacttcccccaaaccctattttctgttttgttttaatagctattaactattagctattaggtattattttaatagctaatagtattaggatgactgggattcaattgtaggaaatgttgaaaattctgttcacattttagatttttccccccattggttaaccttgaatcattagcctgaaacaatcctactgctttggtcttccggttaattgggtctacaagtacatgcctctgacagtttgtacgtgaggtgagagtaactttcagacaagaactaatagtcataattggctaggtatcgtggcacatgcctttagaccttgtaccgaattgcagaggcaggtggtgctgtgaatttgagcctggtttacatagcaatttccaggccagccggagagccaaagtgagaccttgtcttaaaaatagccatggggagaggaagttttagcaaaagtatgccagtgtgaggttagaagccattctgcccttgcagtccatgagactattttctcgttagccagatcttaaaattcagtggcctcccctaggagggatcagtgggtaaaggtgctggtcactcaacaagctgacaagctgggttcaagcccctgaaagctagccaactcccacaagtcgtcttttgccgtctacctgcactgcagcacagggaacacccgcatatacaagaaaaatatcattgaaaaatgtggaagagtagcctcctatcaaggccattgtgccagccttgtaaaagaagaatgcctcactagattaagaaaaccatggcactgcaagaatttccaagactagttggtggttttgagattatttttttttaaagttagctttctgagtctttgtacaacttttcatttgtgtgtttgttttgtagcctgattagaaatagggtttcactgttgatgagactggcctcaaacttacctacattgcctcagcctcttaaatagaaaatgattctttctttttaaatcctctcgttttaccccatctccagaattgagtttccctcattgtttttattgtttgtttgtttttgtttttgttttttgttttgcttttttgagacagggtttctctgcataactctggctgtcctggaactcactctatagaccaggctggtttcgaactcagaaatctgcctgcctctgcctcccgagtgttgggattaaaggcatgtgccaccactgcccagcgaggttccctcattgttatgttttctgtgtgcaggtatatagatgtctgtctgtgtgtccatgtgcgcaaacggaggtcagaggtcaatctggactgtcgtctttgccttcttccttgtttgagaccagatctctgttttatatactactgtatacaccaagctagctgacccttcagcttccagggattcttgtgtctcagcctccgtcttttcatagagggcactggtatacagacagatgtgcacagtttttacttgggtctcttactttacagactcaggtgctcctgcttgcctagcaagtgcggttaccccctaagccctgtttctgcctcagctttctaagtgttgggattattggtttgagccaccatgccaggcttatatagctttccttaaattgttttttaaagaattattttatgtatatgagtacattgtagctgtcttgagacacaccagaagagggcatcagatctcattacagatagttgtaaaccactatgtggttgctgggaattgaactcaggacctctggaagagaaatcagtgctcttaacttatgctgagccatctttccagcccctcatcttgattaacatcagggataatactcaacgttggaaatcttcaactaatagagtacagtcgggggcttgttataaggcaagtctaggatccatagaagtagatcttgcttcaagaaaatgtaataagatgagagtccttgcattctttgggatcctcccctttatggtttctttgagacatgatctagttatataatgtagtcgcactaacattgagataaaaaagagagtcccctttcttatttttagttttttatttttcattatttaagtcttttattctccccaaagaactcaaattgtacttttaattgggatcttgtttctggagctaggtaactgaggtctcactcgtcagcctgctgcatggttcccttcccagacacatagatgccatccaaaaacttcctgatatccttgtttttaactgctgtggcttgctgaatcagagggactgaatttgaaacaagttcaatatcatttccttcaaggattaactcatctttctgggcttgagagacagaacaagtaacacttgtcctcatccgaacccttcggatggattttctacccaagaaattttggatttcaaccaaagacccattttcttggataacaacgttgatggggaagtgagcatacacagacctcatcttgtaacggaagcccagtgtgacatggcccttgatcatgttctgaacgtgactgcagatggttctgacagtggccggttccattctgttaccccaccatttgtcaacctggagcctttcatttttctttccaggaagacttagctccacactgatgtgattgaggtccccctggggcccttcacaatgactgtgcgccccttcagagtgatggcaacatcttctggaatgtcgacagtctgattgctgaaaatggtcttttttctcgtaggaaatggggcaaagccagaaccgatttgtactttttattttcattttattttttggttttcgagacagggtttctctgtatagccctggctgtcctggaactcactctgggattaaaggcatgcaccactaccgcccagcctatttttatttttttaaagaccgtgtcttactatgtcttaggctgcctttaactcagcatcctcaggcctt

SEQ ID NO: 691 - DNA, 573 bp, Mus musculus
actgcaagcagaaggcctctgcgcgggaatgaaagtgcgcatgcgtaagagggagcatgttggctcttttttcacagattttattggctgcagacacacgcagcatcttcttgcgctcctccttgaggtggatgggcagctagctggagatgacacaggatgatgcgcatctttcgcacgctggctccaagatctccgctgccaggcagtgacttcaacagaagtggagtaaataaagatgatcacagaacttggaagctgacgaaattaattttggaaaagagctggcttggagcatgacagaagaattcgatggaaagagtgctgggagcccaactcaagactgatgtgtgcttggcaggcagtctacccccgatctcagtcctccagcctttcggccttttttcctttttggagacagaattgcatcatatggcatcctacacagtcctgcctcagtctctgcagtgctgggattgtaggcctatgccacctagcctttctacaatacaaacaaatatgaaaagaagagggacttctttggaaaggagtacagggactatggaagagatg

SEQ ID NO: 692 - protein, 91 aa, Mus musculus
QKNSMERVLGAQLKTDVCLAGSLPPISVLQPFGLFSFLETELHHMASYTVLPQSLQCWDCRPMPPSLSTIQTNMKRRGTSLERSTGTMEEM

SEQ ID NO: 693 - DNA, 22960 bp, Mus musculus
  misc_feature (1)...(22960): n = A, C, G or T/U
gaaaacagcattagctacactgaatgcacctcaacttgtaccaaaaaaaaaaaaaaaaaaaaaaaaaaactattgtgaatctgatttcccctaagtggaacactcaacattttctctagatccatgagactctttttttttctgcgaagaaaagattaagtgcatcctagagagttcttttgtcctttcttcttgagatgaaagcttcaaaggttgattagaacatgaagtggacagttgaataccagagaaatgattgctgtacaaagaggaagaatagagaggatatggtttggagtcaggtcaacccagagaaagttctgcttgtgcctcttgactgcatgacctcagtaaattcaacattttgtgaacttttctttctacttaatggagaaaatggtatgtataacaggatgtggagaaataatagatgcggacaggactgggaagctttcaagcactcctaaaaattgtatccattatgattacagcaaacagagttttagaaagtaaccttttgtaataaataaataaataaatcaatcaatcattccctccagtggattcttattaatcctgccaagtcctttgtgtttcagctttagtttctccatatttattttctttcacatcccgacactttccctggtgtacttcagattctttcttatgaccaggtctccaagtattacaagtttgatttggttgcagtggaatgttatttactagaaatatcagaagttacacccatgaagcctcaccaatatggatgcctaaatataagctgaacaagtaggacaacaacaatagacttgttaacatggaagagagaaagcccaggaggcctcaaccctacacaaagaactacaggcagccaggtgtggtgcagaaaacaaacaaacaaaaaaccctacaggcacctaaggaatgaaagctgaatatggagaaatagtctaccccaagaaagagtacatcaatttgttatccaaacacgaaatggtcagccttagagatacacatatgagtaacattataaaaagtgaacaggttgcatttctataatgaggaatattcatacacacatatttacacagaaatacacacacacatacacacacacacacacacacacacatatatatatatatatatatatatatatatacaaaagtaaaaatagccatgaatttgagagagagcaagaaggaaggtttggaggaagtaacagggaggtgaaagtgatgcaattataattataatttcaaagaataataacaaataaattaaattttaaaatgttaaaagtttggctcagatgtcctaacaagactttcccagagccagtcatgcaaaatgtggaacaatttgaatatacagaaccgggaaactattcagttatttctatctgtgtcagaaacatttgaaggtacgtgactactctctctctctctctctctctctctctctctctctcacacacacacacacacacacagtttgagaattttatatattcacacattgtgtttggatcaaatccatacttcctcctccactttcccttatccctccctgcaactcccaattttttgttttcatttattagcccccacccgagtctacttattgctacctggatgttcatgggtgtggggttatctgttgaagcatgcatagcccctctgtggctgtctgcctgaaagaaactgcctctctatcccctagaagtcattctctagtttctcatgacccctcctcatttatgatggaattttagtttgcttcattttgttaggtttggagggaggctttccatggtctctaactctatgcatgttgaccagttatgcatctctgtattgattaccgcctactgcaaaaagagttttctttgatgaaggttgataggagcactaatccttgtgtataaaggataataacacgtgagtactcaaacccataaaacaaagataaatcatacgtgtacaatcctcatgaaacagtagccgtagctgaaggaagacaggcaaaagttaagaggcacattgaaatacagtggcccaaaatatctatatttttttccaaatgtcataaatgattacattttaacattttaggcattcaattcacattgagattgatcctcataaaataatttataatatattttaataaaaactaatacatttcttaactaaagacatttcttaaatattggccattgagtcttgctttcatttttagcaagagcctgcagagtgactctctgaccaaaaattcaacttagatgtctgaaaactttcaaaactgatttgtaacataaattttaaaaattatttctggggctggagagatgccttagtagataagaggactcaagttcaactcccagcacccacatggcagctcacagctgtctataattccaggatctcacctcactgctctctcattcccctacactggggcattgagccttcacaggaccaaaggccacttctcccattaatgtccgacaaggctgtcctctgttagatatgtggctggagacatgcatccctttgtgtgtactctttggttggtgatcaaaaatagttcttaagatattatttcataggtggaacacattttactgtcagaaacattataaataattgctgagtatatgggtttgcaaagtgaaactcatagaagtcataatatttggaaattttgtctgcataattgccataaaatgtagtaggaacaaggcacacaaagataacatgattatgaaataggtttagaatagatatatggaaacatttttgaatggtcttgcttagcaagaacagacttgattaaaacacactgagggatattgcagttgagcgtttgaaatggatcacttcctagaaaacgtcagtccttgaagcttctctgaacttccacatacatcattttcactttcatttactcatgcgataattattttctgaggatctcaactgtgtgcttgggcaggtgttagcaataggaatgcaaaaggagcatacattgagaatatgtgggaagatggggagttcacagtttagtgagaaaatgggaaagaaatataatgttgagactgtataagtgattcttcttgatgggggcttatgaccagtattaattttatatttatcgacttgtaatgttgggtttgggatttctctttgttccacagtggacctttagacaagaaataaaatataggagtacaaatactttttgaggtttctgacaaaaatctcaatataggaaagaaatatatgtgtgaaaaaaatgctcacttctccagatagatgaaagaagaaagtggggttgatttctttgtggaggaagagattggaaagtaaagtttgagtcactgagagcctgggaagtattaaaaaatgacttggccatctaaaccatctgtggcgtttctttccttcctctcctcttctcccttcatttctttctgtttcctggacctttaccccaccctttccgtactcattggtttcttaccatccctaaagaaatcatgttgtcagtcattctttagatagtagagatacatagatctactcaacaatgacatagttttagtcttcaaaaagttgatggtccacaccaatgcttcaatttcaaggcttagtgtacaatcaggtgaggtcattttgaccacctgtcaagctgcaaaacgttagtcaacctaccagaatttatgctgtcaaattttgagttcaggaggctttcaagtgccctatagtgtcagaagtaatagtgctaatagtcacccttgcagatgctggataatggagagatggaagagaacaaggaagggctggagtaccaggtcaattaggtgggtaaggagggaaacattttgagagaacatatacttactgagtggcagaaaggtatttctgtcatttaatactgtcattaataatgattagactatatctatggatatcaactaaatccttaacattatcaatatccaatgcttaagaagattaggagatggtcatagttggattgaagagagaatggaagggaaaatcctagtagatacaggatcctgtgagaaagagcaatccacattaaacctaatgcatattctcttcatatatttcccttaatatttaaaagaaaattcaggtctgtgatatttgcttagcaaatttgaactgctcacactgggttcccaaatgtagtttcagtcacttagaaggctgaacaggaggacaactcgagaccaggaatttaacagcagcctggacaacaaagcaacatgtttatcaaaatgaaaatgaaacttagaatccatccatttaatcatgaatcttaaagaaaaaaacacattcgccaataggcgatcgtatttgctgaagaaatagaacttctgaagacaaatggagaattatgaattcatgttttgtgacacattataacagcagggaccggtgctgtttgttatttgtatcaagatcacaaagtatgtagtgtgaaatcatctaaatttatgtgaaatttatcctatttcattgttctgacatttaatgcacttaaataatttacaaataaaactttttcccttttagaagtggaaaggaatgcctaattgtgaacagagttaattttcagttgactcctaagataacagggcagctttaggagcctaattaaactacgtatttgctctaattactttagccgcagactgctaggaaacaaaagcagaaaacaggcctgtgctgtgtgtagcaggcaggctttttcactgttgttttcttcagtagaggttttgagagggaaaaaaaacactgagcggcagagccatcatctgcaaagagaggcgagagcccttatctctgcttagtggagaaagcatgttcatcacgcatggctttatttatgttcaaacatagtgaaattaatcattatcactagcatcatttttgagcatcaagagtcctaccacattttgatctacataattggacattagctcacaaagatgagagttaataattacaggataatttgtacattgggcaagaataatagctctattatgctggtaatttcttatgctttattctcttgaataatgtctcttgaagctgttcatatttgatgtaacagtttaaattttcagctaagtaaattcacattttaatcagctacttttattttagtacaacttagaatttgaatgctgataatcatgtggataagagaagagtgaacttttactatggtgacaagtcagttgaatgatcacgtttttataacgagataactagcaaatcatttaaaaaagcaaatcccattaaatgtaaattttttactggaaggataaatataccacaatggcttatccatttcctttgctttctagatgtaaaatactagctgcttgtgtggttccctaagctagttaatgaaatatgaactattgtaaatattattatatcttatctattacttttagaagatgtgtatcaaactcagtttagatgccaaatttaaaggtattgatgaattgacatgcaaggcaactttggctttctttagcaacatgtcaaagaagaagaagaaggaaaaaaaaccctaatatacaacatacagtcaaaggagaggagaacattagtggaagttcaggctaaacacctttcctctggaccactgagatatctgtgccaagcctgtgctttattttgcctatggaaacctgacctaaactaaacaactattctatatcattaagttgtccaggaagatgaaagtttaaatatatgccggacaagctgcagcatctgctgcgtttcagtaatggtggtctctcccaaaagcttctgtgctggaacaactctaggacatgggagcttttcttgacctatgggaagaaaatgatgctcttcgagtcaaatattctttctgctcaccaggactcatgctttcagaactgcttctattgtaagaaacatacaaaagaaagccctgcatgaaacatctcactatagctctaatttcactttgctatagtcaaataatataccttgggcacaaagtgatcagcacagttaaccttgctctgtggttgtttaaattatttctactctttttttttttaatatgccggttccatctacaccggagcctactgtcatattatttcagaatgaaatataaagtgtagcatagattctctctactaattaactgacatgaaaactaatgtggcttttcctttaaaaaagcatacaaggtcagatatatgatctcttaaagagatgataagaaggggttctgatagctagctctctgttagcctgcactacaaaacatggtgactaaaactgacaactctctttgaatggaagggaatcaagtttaatgtgattttaaacaaatcaccagctgaggaacaaaacttgaaataaatatgacaatttttaaaatatttattatataagcaaatcaatattacaataagaatccaatagataaatccaaggatttaaaaagatgcttcatagaaggcaaaacatagtgggtagacacacaaataagcattttaccttactgacaaacaaaattaaaattataacagtgggatagcattttgtatatcaggattttttttaaaaatgaagaatatataacaacaaataatgtagtagaagaataaagtaataaaatactttttaaattatgtatgaaatattgctattttactccagtaattctagtctccagtctgcaaaggtaattatttaaacattttaaagtagattcaagatattaattggagtgttatttacaatactgtaaatgattaattatagcaacataccttagaacagacaatatattgttttaccacaactgtataggtatcatagaaatatgggaaagtattaccttatagtgctgattgaaaagaataaggtatcaaaattacatgtaagtctatattgctccatgtagaaactgtttatacacaggtggtagagacacaaggattcttgaatttgttcattattttccaaattctatttaacaagagccttaatgtatttgatatatttttaaatgttaagttacagtattttcaaatgcattgtcttttttttaacaattctatcagaagcaaaaccgtgaatttataaagttgtaaaatgttataacttcaaattaatgtatccatgatcgttttgaatttaagtgcatttaaccttgtacatatgtaacgaagcagttgaaacctgtaggtagagaccccagttcattcacattcatgctgctttcagccccttattcatcctgcctccagcccatttccaaaagcacagttgtttctagcacctgtgaatacactggctggaggcaaaagacatgttaatgactgttcctaatctttggggcccaaataaaaccacttcccccactctaaacctgaccatcaggaaagtgccatctatttgaatgtagttcttctgttgctaacaaagagaattcttaagaaaaaaggagatggagtctatttttataatgtatccctgcctattttgctgttggatttataactatttcccctttgcagtatctacgataggaaaggtaaattgacattcctctctctctctgaaagagaaatgctatgcgttcctctatccctcttttcaaatgcagtcgcttctttgatactttaataacatctcaacctgtcgctatctgagatgagagagccagagacaaggcagagactgagaggagaggagaggagaggagaggagaggagaggagaggagagaagagaagaggacagtttttagaaggttgcacttacaccttacactccggcactttctccaagaagggaggcagtagattcattatttttgtgatatcatttgtaaactgaaatgaagcaaagaccttcctgaagtaaaggatgcaaaatatattcaagggtatatattcatacagtcctttgttctagataagagcttttctttttcataaagtttctcggtctccttcaaggacaaagaaagttactatttgttaattccttaagggtacagttcaaagtactgccctgggatgtggggggaatatcttgacagctcaatattggttttcagaaaagaatcaagtccggctttttccaacatggctgtatacttcgcaggcccccaaatttgtacttttatagtcgtcatcaatcaaatagaaacatcacatctagcaaacctgtgttttcgtggactagaaatacactctgtgtacagatagcgttaattttgaaggcatcgccgtaattcccgagtctttggagtccctggcttttgtcaggggtggagagggcgaggaggcgtgtgcagcctggtgtgcagcctggtgtgtagcaggtctgaggacccaggtccttgccgcgtttccagagataactgacattttctgctaagaagcacagctcaaagtgagaggcgggtggaactagagcaaactgcgatcggaagggaaaatgtgagctgtagggaaaaagagaaagggctcctggcagaggggtcaccgcggctctgggatttgcaggaatttatcaccaccattaacagctattttccgagggttgtttacagcctgatccagagacaagcagattgagaagcccctctctgggaccccaaccacgccccctcatcccccaactcccccttccactaaactaatgtattcagggccacccccttgttggaccctcccattggctcgtatcctaaccaatcagagccttgcagcgatttcacctggtcccccggcttcctaaataaacaaacaaaccatccggtgctctgcctgccccctcccctcccaacacctctatccccctccggccaaatgggtgtggggctgcggcaacccatcttgtcacgatggctggccgctgtgtcctccacctctcacgtctaccctccaccccatccttctggtactcaggactaggcttggtgtggttagagagccccgcctcctcccgtcggttttgccttgaaccaaacgcccttagattctcccaaagggtctctggcgctttgaagatggccctgcttccctggctccaggtccccatcccacgcacacctttactggtggccgcttgcgcccctccaccgctggggtagctgcctgtggtgcgagctgccgcgtgaggcgacggtcacgtgttgttttgcccactgccttgagcccagtgaagtgggcggggacgcgggcctaggcgggaggggtctggggcgggcagacagggggagactgcctcttctccccccaaagccctcccttctcgagccccccctcccctccgctcaccttaaaacatcggtgcatcaccatggcgagttgctccttctctggccaccaagcgcttaggagactgagagcctcagcagcagcagcagcctccgcagctctagcagcagtggcgaccaccccgctcctttcctcgggaacccggaccgcactcattgggaccgggtcgtcctgtcccgggagccatgtggctctccacagccactggctcccggtcagactcggaatccgaagaggaggacctccccgtcggggatgaagtctgcaaacgnnnnnnnnnnnnnnnnnnnnnnnnnnnnnnnnnnnnnnnnnnnnnnnnnnnnnnnnnnnnnnnnnnnnnnnnnnnnnnnnnnnnnnnnnnnnnnnnnnnnnnnnnnnnnnnnnnnnnnnnnnnnnnnnnnnnnnnnnnnnnnnnnnnnnnnnnnnnnnnnnnnnnnnnnnnnnnnnnnnnnnnnnnnnnnnnnnnnnnnnnnnnnnnnnnnnnnnnnnnnnnnnnnnnnnnnnnnnnnnnnnnnnnnnnnnnnnnnnnnnnnnnnnnnnnnnnnnnnnnnnnnnnnnnnnnnnnnnnnnnnnnnnnnnnnnnnnnnnnnnnnnnnnnnnnnnnnnntctacaaagatgtgtggcaggtagtagtgaaacccagggggctggggcacagaaaagagctgagcggcgtgttccggctgtgtcttaccgacgaagaggtagtgtttgtaaggctcaataccgaagtggccagtgtggtcgtccagctgctgagcattcgtcgctgtgggcactcggagcagtacttcttcttggaagtcggcagatccactgtcataggtccgggggagctgtggatgcaagtggatgactccgtggtggcccaaaatatgcatgagctgtttctggagaagatgagagccttgtgcgcagatgaatacagagcccgatgccgcagctacagcatcagtattggcgcccacctgttaaccctgctgtccactaggaggcacctgggcttgctcccgctggagcctggtggctggctcagaagatacggcttggagcagttttgccgcctcagagctatccgtgagagggaagagatgctattcaccaggcgcttcatctcacccagagagcctccgcctccctttaggcgaggaagagggcacctgcccagagcccgcaggtccaggagagccgcgtcagtaccacccagccttttccgacgctcagcacctagcccgggaaggatcccacagcctgaagatgtccccaacgacagagcccgtgaagcctccggttccagctctggcaacactgaagaaaaagacaaggagggtgaggaaggaaaccgaggtgattgcatacctatgaacaactggggctcaggaaatggccggggctcaggaggtggacggggctcaagtggccaaggttccagtagccagggctcaggtgggagacagggatctggaggtggccagggctcaggaggccagggtgccggaggaaaccagtgttcaggaaatggccagggcacagcaggtggccatggctcaggtggaggtggccatggctcaggcggtggccagagacctggagatggtcatggctcaggtggtggcaagaactcaggaagtgggaaaaattctgacgatggtgaccgtggaaaatctgtgaagaaaagatcctactttggtaaattcactcaaagcaagcagcagcaaacactgcctccacccccaccgccaccgccagcagctggagcaactggtggcaaagggaagtctggaggaagattccgactttatttttgcgcagacagaggcacaaaagaacgcaaagaagccaaagaggtaagagatatggagacctcaggaggtgctacccgggggccttacagagccagagctttcgatgaagatgaggatgacccgtatgtgccaatgagaccaggggtggctgcccctcttgcgtgttccagtgattatatgccaatggctcctcaaaattcctctgcttcaacaaaacgccactctaggtcaccctttgaagactccagagggtacatgatgatgtttcccagagtgagccccccaccacctgtgccaagtgctccgaaagcaccggacaccaataaaggggatgactcaaaggacaatgacagtgacagtgattacatgtttatggctcccggagcaggtgcgattcctaaaaatcctcccaatgcgcagggaggctcttcctccaaaagctggagctcgtatttctctctgccaagtccttttcagagttcacctttgggacagagtgaccacagtgagtatgttcctatgttacctggaaaattcctggggagcggtctacacaaagaagcctcctttagccagggcaccaaaaatgtgtcttcaaagccttcaactgaggcgtcattctcaaaacccgaagataaagggtcatctgcaaagccttcagatgatgtgcccccaatgaacaaggctaaggaacctaaccacctttcttttattgcaaaaggaactcaagtaaagcccaaaccgctaaaccccacacaggagcggagagaagctgctggctcccgtgactatatcaacattgactttattaagagagagcgccttgtgctaccttcctctgctcaaggactgccagacatgcggggcgtagttactgaccccgcacccacagctttttctggctacctgaatgttgaattcggggtgcccttcccaaatccaacaatccgcctctcagatcttttaagagttctaccaggtgccaactccatccctctggccggtactaggtggcccttcccaggcagtgctataggtagcattgtggaagcgggagaatacattgaagttattttcaacccggctatgacaccagccatgtcttttgctgacagtgccatttgctatgatgctcaaacaggtcaaatctatgtcgtcgacccattttctgagtgctgtatggacgtttctctctctcctggtcgatgctctgaaccgccacctgtagctaggctgcggcgggaggaagcgcaggagagaagacgcccacaaagccgctcccaaagtttatttgccagcactcgagccgcggtctcggctttcccgactgacagcttggacagagactttcccgccgcttctgcggtgattgctgctccagctgaggcgcctctcttggcagtgagccgggctttagccgtggtctctgcgctcgcagcggcccccagcataggcgacgtctttgcaggcttccgcgctgcggcaggagttgactccgcctccgctcgcgggttccaacctgttgcgggtgcccaggctgtaagagaattccaggaccttgccgcaggctggaatcctggagcccttaaccacagggcccgaggtgaggacctggccgccggcgcagcggctcccccgccgccacctcgccagatttgggtgctgagaccccaagagagagcggattctgaggacgacgacgatgatgacgacgacatttacgtgagaatggactttgccagacgagactacaggaagtgaccactctccgaaatgaggttggtgaatttataatgaaaattcctttagttatcggaaatcgattaataagtgagttgatgcgttagttggtatgctgttagcataagtgacctgctagttcatttcctagtgttattggggagagtagaatgctgtttttaatttttcacatgatgtatattttggcctttgcgaaaacattagcttttacataacccatatatttatctgacagagccaattgttaaacattgcagtaacttcttaagagtggttcaaagtaaagatccatagcaaccccagcgggaggatgctttcagaagtacttccccttccctggcttctccacatactgagttctatggcctcactttccagcctacaactaaaagctactatgtgtgctctatgtgtgttctatgtgtgctcaaccgaagtgccgtggttgaaagagaacacagagagttcagcagttaacaagccaactattgacagatttactttctaaaaggtagtcactgtttgcctagtttgctgtggtttgtctaaaaggttaacacttggttgtcagctgaatcgggagtggatgcataaaatcccagatgattaagagatactctttgctctggaaagtgtttctgtgctgatctgattttgtttttacacagaattgaaagaaaccatgagtgttccttttctgtcattggtagggaaagacaagttacttttgctgtgcttcagtttcttcttttttttttttaacctcccctcctccacctctctggagagggtggagtggtatcttgattatggatatgaatattgtttcaagggtttaaagggcatataaaacatttcattggtgtgtcttctggaaaatggaaaaaagcaagatgaaagggctggtggaagaagacggaccccctagctcccacccagggtggctaaccctggagcagtgggagactttcaaggcctaattttctgaaggaagagaaggagttgtaagaacaaagcttagtgaatctgtgaacagaattgcccaactctgtctggacagagtctcaagtaatgtttgctgatgatacccttgtggtctgccctgccttctctctttagaacagcgcgctttccctgtgaggggttggtccccagcagttttcagtccactagtcagtttgctgaagagttttgctttgcttgctctctggaatgcttttgtgattggatctttgcccactgtgcttgatcaagcagaacaagctggggttgatcacaaccatccccttacaagctccccatttagcgcaggtgtagccccctacctcctctttctctccttgctatagaaaacttgccatacaaaacctcacatcgcagcacagacactacaaaggagtgatcattaaaacaacaaaaggccgatttggcttgctgaaggacttcattcaaaagtccttttaattgtgagctcccccccaacacagacacccacccaccaaccccccaaacacatacacacgggtgggggacacacacagagcactactatcataggtatatatatttaaaagtcataattcaatttccaagaatatagtcagatcttatgcggaagtctaactgctcaaggtactgtgtacaactctgacatcaaattccacatcaaaagagtagctgcttgtgaccctgtgattattttttttgaaatgatgcctacactttccaatattctggtctttgtacacacacacacacacacacacacacacacaaataaaaatagtgaaatcatactgttcttcaaatattcagatgaactctgacttctgaggattattgagattcaatgcccattatatttataaaagttactgattagtgaccttgtagctatactggagatttaatatgcgctgactgtattgtttattgaggaaattcccacctttattgtggttctataccactgaggttgtaacttacagacaggcaggagcttacattgagataagtgaatggaagcattttggagcatgaaatcactttataaatcaaaagtgtttttggtcgatggtttaatactgaagtgaaaattcaagcatttaaactaatgatttagtttttctgaaaactagcaaatttcttgatgctaaagagatatttgacatgtagtttactacaatatatcatatggaagggcacaggaggaggtatggtattataaaaacctattgcagaaaatgactttaggtagcattttaatgtggattgataaagtgttgtctgtgaaatgttcaaaacaggtcaaatgaatctgatcatgtttttctctaaatctatagatggacagccagttacttctgttctctctttattttcttacctaggatttaaaaattgaatacagcatattaggaaacagtgttgtaaacaaggctcaaaggcacaatgttaggagtcacaaagctcaataagttaatttccatctacggaatgtgtttagaactagcatagagcagtattgtgtgtgtattattatgtagttaggattagtattctggttgtgactgttaactactacatttaaaatccaaaactaagttaaaattctgtgtcactttttgtgtcttttctttcattgaaaatgtcccacatgattattcacagttgggatctttatattgagatctatttatgatgtaagtgagattataattcattaagaccacttctattgtgaagtataaaaatgatgaatatatagccttatttgtctatagtcaagcttcatgtattttgtagttgcttgcttaaaccaattagatacacccagagtataacttgagtatgtattcttttgatacatgaaatatttttaaagcaattccttcatgatcaagcctttgaacacattagcatttagaagagtgtcatttcccatatgatttcatctattcctaaaccgttgtgtgcctttttgcttcttttaatgctttacctgatataaaattgataggttgaagtgattttggatgtaaatttccctggtattttaattcaagacataggagcatgaaatgagcagctgtagattatatgaaatgattggtcattcaaattagttatattatgatagtattaaaaggctaaaactagtaattagcctctgacaatttagttcctattatcacaacatgggaagcccaagcattttgccgttgtcctgctgccaagtcccagtgctataaattataggtgctgaaggcaaatcatttttactgtactagacttatttaatgtaaataactagaatataatctccagatagcagacaatttccagctataattgatggtttacttattttatgcagcattcatcatccatccccaccaaatctagataattctttggagtaataaagtatttgacttaaacaattaaaaaggacctcacccagttaaagttagctaaagttgttggcaatcattattcatttgcatttgttctattttaagactgatgcttccaggataaaaatgtcagctaggagcaaaacatctctttgaaaccagtgccaggtctttaattaagcacaccagactattatacgttcataaatactcaactagggtctttagctttctttccctgtctctaatcgccaaacatgaaccaaaattcttccgagtcattggcaggcatttatcttggggtacaatctcaggtttatgaagtacgaacaacaaacaaacaaacaaacaaacaaaaacccctttatatttgaacagatatggctggcccttgcaggaaaaatgtaaggattactgtgtgtgaatgtaaatggattgtttttcaattgtcaacttgttgatcgagggaatgctttccagttacagattgattgccttatatttttcaaagtgctttcacattcattattttactgctggtaagtactgaaagtgacgctggagttaagaattttcctgtgttcatgaaggtaagtggcagaactgaaaatgtaactcagagctgttttccagtctcctgctccatctggcacacgacactaaccttcaagcaagttttagtttgccatatttatattaatgaaagttattatataggaaagctttgggagcacaagcactagtacacattaatttgatggtagcaaattttgttagaactctctcagagcgttctaagttgaccatcagtcagggctcaggtgatcttcattactgacctcaactggaacttaatgttttaaattgtacttagagaagagttagctgttcttacttcccaaacacaaattgtgtgagcatgtatatgtgtatatgtgtgtgtgtgtgtgtgtgtgtgtgtatgtgatgagtatttatatcaaatggaagcattggaaaggaaagaatgtgaattgagggtgtagtcagtaaattccaactaatagtcatttccttaactgaatttagatttctgtgtctttgctaatagtggcatttgtcagctattacaagccttttaatttaatttttctttctgtataaatctcatatttcaatctaaactaccacagtgagcataacaggataaaataaaacagggggaaaaaggtgctatagacatgtatgctggtgtgtgtgtgtgtgtgtgtgtgtgtgtgtccgtgcacatatggaggtgctttgggtcttcaggcaggtagttttcagaagtcttgagaatcagatcctatgtgggacattaaatcttgttttaaattaaattcattttctttagcaccattttaaaggctttaagactatgtacaaatatcattttattggtcgtcttgggaaatacattttgtgaaatgctaagttaaaactggtagtatgtggtattggagggctggcaacctcttaaaccatgaggatcatttcctgaatgaaaaatggaaatgcaagcaattaatttttagaacaatgaagtgaagatactgcaatccacttgggttttttggcacaactattgaaatgcaaactgtaaacctgttgataacattgtgagtattttatccttgctttacagacacaagctgttctccagctactctgcattgattattgcgcacacagatgtggaatcatagggttgacatttaagatttgggaaaattttaggagcttttaatattaacaaatatactggttttgatttgcgttgatttaaagaattttttctctatttcagactgataaatgaattccttttagaatagaaaatggctgcataagtatttatttatagaaatgagaaagtgatcactgttttcccctacacgctaatatactctctttataatgtaaaagttaccaatgcttgtatctatgacttgtactgttaagatgccctttaccagacttgagtccttcatttcaggaaaaaaaatgagcttacctggtttctctctaacagaaaaggtggggaccgtctagaaatcctataagacctatgtagaactactgttctagatgtccccagcctcagcttgtttgcattcagctaaaagcaacagttttccttgtaggaattcctgttgtacacttctgaggatgtgttgcctggttcattaccatttgttggcacacaggtaaccaggctgatatttccatgcttagattgaccgcaatatgtgtggtactcttcagacttttaaagatttgctgaatatcctattccccttaaattgtgatcaccctagctagatctaattttagatctcgaaagttctataatttgcctcaatttgattactgttttcctccttgaagacttgaaatgtagaatgtcagtcaagacaatacccacaggtgatcttgaaaatcactcacatgtgcatccaccatgcccttgaatgagtgactagggaatgttattttaaccttttgactataggagaccttattatttctatcatccatcatgactagaagacctattttcctggagttcccaattgaaacttccagtgcatctcacagaaatgattggataaaacaattcctctgttagttcaggaaatgaagaggttaaatagagtcttgtgtagaccatttttcagagcagtgtttctatgaggtaatttattctgagtttcaactaacaatgagcctgggactatatgtcttttgtaaattgaagactgaacatattaaaattctactaacttgcattcttcacatcagcagtaactaggcagcagagtgaaagagtccaagtgtgtgttgggatgtagtagagaaaccaacctaggatgaaaaataaagcatggagttttacaagtgacatgtttttattccagattcttttgacaagttcttttgggaaatcactgccactgtggggaaaagcatattttatcattagatctaagaaagacatactatgagtggcactgtaaagaccagcagcattccctgttaattttcacactgtagggacagtacttcctatttatcaactcatacagggaactgttcttattgaagagatgaaacctgcatataacccagtgactgctaagctaaatagcatgcctgaatttttatatccttcatatatccatcattcactttggctctttgcttggtgcatttatttgaccaaatggaaaaatagatccaagtcagataactctcgagagcatcaccattcatttttctgttggtgagatgttattaaaaataaataggaactgaacacatggtgtggttgtcagctctttaatattccttttgtagactttgtcaggtttaggtttaaccctgaattgcgttcttcctcttctcagcagccttgtgaattgcttctttttggtgttctttggaatgtgttcattttaatatgggcctaagagaaacagaattataaaagcaaatctgtggctttggttcccataatgcattgtaaaagcaaggtaaattatttggggattatccttgtttggaaagcatcgttaccgtctactaacctagatgaacaggaattgacaaacagatttgtaaacatgaaactacgtggccatttgctgggtcttagtaggtttttcgttcttcacccagtgttgatgcaagtgttataggaaggcatggaaatatgaatacaatttttggaagaactgctattatattttggaagcagagaaaaattactccaatagcaataaatggttctaattccaagcattgtctcttgggtagcttggcagcttaatttatacattcctgcaaagttgcatgaaatgaagtgcatagtacatgatacttagtacttagaaatcctcatttgaaacaattccattgatatatatatatatatatatatatattaagctaaatttgtgatataccgttttaacatcacatttctgtcaaaaaatgtagataatatttaaataaaattccaggatacctacctagttcaatttagccacaagtaaatgagttgctaatatgcacaccccctaccctctatcctaacaaaacctaatacttcacaaaggcagtgttcacaggaagacttaatactttctaagttagtgcacttctttttaggctttttaatttaaaggaaagatccctacaatgaacgtaactaacaactacaataagtcaggaggggtggtaactctgatgctcaatcctgttgcatttatcaaaatatccatcgggggaaaaatggtacttctagttaattgaagatcttttacttgaagcctactctggagaaagtttgccacagtcttttagcttgttttctgtgtacaggcagcccttggtattaaatatctgtgtctatgccaaggcagcatcctcagtgggtctctcagctacctcttcaagttttgttttcttttgtttatgaacaaggagtgggtgacagctctttgcactaatttttaaaataacttttgtcttgtcatctttttttttttagagttattacactgccaccaaaaccaaacacattttagaagaaaagtgacacagaacttcatctttgtctactccagatctgcctaaaagaaagaaaattctgaaacttctgaatagaaagcagccttgatttctaccagtcaacgagcagactgtggcggctgaatgagcatgctaatggagtttattcttaggactgcctcctgcatccattgattgacttaaatatgtgcacactgtacgtttgctttgcttcctaggttccctgatgtgtctgtttaaaaggaatgagatgctataagttagtgtctcataacacttcccctttcctctataaaaaatatgtaaatatagccagcatataatacttgggaggattttcaatgagaatatctttaaacaatggtagacaaagagacatctatgtaaatgagaaggtaggtatgatctggagaatctttttgctgaacattcacatacttaaaacatttcttgatcaaggaattaatgtgaattgaacctctatcttgacaggacattttcagtattttaaagacaagactaaagggcaaattatctcagagtttgctcattaacaagactacaacattctatcaacactaaccatcaactaaagtgatatcttgacagagttgttctagcattttaaaggcagaaccaaggagcaggttgtctacttctatgtgtagaacctggtgatgttctgctatcgaattgaacatatccaagcctattgtttttattttattttgaaatctacatttatccctgcaaagaggcaagtatccatttcacaagaccctttctggctctctggggcctcctctttccagctctttaaactgcctccccctctttctggctttcccacagtaaccattctccctcccatgtccaggatgcccagggtgcctataatgacattgcttacccattttcagaaattggtgtatacctataagattaatcaaccaatcaactgatgcctaaaactcaagccaaaaggaacctcttataaggccctgtttccttctggacaatggagccaatataagatgtacaaaatttaaaataaagaaaaatcagagcaagcccccccccccagttttgcttgcttctgatggaaactgaattaagatttttggaacctggacctttgagaatatgataacagcaggttgtgaccacacaggataggtacaaaggtcttgaagcttgcttagagctttgttatgtggtggcacccagctcttggatctcgtaccatcactggcaaaactctcatctcacagatgggtgtgagtgtttgagcaagtgtctgcaaaagtgtgtgagtgctagtgtgtgtgtgcacacatttgtgtgtatgtacacctttgtgtacctgtgaacatgtgattatagacgtacctattgtgtgtaactgtgtttaaaaaaaattgcttcgcatttaacgtgcaactttcaactagtgtgaaacttacctgaagttctttgccactcggttcctacatctttgaacgtgtgcttctatcgttgagcaggcttctagtacatgtggctaaactaactttccaaaggaccgagttgatttctattgtttctccctgcctactaagcaaagggatggggtggggtgtgtgtgtgctccttttcccccacgtgaattgtgctgaggagaggatgtggcttcagtgccagtcactgaaccagtttctggtcattgctagggtatcacttgctttcatcagtcccttcaggctcctctcttgttcttacctaattcagtactgcagtgtgtggcttttgttcattgtaacagtgtactctttaggcagcctttcttcaggccttctattaccattttatattcaagtaagttgtcataatcgttcagaattgaagcaagaaaagatttgagggaaaatgctgtgttattttgttcatgtattcattcagtttgaaggctgccaatagacagggtacagaag

SEQ ID NO: 694 - DNA, 2960 bp, Mus musculus
tctacaaagatgtgtggcaggtagtagtgaaacccagggggctggggcacagaaaagagctgagcggcgtgttccggctgtgtcttaccgacgaagaggtagtgtttgtaaggctcaataccgaagtggccagtgtggtcgtccagctgctgagcattcgtcgctgtgggcactcggagcagtacttcttcttggaagtcggcagatccactgtcataggtccgggggagctgtggatgcaagtggatgactccgtggtggcccaaaatatgcatgagctgtttctggagaagatgagagccttgtgcgcagatgaatacagagcccgatgccgcagctacagcatcagtattggcgcccacctgttaaccctgctgtccactaggaggcacctgggcttgctcccgctggagcctggtggctggctcagaagatacggcttggagcagttttgccgcctcagagctatccgtgagagggaagagatgctattcaccaggcgcttcatctcacccagagagcctccgcctccctttaggcgaggaagagggcacctgcccagagcccgcaggtccaggagagccgcgtcagtaccacccagccttttccgacgctcagcacctagcccgggaaggatcccacagcctgaagatgtccccaacgacagagcccgtgaagcctccggttccagctctggcaacactgaagaaaaagacaaggagggtgaggaaggaaaccgaggtgattgcatacctatgaacaactggggctcaggaaatggccggggctcaggaggtggacggggctcaagtggccaaggttccagtagccagggctcaggtgggagacagggatctggaggtggccagggctcaggaggccagggtgccggaggaaaccagtgttcaggaaatggccagggcacagcaggtggccatggctcaggtggaggtggccatggctcaggcggtggccagagacctggagatggtcatggctcaggtggtggcaagaactcaggaagtgggaaaaattctgacgatggtgaccgtggaaaatctgtgaagaaaagatcctactttggtaaattcactcaaagcaagcagcagcaaacactgcctccacccccaccgccaccgccagcagctggagcaactggtggcaaagggaagtctggaggaagattccgactttatttttgcgcagacagaggcacaaaagaacgcaaagaagccaaagaggtaagagatatggagacctcaggaggtgctacccgggggccttacagagccagagctttcgatgaagatgaggatgacccgtatgtgccaatgagaccaggggtggctgcccctcttgcgtgttccagtgattatatgccaatggctcctcaaaattcctctgcttcaacaaaacgccactctaggtcaccctttgaagactccagagggtacatgatgatgtttcccagagtgagccccccaccacctgtgccaagtgctccgaaagcaccggacaccaataaaggggatgactcaaaggacaatgacagtgacagtgattacatgtttatggctcccggagcaggtgcgattcctaaaaatcctcccaatgcgcagggaggctcttcctccaaaagctggagctcgtatttctctctgccaagtccttttcagagttcacctttgggacagagtgaccacagtgagtatgttcctatgttacctggaaaattcctggggagcggtctacacaaagaagcctcctttagccagggcaccaaaaatgtgtcttcaaagccttcaactgaggcgtcattctcaaaacccgaagataaagggtcatctgcaaagccttcagatgatgtgcccccaatgaacaaggctaaggaacctaaccacctttcttttattgcaaaaggaactcaagtaaagcccaaaccgctaaaccccacacaggagcggagagaagctgctggctcccgtgactatatcaacattgactttattaagagagagcgccttgtgctaccttcctctgctcaaggactgccagacatgcggggcgtagttactgaccccgcacccacagctttttctggctacctgaatgttgaattcggggtgcccttcccaaatccaacaatccgcctctcagatcttttaagagttctaccaggtgccaactccatccctctggccggtactaggtggcccttcccaggcagtgctataggtagcattgtggaagcgggagaatacattgaagttattttcaacccggctatgacaccagccatgtcttttgctgacagtgccatttgctatgatgctcaaacaggtcaaatctatgtcgtcgacccattttctgagtgctgtatggacgtttctctctctcctggtcgatgctctgaaccgccacctgtagctaggctgcggcgggaggaagcgcaggagagaagacgcccacaaagccgctcccaaagtttatttgccagcactcgagccgcggtctcggctttcccgactgacagcttggacagagactttcccgccgcttctgcggtgattgctgctccagctgaggcgcctctcttggcagtgagccgggctttagccgtggtctctgcgctcgcagcggcccccagcataggcgacgtctttgcaggcttccgcgctgcggcaggagttgactccgcctccgctcgcgggttccaacctgttgcgggtgcccaggctgtaagagaattccaggaccttgccgcaggctggaatcctggagcccttaaccacagggcccgaggtgaggacctggccgccggcgcagcggctcccccgccgccacctcgccagatttgggtgctgagaccccaagagagagcggattctgaggacgacgacgatgatgacgacgacatttacgtgagaatggactttgccagacgagactacaggaagtga

SEQ ID NO: 695 - protein, 975 aa, Mus musculus
YKDVWQVVVKPRGLGHRKELSGVFRLCLTDEEVVFVRLNTEVASVVVQLLSIRRCGHSEQYFFLEVGRSTVIGPGELWMQVDDSVVAQNMHELFLEKMRALCADEYRARCRSYSISIGAHLLTLLSTRRHLGLLPLEPGGWLRRYGLEQFCRLRAIREREEMLFTRRFISPREPPPPFRRGRGHLPRARRSRRAASVPPSLFRRSAPSPGRIPQPEDVPNDRAREASGSSSGNTEEKDKEGEEGNRGDCIPMNNWGSGNGRGSGGGRGSSGQGSSSQGSGGRQGSGGGQGSGGQGAGGNQCSGNGQGTAGGHGSGGGGHGSGGGQRPGDGHGSGGGKNSGSGKNSDDGDRGKSVKKRSYFGKFTQSKQQQTLPPPPPPPPAAGATGGKGKSGGRFRLYFCADRGTKERKEAKEVRDMSGGATRGPYRARAFDEDEDDPYVPMRPGVAAPLACSSDYMPMAPQNSSASTKRHSRSPFEDSRGYMMMFPRVSPPPPVPSAPKAPDTNKGDDSKDNDSDSDYMFMAPGAGAIPKNPPNAQGGSSSKSWSSYFSLPSPFQSSPLGQSDHSEYVPMLPGKFLGSGLHKEASFSQGTKNVSSKPSTEASFSKPEDKGSSAKPSDDVPPMNKAKEPNHLSFIAKGTQVKPKPLNPTQERREAAGSRDYINIDFIKRERLVLPSSAQGLPDMRGVVTDPAPTAFSGYLNVEFGVPFPNPTIRLSDLLRVLPGANSIPLAGTRWPFPGSAIGSIVEAGEYIEVIFNPAMTPAMSFADSAICYDAQTGQIYVVDPFSECCMDVSLSPGRCSEPPPVARLRREEAQERRRPQSRSQSLFASTRAAVSAFPTDSLDRDFPAASAVIAAPAEAPLLAVSRAVVSAAAPSIGDVFAGFRAAAGVDSASRFQPVAGAQAVREFQDLAAGWNPGALNHRREDLAAGAAAPPPPPRQIWVLRPQERADSEDDDDDDDDIYVRMDFARRDYRK

SEQ ID NO: 696 - DNA, 23928 bp, Homo sapiens
cttcaagtaatagaaatttaaagatacatttctcaaatattatgtcatgctattattttaggcataagcctatggttctagtaaattcagggagtttttgtttgttttgttttaatttagggtaggtaagaataccaaataatcaacttaaattgaatgtctgtagaatgaataatatttcaagattccaaatcacacctgctttcaaatttatagtttaatcattttaattataccaacaccctaaaaatttacaattaatggctattactgcctccagatggtatacattacaaaacaagaggctgttatatctatcttctagcatattctttcgggtataaaatggatgagacaaaggagtcacaagctatcagaatgtgacatgtatgcatttgaaaatcaagcaaaagtattaggtgactaaccagagttatgccacgcagggagcatgaaagccagacaatagattatccctatcctcaagaaatatataatcttgttcatgagaaaaaattatactaaaaccgcaattatattgtacacacatatacacagacaaaatcatagaaaatgaataagcttcaagaaaaaagtaagttttctctgataaatatcaacttgtacaattaggtactttgaataagatttctccgtttacctgtctcactctttgcagaactctcagctttgattctattacacctggaagatcccaggggagtgctgaaccatgtgacaaaagtcttcaggtggaccttaatctttcaagaaatctttttaggtagacaaaacactttgcttcgtttggttttttattttttaatactgaaagcaccaattttattttccaagggacacttcctttcagatgcaaatgtcaaccatttcttaaatgctgtattcaaatgttaacattattcctttctgaatgctaattaggaaaaagaaaaaatgatttacttgtttcttaattttgaatcagtgtgaagtattaatatgcttccctctttggaccagattttgccttaaggtatctattttgttttatgttgcaaaatatatcatatatacagaaaagtacataagtacatatatgcagtttaaataataactataaactgaatgtccaagtaactatgactcagggtaagaaatacaattctaggtatttttaacgcagtcatagaaggaagagagcagttcactatgagagtctaaatttctttgttccgtgaccacaaatgaaagttttccctccttatttctcttttgacttctagtctcaaatttagaaaaggtcctgaaaggccgggtgcggtggctcacgcctgtaatcccagcactttgggaggccgaggcgggcggatcacgaggtcaggagatcgagaccatcctggctaacacggtgaaaccccgtctctactaaaaatacaaaaaattagccgggcgtggtggcgggtgcctgtagtcccagctactcgggaggctgaggcaggagaatggcgtgaacctgggaggcggagcttgcagtgagccgagatcgcgccactgcactccagcctgggcgacagagcgagactccgtctcaaaaaaaaaaaaaaaagaaaaaagaaaaggtcctgaaaaaaataagctcaaacattttgccttctaactcctgaactcaaatcacattctttacataataattcatgatcctctgtgataatgaatttaagaggaagaaacaacacataattaatgaaagaaatattttaaacttacgctgctattttcataattataatttattgtcctgtattgctgtctttttaaataaaccttatgtgaaaaattttgtcaaagagggatgattaacaagcctaaagaaaatgtattctctaacatgactcacagctgcagtggccctaaatactgaaaagtgtattgaatgactgatatttcaccttctgcaaaaaataatacattgttctctgagttcatcaccttatgtagtattttgcatttaggtaaaatctttcattcaacaagtagttactgggttccacgcagtagtagacaccatgaaagggcaaacaaaagtagaagaatgcaatccctgccctcaggagggcttacaaaacatttgggatgataaagcatccactcaggaggcaaatgaaaagtacttacatttcataaacaatcatctgacagtaaaataaagactgaatacagaaactcaggaaacttaaaatggttgtatttcaaaagcagtttgtaaaatgattgcttcaaacttagaacacattttaccaatagaaacattttgaataaacgccgattggatttatatatttgccaaaagaaacccacttaattcacaatatgtgaaaattctgtctgcatattcgctatgaaaatacagtagaaagaaaaagggttgcaatactaacaattagagaaacattggaaaataaaagtgattacaaactaggcttataaaatatatctggacatattttgaatgctgatgattgagaaagagcatgtttaattaaagcagatagatgaagatttctgtagagattcttaaggggatcctttacaaaagcacttgtgatccttgaggtatctctatttcaaaacttttttttaattttcattcactccttcagcatatatttattgagagtagtatctaccatgtgtcaggcactgttcttggcattgggaatacaaggtaagtatacatgcagaatatatgggaatatagggagcttatattctagtggaaggaatgagaaaggaaaaaaaatgatatcaggaactgctaagtgcttttccttaatggaggtttatcatcaccattaccctaagactaatattaagtaagtttatacttataaccttacatgatcaaggttaaaatttctctttgttcctaaatggaactaaagacaggagggggaaatcaatgggcacagacatttcctgaggtttctaacaacaactgcaagatgggaaagaaatatgtgtgagaaaaagatttgctgacctgtgatagatgaggaaaacaatgggcgtgatatttttgagagggaagagatgttaagttgggcataagtcaccaagccttgccatcagtcatggagagttttggcatggttgcaagtgatttggagggggaggtagtctgcattgacgtcttgaacattgttgttcttctctttcccttctcccttgtccctccctcccttccttcttccttctgccctttccttcctttaatcctcttcccttccctccccacttccctccctcccactcttcttttctccttccttccttccttgaagcaaacatgtactgataattgccagactgttataccaagcattaattcctggccctcgaggagcatatagcctagaaccgtgttctcaactctgggattagttatatccaggcatggtaattttaactgttcaacaacctgcgtagcacaagccaaccaataagaatgtatgtcagtcaaaatttgagtatggaatcctggaagcccctcaatgtgccagtagttaaccttgtagttgcgggatagtggagaggtagaaggtcctaacggaggtgttgtagtagccaggacaatgggtgggcaagaagactactcagtggggaacagtttcagggcagtagctatttactaagtggtagaaaagtattcgttattttaccaatgactatcatttaacaatgatatgcctgtatggatgaataccaactaaatccttagctccacctacatccaatgcttaaagagattaggcggtgggattatgtgatggaggaaacctttttctgggtcttgatcttattcttgagaaagatgattggcatcagttggtgatgaggaaaaagagggaaacagcttaagtaaagatggaaattgagaaatcgtatacagaatgccattaagaaaccaacctgtgtggaggtgtgggcagcaagaatgtactgtaatagaatgggaggcaaatttggaagaaaaggttgtatacagcaagagagaaaaagaggttggttgttgtgtcagtggagaacagggaaacatattagggttagttatttaattctgatatagcagagaaagggggaggggggcttctgtatgtccttgagcagggaattgtatgatgaaaggaacatatgaaaggaaatattctgctggctatatgaagaagagactgaagaatgcagaagccagtttaagaagttacttaggcaattctggtagggttaattatggcagggacaaggatggtgactatgaaagtgaaacaaagtgttcaatctgacagatattgcaggaccatgtgaggagtggagagaggggaaacaacaagaaacataatacatattatcctaaatatgacagctggctttctaaatatccaaagaaaaatataagtctatgatactaactcctttaaaataatatatttaactatgtaattatcctacttaatttaaaaaataaagattctaacttttgaagacaaggcagtatgaattgatagccttttgacactaagaaaaatactgctatatgatattaatacggaagagcatagcattaagctaaattttctattattgatttatattagcatggagaacatgtatgatgttaaatcattaaaatttatgtgaaacctagcagacttcattgttctgatgtttatcttacttagtaaaagttatttccaaatgaaacttttatcttttgaaggtgggaagaaatgcttgatttttaactaagttaactttaagttgactcttaagataacaggaaagctttaggagcctaattaaaccatgtatttgctctaattactttcgctggagactgctaggaaacaaaagcagcaaacagacctgttctgtgtgcagcagtcaggcctttgatggttgttttctctagcagaggttttgagtagcacagaagtaaagaagctgagaagcaaagccatcatctacaaacagtggctgcagccacaaatcacagggcagccctcattcctgcatagtgtagaaagcatctttcattgtacatgatttatgtcccaacacagagaagcaatcgtcatcactaacatcattttttaatatcaagggtggcatcacatttttatcagcataattggacgttagctcatgaagcttttagaattaatacttagaagataatttatacgtgggacaagaataatagttttttgatactggttacttttcctcttaggttttattctcttgaataatgtcgtccatatttaatacaacagtttaatttttaaactaaataaatccacacttgaattacccatttcgattttagtacaagttgagtttagaatattcatgatcatgtatgtaagaaaagaagcagatgaatttttgttatcactgacaagtcaattcaaacaattgctttcttaaaacaggactcacaggaaattccttttaaaagcacacatcattaaaggcatatttcttcattagttggaattggttttaaaggtattgtggctatttatccatttacattagtttatagccataaaatgccagttacaatgcttgtgttttttatcccttgagttgaattggcaaactaaaacaagaactatcttttaagtcttattatttattatctgttgttttaaaaatctgtatttcagaccctttgtgcagattccaaactttacagttgtaataactgaatatgcaaggcaactttagccttctgggataaactgtcctaaaataaaaacaaaaacgaaaaaaaataagagacaggaatctataaccaagagagggtagagcattaaagccaccactgagtgagttcaagccaaataaaaattctctacattttgcctaaaccatctagatatctgttttactttgcctatgagaatctgacctaaactaaatgactattctatatcattaagttgtccaggaaaatgaaaatttaaatgtatgtcagacaagctctagcatctggtacaattcagtaatgatggtctgctctacagagcttcagtgttgagacaactttaggactgagaaggtttggttgacctgtaggaagaaaataatgttctagtcagacattctcccagtttacaagtactcatgcttgccagattaggaaagatacaaagtaaaattcttctgtgaagcatctcactatagctctaattccacttcgctgcagccaaataatataccctgggtacaaagtgatcagcactgttcatctttcactgtaatagtttagaaattattttcacacttctttttttaacacattgattaatgctagatatttccccttaaaatagaaaatgtctcataaagtattatttcagagtgataaataaaatttaactaatttagatgctctcttataatttgttgacaaaagaagaaacctatttctccttttaaaagagcatataagctgaaatatatgagatcttttaaaagaagtttaaaagtgaccatggtgacacttgtatcaacagctccctttcaaactgtgctacaaatcacatcatgcccaatttacatatctttcaaaatagaagaaaatcaagttaaatgtgatttttaaagtcaacagactggggaaaaaaaacttgcaacaaataccacaaagttttaatgtatttattacataaacaagttacacataagaagaaaatactaagaatacaatagacaacacaaaggacataggaaataatataatgtcagtgaatatatataaatgtttaatctcactagttaaaaaaaaaaagcacattgaaagaatagtggaggccaggtgcagtagctcaggcctgtaatcccagcactttgggaggctgaggcaggtggatcacaaggtcaggagttcgagactagcctggccaacatggtgaaaacccttctctactaaaaatacaaaaaatagctgggcatggtggcgggcacttgtaatcccagctacttgggaggctgaggcaggagaattgcttgaacccgggagaccgaggttgcagggagctgagatcacgtcactgcactccagcctcggtgacaggatgagactccatctcaaaaaaaaaaaaaaaaagaatagtggaataccgtttcacccatcttatctctaattttttaaaaataagaatgtccaatgctgacaatcagtctggtgacagggtaaactaatataatatttttgaaaaataatgtattaaatattcatatcttttagcctactaattccagtgctcagtttttacccaatgggaattttaaaaggctgtaggtagaagatattcattgacatgttatttataatactgaaaaaaatgaaaacaacctaaatgccccaaagcagatgattaattacattaatattcatcgattgtgttggataatatgttgtattttaaatgatatttatgctgatgcataataatatggggaaatattgtataatgttcagtgaaaagaacaggatgcaaaattatataaattgtaagcctactgctctatgtaaaaactatatgtacaggaaaaaggacatgaggatttaaaaatctccagtattttcccatttcatttaatattcattttgatattttcaatgtcatgttattactcaaagcactttcaaatatgttgccttatttgtcacatttctctttaaaaaaaaaaagaaaaaaaccttgtgcttggaaagacttataaaatatcctaatgactatcaaacaaaatcccaaatgagagcatttgttatcattttggttgtaagtgcagggaatcttgtatatatgtgactacgcagctgaaatatgtagcagtcacagtcagggatctctcagcatccacactcgttctgcctctagctcccttccgaaaccacggctgcttccagcacctgtgaatatattgcacttataaaccattggcagcagagggaatgttattgaatatttgtaatatctgggggacaacccaaaccaatttctttttctcttaaattatagcatcaaaaaggagccatttattcaaatacgtgtgttctgtttctaacagagcaaattcttaagagggcagaaatatggtttatttttatgatatacatattgcctagtttactgttggattttataaatagtaccctttgccatatcaaccctagagcaagggtgaactgacattccattctttcagagagaaatgctgtatttctctcctcctctccctccattcctctttgcaaacctggtcactcctttgataattcacgacccatctccaccattaagagtctaaaatcctagtcaagtaataactggggtggtgggggagagagggagagggagagggaaagggagaaggagagggagagagagagagagacttgaggaggttgcacttacactccggcagtttttccagaaatgagggaggcagtagttcttacttttgtgatgtcaacttgtagactgaaatgcatcaaagctcctcttcttcttcttgttgacgcgagggatgtgaaatgtgctctagaatatgcattcagcgtggtcctttgttctaggtatgagcttttctttttctaaagtttttcggtctcgctcaaggaaaggaaagcaatattttgagattcttttaaaggcaccttccaaagcatttcccacagaaaaataccttcacagcccaacactggttatttcagtaagaatcgagtccaattttttccaatatggctgtatacattgcaggcccccaaatttgtgctttcatagtcatcgttaatcaaataggcagaaacactgtatttagggaacctgtgtttcgtgggctagaagtgcattctgattaataaagatcatgttcattttgaatgcatcgctgttattcgtgtgcctcagagtcgcgggcttctgtcaggggtgcagcgggctcgggagtgcctgcagagcggtgggaagcagttctgagcgccctggtcgtcaacccgttttcagggggtgccgacactttctcccaagaagctcgatccgccgccttgtgcggctggaaagaatgaaccagactgtgacaggaacagagaatttatgtgattgacagggagtaccagggcacccgactccatcccgggtcaccacggctctgggatttgcacgagtttaccaccaccattaacagctatttgcgtaaggttgtttaccgcctgagagcgccacaagccgacagcgaagccactttgggaccccagccacgccccctctcccctctcccctctcacccctccctcccgccaaactaatgatttcggggctgccttcttgccggaccctcccattggctcctatcccaaccaatcagagccttgcaacagtttcacctggctcccgcttcccaaataaacaaacaaactgtcccgcgactgtgcccgctctgcaccctggcgccgcaggcaggcactgcttgcgctacgccccctcccaccacctcccaccaatggggccccgactgtggcgccctctcccgaccctgatagccggccgctttctcctccgcccctccaggccttctcccgccccctcatgccttcctggactccctgttagaatcagcttggccagagagcccgcctcctcctctcggtcctcccttggcccacaggcctggagattgaccgggaggatttggcacagccggaggtggctccgcctcccgagcccgccgtctcctcccttgctcacctctactggtggccgctcgcgcccctccattgcgccggtagcaggatccgcagcggccgccgcgtgaggctgtggtcacgtgttgttttgcccgctgtcgtgcgctcagagtggagtgggcgggggcgcgggccaaggcaggagggggctggggcgggcagacgagggtagacagcctcttcccccaaccctccctttcctgaattccccctcctcctcgctcaccttaaaaccatcgtgcatcaccatggcgagttgctccttcactcgcgaccaagcgacaagaagactaagaggtgcagcagcggcggcagcggcagctctagcagcagtggtgaccaccccgcttctttcctcgggaaccccgaccgcactcattgggaccgggtcgtcttgtccgggagccatgtggctctccacggccactggctcccggtcagactccgagtccgaagaggaggacctgcccgtcggggaggaagtctgcaaacgcggctacctgcggaaacagaagcatgggcacaggcgctacttcgtgctcaaactcgagactgctgacgccccagctcggctggaatactacgaaaatgccaggaagttccggcacagtgtccgcgccgcggcggctgcagcagcggcggccgcctctggcgccgcgatccccccgctcattccaccgcggcgcgtgatcaccctataccagtgcttttccgtgagccagcgagcagatgcaaggtaccgacacctcattgctcttttcacccaagacgaatacttcgcgatggtggccgagaacgagtcggagcaggaaagctggtacttgctgctcagccgcctcatcctcgagagcaagcgccgccgctgcggcacgctcggcgcgcagccggacggagagccggccgcgctggcggcggcagcggcggcggagccacccttctataaagatgtgtggcaggtaatagtcaaacccagggggctggggcacagaaaagagctgagcggcgtgttccggctgtgtctaaccgacgaggaggtcgtgtttgtgaggctgaacaccgaagtggccagcgtggtcgtccagctcctgagcatccgtcgctgtggacactcggagcagtatttcttcttggaagtaggcaggtccactgtcatcggtccgggagagctctggatgcaggtcgatgactgtgtggttgcccaaaacatgcatgagctgtttttggagaagatgagagccttgtgtgcagacgaatacagagcccgctgccgcagctacagcatcagcatcggcgcccacctgttaaccctgctgtccgctaggaggcacctgggcttggtgccgctcgagccgggaggctggctcagaaggtcccgctttgagcagttttgccacctcagggccatcggcgacggggaagacgagatgcttttcaccaggcgcttcgtaacacccagcgagcctgtggcccactccaggcgaggaagactgcacctgcccagagggcgcaggtcaaggagagcggtttcagtgccggccagcttttttcgccgcttagcacccagcccagcacgtccccggcaccctgcagaagccccgaacaatggagctcgcctgtcttctgaagtgtctggttctggctctggcaactttggggaggaaggcaatccccagggcaaagaagatcaggaaggaagcggaggtgactacatgcctatgaacaattggggctcaggaaatggccggggctcaggaggtggccagggctcaaatggccaaggctccagtagccatagctcgggaggaaaccagtgttcaggcgagggacagggatcccgaggtggtcagggctcaaatggccagggctcaggaggaaaccagtgctctagagatggccagggcaccgcaggtgggcacggttcaggtggtggccagagacctggaggtgggcatggctcaggtggtggccagggacctggagatggccatggctcaggtggtggcaagaactctggggggggcaaaggctcaggaagtgggaaaggatccgatggtgatggtgaacgtggaaaatctctgaagaaaagatcctattttggcaaattaactcaaagcaagcaacagcaaatgccaccacctccaccacctcctcctccacccccaccagctggaggaactggtggaaaagggaagtctgggggaagattcagactttatttttgtgttgacagaggagccacgaaagaatgcaaagaagccaaagaagtgaaagatgcagagatcccagaaggtgcagctcgaggtccccacagagccagagcttttgatgaagatgaggatgacccatacgtgccaatgaggccaggggtggccacccctcttgtaagctccagtgattatatgccaatggctcctcaaaatgtctctgcttcaaaaaagcgccactctcgatccccttttgaagattcaagagggtacatgatgatgtttcccagagtgagcccaccacctgctccgagtcctccaaaagcacctgatactaataaagaggatgactcaaaggacaatgacagtgagagtgactacatgtttatggctcctggagccggtgcaattccaaaaaaccccagaaatcctcagggtggctcttcctccaaaagttggagctcctacttctctctaccaaacccttttcggagctcacctttgggacagaatgacaacagtgagtatgtgccaatgttacctggaaagttcctggggaggggcctagacaaagaagtctcctataactgggaccccaaagatgcagcttcaaagccttcaggtgagggatcattctcaaagcctggagatgggggatcaccttcaaagccttcagatcatgagcccccaaagaataaagctaagagacctaaccgactttcttttattacaaaaggatataaaatcaagccaaaaccacaaaagcccacacatgagcagagagaagctgacagctctagtgactacgtcaacatggacttcactaaaagagagagcaatacaccagctccctctactcaaggactaccagattcgtggggcataattgctgaacccagacagtcagccttttctaattatgtgaatgttgagtttggagtgccatttccaaatccagcaaacgacctctcagatcttttaagagctataccacgtgccaaccccttatctctggacagtgctaggtggccacttcctccccttcccctcagtgctacaggtagcaatgctattgaggaagagggtgactacattgaagtaattttcaactcagcaatgacaccagccatggctcttgctgacagtgccattcgctatgatgctgaaacaggtcgaatctatgtggtcgacccattttctgagtgctgtatggatatttctctctcccccagccgatgttctgaaccaccacctgtagctaggctgctgcaggaagaagagcaggagagaagacgcccacaaagccgttctcaaagtttctttgcagcagccagagccgctgtctctgcttttccaacagacagcctcgagagagacctttccccatcctcagccccggctgtcgcttcggctgcagagccgactttagccctcagccaagttgtagctgcggcctccgcgctcgccgcagccccgggcatcggcgcagcagccgcagctgctggatttgactccgcctctgcccgctggtttcaacctgttgctaatgctgctgatgccgaagcagtaaggggagcccaagacgttgccggtggctcgaaccctggagcccacaacccatctgcaaaccttgccagaggtgataaccaggctggcggggctgccgctgcagctgccgctccggaaccaccacctcgcagtcgccgggtgccaagacccccggagagagaagattctgacaacgacgacgacactcacgtgagaatggattttgccagacgtgataatcagttcgactctcccaaaagaggtcggtaattttagaattaatttccctaaagtgaatggtcattgtctaatgattcgatgcgctacagtctacagtgttagggatactatttcattaactggtgctattcgacatggagtatagaattcagttttaattattcacaaatgcctttttgatctttgcaaaaatttgtttttatctaatcaatttctttatctggacagaactgattatcatttaaacactggttctacttttttaggagtagttaaaacgcagacataaaaagcataaggatacttttaaacatccttccccatcatttaatgataatgtaaagcaggatatcgtaaattgggttccaccaactaattttcaaatcaacaattaaaagctgcttttctgcaaatgcccatatttaagtgtaggaatttaataagagcacagactattaagcagtaataatcaactatttatgtttagggaggataattttctcctctgaaagttactttttaaagagcagtcgttgttgtgctagtttgctgtgatttaccaagaaagttaaatctcaattgttaacgtgaatgtctggggggaacaaaacataaataatccaaaacaggaggtgattaaaagaagacagtatttggctctggaatgtgtttgtgtgttgattttctttttgtttttacacaggataaattccagaaaccttgagtgttccttttctctgtcactagtaatgacaggcaagtcacatttgctgtgcctcattttcttcttttaaccccccacccttctaaaagagggtgtggtgacaacttgagaatggatatgaatattatttcaaaggtttaaaaagcagttaaaacatttaattcatatatcttatgggaaatcaaggaaagcaagataaggctggaggaagacctgactccaggggcagcttaccctggaatggtggaagtttttaaagggctacttttccaaaggaagaagtaaggaagagtaggagctgtcagacttggaaacaagacttagagtaattctactgtgtacaacattgtggaatgttgtcatcagtgtgtcttgaaacattttcaagagatgattgcagaggatgatgtctccatagtctcaactaccttgcctcttaagtagaatatgcttctttcccagtgaagggaagggatggaccccagcagttttcattccagtagtcagtttagtgaagatttttgctttgcttgctttgtggaatgcttttgtgattggatctctgcccactgtgcttgatcaggcagaacaagtcgggcactgatcacaacagtcacctaacaagctccctatttaatgcaggtgtagcccccccacatcccctttttctccctgctatagaaaacttgccatacacaaactcacatttgcagcgtggacacattaaagagtgatcattaaaacaacaaaaggatgctttggcttgccaaaggattcaattcagacctcttttaaactgtgagttccctccccaacacacacacatacacacacacacaaacacacatgatcaccactgctaccataatcatacgtttaaaatatataatttcatttccaagtctttaatccataataagattttcaagagtagatctactttattctgtagaatatacctgaaaattgatctcaatctattgtttgagtctaactattgaagacaccatttataattttgatgtagatgatacacagttgcctgtgtccctgtagtactttcaaaaggaccagttttcatagaggtttattttaagaagtttaagatttaaatagtgaaatcttactgttccttgaataaattctgacttcccaaggaatacctagacacaatgatcattattttagcataaattcctgatttatgactttgtagctattttggagatttaacattctgtaaatgcattgtttattgaggaaattcctagctttattgagtgactttagcaaggaagctctatctcacagggaggcaggcgcttaggttgaaataagagaatcaacgtggaagcactttggaatgttaaagcactttacaaatgtaagatatttttagtgtcattggattaatactgaagtgaaatttcggcagtttaaactgattcagtttcttgcaaaataattgatcttgagggtgattcctgcacataatttgctgaaatacatgaaaggaatggtggggattgccggcgggggggtgcgggggtgggggtggtggtggtggtggtggtggtgttgatggtggtgaaacaacccattgtaggaaatgactttggttagcattttaatgtaaattgtatggtagaatgttgtctgtgaagtgttaagaacaagctgaatgattctgatccttttttattgtaaagctgtagaataattttcactcatttctgatctctattttcctatctaacattaaaacaaaaacaatcacgttaggaaacaaaaacataatgctttgacagaggaacaaataccatctttattagaagttatgtatttcaaaaagtcattttaattgatggcaggtgcttagaacagtgcctggcatatagtaagtactatacatgaattattttacagttattgccattgttattgttgctactgttattattacatttagaaaaacaaacctaaattaagattctccatctgaaaatctcacttttcagttagtctttacttgcatttaaaatactttacattattgttcagttggcatgtttatagattaccatttaagtgaagtgagattataaatctgtgagacagctgttctcatgtaacacaaaattaatatgtaattccatttacctacagtcacattgcgtataagtaagtacagtaaaggaatttactcaagtcgattagaaagaaacacccagaagtataaccttagacatgactgtattaataaatgaaataatttttaatcatttattaaagatgaagtcttcacattttaaacacataggttataggcattagcatttaggagaagaatgttgtttcttatgcagtttagtttgactgttaacctatgtatgactatttgcttctttttctaccttacctgatgtacaattcatagttcaaaatgacttgaggtgaacattttcctggtttttttattcaagagatgggaggatataaaagggcagctctaggaggggtgagagaatcggtcagccaaattagtaatgttatgatggcacttggtattaaaaagcaaaaaaaaaaaaactttagtaattaatttttcagtgttagacactgttatcaccatgaaggaatcatgcttcttttgagtgtactactgccaaacttgttgctatcagttataggcactaagagcacattgtttttattccattgaagttaattattataaaaatttccatatagcagaaatttcccagctaccattgacggatcatttattttaggtaatattcaacacctcaaaattggacagtgtttggactaatgaggtatttgtcctctaacaattaaagaggacttcacttaattaaagttaactaaagttgttcacaatcattattcatttgcattcattctattttaagagtgatgttttcagggtaaaaatttcaactactagcaaaatacttaccttaaacaaggaccagaactttaattaagcacaccagaatgtcacacatgtataaaaattcgaacgagatctcttactttctttttctctccctaatcccctgttttgggaacaaacttaggcttctcagagtgacaaaaaaataattcctgtgggaatagatgtggctgacgagtgtagggagaactaaggaatagtttatgtgatttaaaagggtctattgttaaattgtcaaattgttgattgaggaaatgctttccagttgcagattgccttatagtttgcaaagcacattcacattcattattttactgatggatggtaagtactggaaatgaagcccatgttgagaattttcccaagatcaaaaaggtaagtggcagagctgaaaatctaactcatacatctgatttcaagtccagcactccacccaacacatgacacctccctttaatcaggtgtttagtctgttattttcccactggtgacagattattacatggttaatgattaggaaaaaattacaagtttgctttcacttgatagtagcaaattttgttgtaagtaattcattcagagcattataactgtggactatcttccaggacctgggtaattttattacattgaactgtttgccctggctcttagaataaaagaatttgacttgtgctggaattgaatgttttaaatctgatatagggaggagttggttaatcttcactgcccaaacacaaatagtgtatgtatctatttagatcccacagaaacattgaaaggaaagaaagtgaattgagggtgcattcagtaaatttccattaatggtcatttctttaactgaagttagatttctttgattttcctaataattcattgacatttgggagttatagcaaaaagtcttttcatttaatttcttccttcattataaaatttggtattctgatctaaatcagcacagtaggcaaaacaggataaagtaagacaggtggaagaataagcagtgtagcaatagacgttcttcatttgtttaaaaagtgaacttgcttttggcagtcaggcaagtagattttagaagccttgaaaatcaaactctctccttgggacatagaaatccctgtttacaattaagttcattttgatttagcaccttttttaaggctttaagagtatataaaaatagcccagacgttttattggcagtattggaaaatagcttttgtaaaatgcttaattaaaactttcagtatattttctctaagaggtgctgccagactcttagatagtgaggatcatttactagaaaacgttgcttggtcttgaatgagaaatgagaaatttaagacactgctttttataataatgaaataaatacatcacaaagcactgagtttttgccacaatcattggattgctgattttaaagctattgataaaattgccaagaaaaatgtgcttgccatatgaacttaaaatatattctccagcaattctgcattgattattggtaatgtagctacaggtctcacatttccaccttattttggaaaaatagactcaacacttgagaaataggaatgtttaaagatgtttctagtgtaaattatatactgttttagatatgcatttttagagggtacctttcaacttctggctgaataattaatttcttttagaatggaaaacatgtacttaaatacttattaagtgaaatgagaaagttactgctattttctcttagcttcctgatacctctttcttattggttagggttgcattggttgtgttctgtgagtcttaccctcatgtgccctttgccaaacttgtgcccttgaattcaggcaaacatgccctttcctggtctctctctggctgaaaaggtgagggccactgtgggagtcctgcagggcccatagagggcttcgccagatgttgatcactcccagtacacagccttcttgcacttagcttgcagaggcaaccttccttgtagggatccttgttgtacagatccaaggctgtgctgcctgccctactgtcacttggcacagaagcagctgggccggtgtttaaagctattttcatggttggattgatcacaatatgtttgatgccagccacaccttctggatttaccgaatatctaattccctatatattgtagtcactttagctagttttgacaatttatataatttttctcctatgattaataatttcctacttatagacttgaaacttagaataacagtgaagtttccatctcacaattaatcttgaaaattgctcacatgtgtatccatggggcccttgaaagtctgaccagcaaatgtgattttttactcttgctttttaaagttttatgcctccagtcttgaaagcttaccaaccttgtcctcgcactcagagtcctgtgcccccacccacctccatgatgaagtccttattgttgctgcagcttttaccatagtttcccttcggctgtcaccctgcctccgactcttccaactggttgagtatgggggacacaattcctattgccatggctggaagacatatattcctggagtctcaaactgaaacttcacatacatcttccctcagaaatgatgactgggtatagtcaaaatagttctctgttagttcaggagttgcataggttaaatataggcatatctagacaaagctataaacctatccaccattaatttatgacattgtttctacaagataatttattctgagtttcaactaaacaatgaccttggaatatgtctgttttgtaaatttgaaactgcctatattagaattctagtaacttgcattctttaagttggcagtaactaggcagcagagtgaagtggcccatgtgtgtgttgggaagtagtggagaagctgacctaccatgaaaatcctgtagctgatctccatagagtttgtatccagatactcaagactggaatgcacatgcataagtggcccagggcctgctaacaaagggcaggtgtaaaacgattgagctgacctttgaggagatgggggtttacaagtgtcatacatttcccttacagattcttttgagcattctgtcccaaaactattgccattgtgggaacaaaggtattttatcatccgatctatgaaggagataatagtctggtataattggtgttgtaaagactagcagcgattattactagtttttagccttgagcaatagcacttaattttatcaagtcctagagagtcatcctcctctacaatcacagggcacagaaaagtatgatgatcctttcttattgagaaaaaacaaaaaaacctacatatactccagagacaatgctaagctaactaatataattgcattattatacattcatctttggcatgtatgcttcaacatatctttctttgcttcccttttttttttttttttttggtgctttacttggttgcccctgcttatgtgagctccagttgatcacaggggtgcagggatagcatgttgtcaaatgaacagagtgaggaatttgcaaaaacccttgaaaaacatttttgagctccaggaaaattggagctgaaaagataactaagacaataagtttgcagaaagggaaaagagaatgagagaataacaatatattgttataggttcacctttctctgagcagaggaaatactgctgtttcggacttcaaaatgtaatagaggcatatttatgattcatataaagaggtctgaaataccctggaggaactgcctacttggctcaccctacaaatttccagggatattgaagtcatctgtgcattattagcgtattaaagattaatgttcaggtttatatcattatataactcgaaacagaaaagtttacttcatttgtttttgagaaaaaaaagttccctgccagattttggtaggaggagtagggaaatattttgactcatcagagtccactgaggttttctatattacagagaaaaattacctgaagagtataccacccattaaaaagggtgaaattaacttgttgtttaaaagacctttgattaattgggaaaataagaatatacaataaggtaagtatttataacctgtcagtatcaaatgggaataatacatccaaaacagaccacattattacaagcatcaccatttaccttgctgatggtgaaatcacataaaaatgaacgggagacaaatctaaggtatgacttttagccctttaatattcattttgcagactgttcacaaccaagttttaatctcgaattgctttcctttgccacccagcaagcttctgagttgcttccttacgctgttctttggaatgtgccccgggaatgtaaactcattttaatattggcctaagtaaaataggattataaaggcaaatctgtggctcaagttcccataatgcatttcaaaagcaagttaaattattttgggattatcctgtttgggataacattattcctttctactagcatagttaatcaagaattgacaaatgtattttgtgaagtaaacatgaaattacacaattatttgtcactttttattaagttaccaaacattcacttaatgctggtgtaggtgttataggaaagcaatggcaatatgaatcaaattttagtagaggctctgtcatttaaaaaaaggaaagagaaagaaaaacaactccaataaaagcaaatgttcctaatcttagtataatgccaatagggtagttatatggagcttaatttgcaggtttctgggaaaatatatatgaaatccagtgtatcatataagacagcaagaagtcccttttaaagcacatgcaatgtgctatatatggacatatgaaaatatttttggtattaaaacaaaatagtaaactaaactaggtgaaataccttcctaaccttaaatatctattttaaaatgtagctgatatctgataacactgtaatactggtactggtctagcctaattttgcagcgaattaacagttactaatatgcagtctcacagttaactgtggttatcacagactcctttcttcctgtgtagaactagatacataaaatgtaaaatttcctaaacccactgctgacaggaaagcttaatacctttactaatctatggcatttttttgagacagggtctcactctgtcacccaggctagagtgtagttgcgcgacagggtttcaccatgttgcccaggctgttcttgaaatcctggcctcaagggatccacctgccttggcctcccaaagtgctgggattataggcatgagccaccatggctagcatttttttaaacttctaatctacaagaacaaacctatacattgaatcttaatgaagagacacaactagtaagagggaaatgtactgttcccactcagtgcttcatccagctgcaaatttgttacattttaaaaatccttgagcccaggagtctgggtggggctgcagtgagccataatgatgccactgctcttcaccctgggcagcatagtgagacctcatctctttaaaaaaattgtaaaacctttgatgagaaaatgaatacttaaaatgtatatttccagtttaatagacaatcttgtacttgaagcccactctgggggatgttttccatggattcttttaagatgtctcaaataaaatagaatacttggtactttgtggtgacctgatcttaaggtaacactggcatcccataatcaatttgctgatcatttattcctatcccttctctggtccagcaccttcttctatgtatctgatcaccccctgccacactccccattatgcacccactcaaaagcagaaagccaagagaataatgctggaacttttttcttttattaaacagatgggaatttcaagtctcctttgcaggtatgactttgttctattagaagaaattcaatgattgagtctagagaccatcaccaatgctgtacttaaatcctatgacttgtgccacataacctggtgaaggcagagtcaaacatgtagaagaagaagaaaaaaatctgtttctctgcacaatgcctggctcactcttgggctccactggaagaaagtagaacagtgcacgcacgtgcaaagatgctgtccaccagaaatgtcagtgacagcctgggggcaagaagaataactgcccttgtgtctttgcccagctgatattcctcacaggcagccagcagagttgattaaccatgtccatgcccaggcagtctcctctgtatatctctcaaaaacttctagttagattttgttttgttttgtgttgttttgttttaaaacagggtgggggtgacagctctccacattaattctgcaagtaacttttgttttattatctttttcctagagtgattatattgccacaaaaacacattttagaagaaaag

SEQ ID NO: 697 - DNA, 3928 bp, Homo sapiens
ccccaaccctccctttcctgaattccccctcctcctcgctcaccttaaaaccatcgtgcatcaccatggcgagttgctccttcactcgcgaccaagcgacaagaagactaagaggtgcagcagcggcggcagcggcagctctagcagcagtggtgaccaccccgcttctttcctcgggaaccccgaccgcactcattgggaccgggtcgtcttgtccgggagccatgtggctctccacggccactggctcccggtcagactccgagtccgaagaggaggacctgcccgtcggggaggaagtctgcaaacgcggctacctgcggaaacagaagcatgggcacaggcgctacttcgtgctcaaactcgagactgctgacgccccagctcggctggaatactacgaaaatgccaggaagttccggcacagtgtccgcgccgcggcggctgcagcagcggcggccgcctctggcgccgcgatccccccgctcattccaccgcggcgcgtgatcaccctataccagtgcttttccgtgagccagcgagcagatgcaaggtaccgacacctcattgctcttttcacccaagacgaatacttcgcgatggtggccgagaacgagtcggagcaggaaagctggtacttgctgctcagccgcctcatcctcgagagcaagcgccgccgctgcggcacgctcggcgcgcagccggacggagagccggccgcgctggcggcggcagcggcggcggagccacccttctataaagatgtgtggcaggtaatagtcaaacccagggggctggggcacagaaaagagctgagcggcgtgttccggctgtgtctaaccgacgaggaggtcgtgtttgtgaggctgaacaccgaagtggccagcgtggtcgtccagctcctgagcatccgtcgctgtggacactcggagcagtatttcttcttggaagtaggcaggtccactgtcatcggtccgggagagctctggatgcaggtcgatgactgtgtggttgcccaaaacatgcatgagctgtttttggagaagatgagagccttgtgtgcagacgaatacagagcccgctgccgcagctacagcatcagcatcggcgcccacctgttaaccctgctgtccgctaggaggcacctgggcttggtgccgctcgagccgggaggctggctcagaaggtcccgctttgagcagttttgccacctcagggccatcggcgacggggaagacgagatgcttttcaccaggcgcttcgtaacacccagcgagcctgtggcccactccaggcgaggaagactgcacctgcccagagggcgcaggtcaaggagagcggtttcagtgccggccagcttttttcgccgcttagcacccagcccagcacgtccccggcaccctgcagaagccccgaacaatggagctcgcctgtcttctgaagtgtctggttctggctctggcaactttggggaggaaggcaatccccagggcaaagaagatcaggaaggaagcggaggtgactacatgcctatgaacaattggggctcaggaaatggccggggctcaggaggtggccagggctcaaatggccaaggctccagtagccatagctcgggaggaaaccagtgttcaggcgagggacagggatcccgaggtggtcagggctcaaatggccagggctcaggaggaaaccagtgctctagagatggccagggcaccgcaggtgggcacggttcaggtggtggccagagacctggaggtgggcatggctcaggtggtggccagggacctggagatggccatggctcaggtggtggcaagaactctggggggggcaaaggctcaggaagtgggaaaggatccgatggtgatggtgaacgtggaaaatctctgaagaaaagatcctattttggcaaattaactcaaagcaagcaacagcaaatgccaccacctccaccacctcctcctccacccccaccagctggaggaactggtggaaaagggaagtctgggggaagattcagactttatttttgtgttgacagaggagccacgaaagaatgcaaagaagccaaagaagtgaaagatgcagagatcccagaaggtgcagctcgaggtccccacagagccagagcttttgatgaagatgaggatgacccatacgtgccaatgaggccaggggtggccacccctcttgtaagctccagtgattatatgccaatggctcctcaaaatgtctctgcttcaaaaaagcgccactctcgatccccttttgaagattcaagagggtacatgatgatgtttcccagagtgagcccaccacctgctccgagtcctccaaaagcacctgatactaataaagaggatgactcaaaggacaatgacagtgagagtgactacatgtttatggctcctggagccggtgcaattccaaaaaaccccagaaatcctcagggtggctcttcctccaaaagttggagctcctacttctctctaccaaacccttttcggagctcacctttgggacagaatgacaacagtgagtatgtgccaatgttacctggaaagttcctggggaggggcctagacaaagaagtctcctataactgggaccccaaagatgcagcttcaaagccttcaggtgagggatcattctcaaagcctggagatgggggatcaccttcaaagccttcagatcatgagcccccaaagaataaagctaagagacctaaccgactttcttttattacaaaaggatataaaatcaagccaaaaccacaaaagcccacacatgagcagagagaagctgacagctctagtgactacgtcaacatggacttcactaaaagagagagcaatacaccagctccctctactcaaggactaccagattcgtggggcataattgctgaacccagacagtcagccttttctaattatgtgaatgttgagtttggagtgccatttccaaatccagcaaacgacctctcagatcttttaagagctataccacgtgccaaccccttatctctggacagtgctaggtggccacttcctccccttcccctcagtgctacaggtagcaatgctattgaggaagagggtgactacattgaagtaattttcaactcagcaatgacaccagccatggctcttgctgacagtgccattcgctatgatgctgaaacaggtcgaatctatgtggtcgacccattttctgagtgctgtatggatatttctctctcccccagccgatgttctgaaccaccacctgtagctaggctgctgcaggaagaagagcaggagagaagacgcccacaaagccgttctcaaagtttctttgcagcagccagagccgctgtctctgcttttccaacagacagcctcgagagagacctttccccatcctcagccccggctgtcgcttcggctgcagagccgactttagccctcagccaagttgtagctgcggcctccgcgctcgccgcagccccgggcatcggcgcagcagccgcagctgctggatttgactccgcctctgcccgctggtttcaacctgttgctaatgctgctgatgccgaagcagtaaggggagcccaagacgttgccggtggctcgaaccctggagcccacaacccatctgcaaaccttgccagaggtgataaccaggctggcggggctgccgctgcagctgccgctccggaaccaccacctcgcagtcgccgggtgccaagacccccggagagagaagattctgacaacgacgacgacactcacgtgagaatggattttgccagacgtgataatcagttcgactctcccaaaagaggtcggtaattttagaattaatttccctaaagtgaatggtcattgtctaatgattcgatgcgctacagtctacagtgttagggatactatttcattaa

SEQ ID NO: 698 - protein, 1243 aa, Homo sapiens
MASCSFTRDQATRRLRGAAAAAAAAAVVTTPLLSSGTPTALIGTGSSCPGAMWLSTATGSRSDSESEEEDLPVGEEVCKRGYLRKQKHGHRRYFVLKLETADAPARLEYYENARKFRHSVRAAAAAAAAAASGAAIPPLIPPRRVITLYQCFSVSQRADARYRHLIALFTQDEYFAMVAENESEQESWYLLLSRLISKRRRCGTLGAQPDGEPAAAAAAAEPPFYKDVWQVIVKPRGLGHRKELSGVFRLCLTDEEVVFVRLNTEVASVVVQLLSIRRCGHSEQYFFLEVGRSTVIGPGELWMQVDDCVVAQNMHELFLEKMRALCADEYRARCRSYSISIGAHLLTLLSARRHLGLVPLEPGGWLRRSRFEQFCHLRAIGDGEDEMLFTRRFVTPSEPVAHSRRGRLHLPRGRRSRRAVSVPASFFRRLAPSPARPRHPAEAPNNGARLSSEVSGSGSGNFGEEGNPQGKEDQEGSGGDYMPMNNWGSGNGRGSGGGQGSNGQGSSSHSSGGNQCSGEGQGSRGGQGSNGQGSGGNQCSRDGQGTAGGHGSGGGQRPGGGHGSGGGQGPGDGHGSGGGKNSGGGKGSGSGKGSDGDGERGKSLKKRSYFGKLTQSKQQQMPPPPPPPPPPPPAGGTGGKGKSGGRFRLYFCVDRGATKECKEAKEVKDAEIPEGARPHRARAFDEDEDDPYVPMRPGVATPLVSSSDYMPMAPQNVSASKKRHSRSPFEDSRGYMMMFPRVSPPPAPSPPKAPDTNKEDDSKDNDSESDYMFMAPGAGAIPKNPRNPQGGSSSKSWSSYFSLPNPFRSSPLGQNDNSEYVPMLPGKFLGRGLDKEVSYNWDPKDAASKPSGEGSFSKPGDGGSPSKPSDHEPPKNKAKRPNRLSFITKGYKIKPKPQKPTHEQREADSSSDYVNMDFTKRESNTPAPSTQGLPDSWGIIAEPRQSAFSNYVNVEFGVPFPNPANDLSDLLRAIPRANPLSLDSARWPLPPLPLSATGSNAIEEEGDYIEVIFNSAMTPAMADSAIRYDAETGRIYVVDPFSECCMDISLSPSRCSEPPPVARLLQEEEQERRRPQSRSQSFFAAARAAVSAFPTDSLERDLSPSSAPAVASAAEPTLALSQVVAAASAAAPGIGAAAAAAGFDSASARWFQPVANAADAEAVRGAQDVAGGSNPGAHNPSANLRDNQAGGAAAAAAAPEPPPRSRRVPRPPEREDSDNDDDTHVRMDFARRDNQFDSPKRGR

SEQ ID NO: 699 - DNA, 124672 bp, Mus musculus
  misc_feature (1)...(124672): n = A, C, G or T/U
acatgcagaaggagctactcaattcattgaaggcaaaaagtaaaggaagcgaatacaggaagagtccatggagaaatgcacttccagaaaacatgaccccagcaatctatttcctgcaacaaaagtccactctcatctttgaattatctttcaataaagtcacctcattgtgaatgtaccaggagattagtccattgattcagccagatctataaggatccaatcatttcctacaagaccatcagttagcaaccaagctctcaatatagtcttgagtgagttagattatttaagccttgttttttcttatctgtagaactataatgatgacaacaacctcaatatcaaagaattctcatgaagcctaaatgatagactctccaaaagtctagcacggtactttctgacatgtagcaaaccctcaaataatggttagattttcattttaaatgctacatcattaaggttccattttgagggggagtttgtccagatctaaaggtatcattattaatgatgagaacaaacagttttgaacgcctactttgtgtcagatgtgataaagaggttctaactatgacttaatttagtccttaaaacaactctagaggaagctaggagtggaggctcactcttgtaaccacagaacttcagaagtagaagcaggagggtcaggaactcaagttcatcctgaactgtacagcaaatttgaaaccagcctgggctacttgaaaccttgtgtaaaatcagtcaatcaatcaatcagtcaatcaaccaaatgcaacaacaaaagataaccagggaaaagacacagcagtagcatacattgatatgtgacctttccaactcccaatatgccctttttgttattcttttctttgactaggccgacacttgattgcatttcgtagtctcccttaaatctatatatggccatatgactacattttagacaatagaagtgaggtaacccaataacaaaataactcacacaatatgtactcactgataagtggatattagcccagaaacttagaatatccaagatataagatacaatttgtgaaacacatgaaactcaagaagaacgaagaccaaagtgtggacactttgccccttagaattgggaacaaaacacccatggaaggagttacagagacaaagtttggagctgagatgaaaggatggaccatctagagactgccatatctggagatccatcctataatcagcttccaaacgctgacaccattgcatacactagcaagattttgctgaaaggacccagatatagctgtctcttgtgagactatgcccgggcctagcaaacacagaagtggatgctcacagtcagctattggatggatcacagggcccccaatggaggagctagagaaagtacccaaggagctgggggcatctgcaatcctataggtggaacaacaatatgaactaaccagtaccccccagagctcatgtctctagctgcatatgtatcagaagatggcctagtcggccatcagtggagagagaggcccattggccgtgcaaactttatatgcctcagtacagggtgtgtgtgtagactgttttagctacagttttaaaatatctctacattttgaattcacagctaccagttagacaaggctcataggataataacactacaaaatggaattagattgggtctttgaatgacccaatctaattggctttaagagagccactttaaagagtggaagacttaacaactcttaggtaagaaactgaagcttacagagctgttacatctttgaatctacttgttagagcaagtagtctaaatcaatacaaatatcatgctgagttatttagaccttctctctgtctctctgtctctccctttctctgtctctcagtctccctcctcctctctccagaaaagaccgatttatttatatttcatgtgtgtgaatgaatatttgtttttgtgctcaaatgtgtatgcagtacatgtatggcattcttttgtttaaatcctaacaactgttttataaagcatatactgctgtccaactgaagattaaacaagggtgaggttaaatgacatgtttgaagttgtgcagtagatgaacaaatgttgtgggaaaggcctaagaatagatgcttcctgtaacctcagccaagctatgtgccaaggaaccactaggctctgttgggattctggagagcaaacatttgctgaaccagtaggaacacaatgctatcagatatattttctttgccttcaattaggaacttttcagactccagttagagcatctacatcagccctccttgttctttttactgattgttctgtcttactgatgtccctatttaatgagactagaaaagagtaattgatatttttagatataagtatttgtgattttcaggatagaagtggttctgtccaacaaatgcttgtagattaacttcacagaagactttaataatggccatcaaaggcataattccaataaagataatcataactagcaataagagctctaaaaagtacccttaattaaataacagctcttctttgatccatcattcctctctaactactgtttcatgtctctgtttcccttcagaaccaaatatttttgacagaattgtcaatgtgctcctcagcatcccttttcaacccactctgatggagttcatggccccgggacttaaagaaactattcacatcattgcagcaagcaacctctatcttgcccaatctaatggatacttccctatttctttttatttgaattccttgtgacattttaccttattaaccattccatgcttcttgaaacattggcctagggggagggggggtaacaatatgatatactaactttcctcctatgtcactggtgaaacttattttcttcataaaattattaactaaaggttttatcgactctgggtttggtgtgtgtgtgtgtgtgtgtatgtgtgtgttacatgtttgcatgcatgtgaaagcaggtggctgttgtcttcattgcttagtctccatcttgtatgttgaggcaagtcctttcactaaagcagagttcacacatttggctagcctggttgacaagcttgctcctccaggcattcacgcctgtctctgcctcctgcacactggcattatatgctaaaactgtacaaatcttaagaagcagatatgagtgtaaatcttcattatcttctatttggctatagtttattagataaaatatcaagagtataaccaatatgagtaaatattggtgaactggaatattaataataataattcataatgatgtggaaaattagaatctgcacatactttcaaataggtttgtaaaaatgctgtatccagtttgggaaaatggtctcacaattcctgtaaaggttaagtgtgattaaacatataacccagacatttcactactaaatgtataatcaagaaaaatagggacatatatttacacaaaatgtctgtcactaatttgctaaatggacatggtatcaaactgcattctaaatatttatctctgtacccatagattagtgcagctttcagccctcctaagagaagcttcttttttgcagtggatggtggttaatccagagactcacaagtggtcagaatgcaggacagtaagggactgtggaatgttcagccctaaacgggattatctttacctctatacccnnnnnnnnnnnnnnnnnnnngacatgacaggactgataagctcaggaactctcagcgactgtggctacctgcacaagatcaagtcagtcaacattccgtcgacagttagggagagggtcacaaggccccgcccccagctgagagctataggcagttgattactgcctctggagctggagttggggagaaaaagcaggaaggagggaggagggagagtcagtttctttcaggggtgtggcctctggtcggttgcttctgctttagtggatggttccacacccatgtacacactggcaacacttgttggattcagttggtcatttaaataagtcaagagaagataagaggatatgaaggtgggagggagatatgaggagcaagggtgcaggaggagttgaaggatcaaatgataaaaagatgtgttacatattataaatatatagatgctgtcacgtggaggaattttgaaaatattgcgctaatgaaataagctgtacataagacataagggggcaaacactgtgtggttccatttgtgaggctgagaaggtaaatccacctagaaatagaagtaggttagtgatagtttgaggcaggaggcagtgagaagggcaatgaacgggaattggcatagggttttcttttgggtgaatttgtctcaagattgatagatggatattctattctaaatgaatgtttagaatagaatattctaaaacacagtgagttctaaaacttacatgagtagtttgtatgccttttgggttgcatctcaataaagaaaggaaataacaaaagatgagtgagagaaatccagagcgggataagagcatggatttcgagtgcttttgaaaatccacatggtcttatgaggcatttgtagtagaaattgcagcttgggttctagttagagaagcccaggaaagaaagccagaactcctagtggagaattccttgtggatgcaggagacagctggggattaagcaacagctgacttgtcaagctttgtgtgtgtgtgtgtgtgtgtgtgtgtgtggcatggggtgaactgttcaaaagaagagtctatggcatgaacagtcaaagctggctggacagaaactggcttaatggcaccactaggaattggggatgggaatccaggagagtaagcacccagagacggaagccctcccaaacaaacaccatcatcatggtgtattgcccctgttgacagaatgagacatacattgtggacctttaaacaagggatatagggaaacaaaatggattacatttcaatcccaattgcgtagaaactatggggctcagatttgcactcctcagtttcatcagtgagtttgaagcttaaattgtgtttttgcacaaaagagttttaactcaaaatagactttcctcactttgcccaacctgtgccttcaataaactggaataggtttcccggaatgtgatgggattagctatagaaagcaactatattttaataattaacttggaggctgggtattgtagcatgttaacttctataccctaatggatttttatataaatgccttaaaagaaaaagaaacaatcaaattaagattgtccaaactacatttgataccttcatgttttgcttgctatcactggctccatataataaatattcttacatcatctcttccctgcaaagttcaccttttgtaatgtacaatgagccagctctatcatttgttcaacactcacattagcatatcttagtctcattgaagaatttaagtaactctgtctcaaggaaataggtagcaaaataccactcaataagtgtgtattccagtagactatagaaaatgtgaatagggtaactggaacacagaaaatccagaaatactttcacctataaacatgttctttagataaagcactgatttaaagggcaagaatgcatgtcattaccaggaaaacgaaaacagattaatcaatttgaattaaaaaaatcaggtaaagaattttactattgtcacatattcattaaacataataaaggaagtggtcttcactctaaccaccacaaccattggttacatgtgtacaaggttagatcaaagtgggagctaagaatattccattctccagttgttcaagggtgacagttgagcaagctggctagcagaggagaaaaaataacacttgtttgctcctaaatgatgttttgttttcaattaaacaatgcaaatgcttctcatctcaccacaaactccagaattgcaagaaaataattttgcaacattatgaagtccactatcacatcaaattacaattattcttgtattccaaaaagaaaaaaaaaagccttgtaaatatgagaataaattgaagcaatgataaaataatcagtggcccttggatttaattctggttttagtttaccatgtaataaacgatgtgcatattctcggtttgagtagttttcccactgttgtaaacaaaatgcttgacaagtttgttaacagcagtttctaggcagatgcagaagcagagatggtttcaatttgaatgtccactttgaatggtgatagagagccagagacttatttactttcttttttattgcttaagagaaatgtgaaatctttagcttccagcttaacagtcagttacaaagagcaaaaggtgctttacaggttcccctggaatgtatgatcactgcactcccagatcaacagaaggtggaaacaccacactatctcactttgacatttgtactttgagtcaagagaatcttgatcatggtcagtttcctctcccctatgcaatttagagagagagagagaaagaatttttgtaaaattcatatgtttcaatgttatccgtgtatattatctgtgtgtgtctatgtgtgctggtttctgtgctcgtgactatccaaggttagtatgggacaggagctaagctagaagttaacacacgagacatctttactccttctttcccctccttccagacaacccacacaaggaaagcctggagatgagtaagctccgggagtcgggtgatggtgtcttttctgcattgatcacatttaggtttattttccttgtgatagtgaggcttggagctgggattaaaaatccttgggggaaaagctatttttgtaattcagcgggagtgtccttgttgttggattttcccgttgcatcagtcagtccctaagcctggtaaggcagctgcgatagtttgttatcttttaggtgaaatgtacaactaaggacatgactacttgtgcttattaaagatcccttgctattttcacgagagtaggggcgttagactcttgtctactggccaaattctaaatcaggagattccattctgctttcttacattccctcagcagaagcagtacccatggtatcctactttgtagtgtcataaatggttcaggttttatactccacaagtgctctcatttgggggagtgtgagaagtaaattgacacctattgtataacactctatttgatccacttgcggggacctctctattttattgaggtacagttgacaagcaaggtctatttgtttcaggtttgaaatttgatgtcttactatatatatgttactatatatatgttactatatatatatatgatcctcataactgaactagataacatagtcattatgccataccagcatgattttctttttctttcttttcaaactaatttctttaattgaagtataacagttgtactcatgtgcagtgttatttaattcaatacatgtatcctaagtataatgctgattccgttccaaaaagtaggctcatatgtagaataaggacaaagcaaaaacaaaatccacagtgtatcagttatggtacttttaatttttacaagtactttgttttctctttttccacatgacaaaagaattggcacacttttactccaatagtagcttataacagttatttgcctcctttatcccaaaccagttaaatcttccttctcctcctcctcctcctctaattctgctttctcttactgtctgattttttttttttttttgacacaaggtctttgctacgtagcttgtgttaaccttaacgctgaagttgtgactttttgctttagtcttctaagtactgggattacaggtatgtgccactctgcccaactctctgtgtgtgtgtgtgtgtgtgtgtgtgtgtgtgtgtgtgtgtatagatagtatttagctatcctcattgatctctccatttcatacagggttttttgggggggaggggggagatgcatttctttcttgataacatatctcagtatttttcaagctttcaatccatagaaacaaacttttcacttcttggtactacttgactagagtataatgtcacttttttttctaactaattttgtattatatactgtgactgagcactagtgtagcatttgtcaggcaagcactctaccattgaccatctaaacctccagctctgtgacacaggtttaagaatgggatatgcttgcatttaaatcatgattcggtccctttctacatgtgtaacgttgggacaagctacttaacgttttaactgaggaatttcacattcttcccgggaagatcaagtgagatgatatagtactttctagaatgattgtgtaagataggtataatactgccacctaaaaagtgcttagtaaatagctgcaatttttctgaccagatccacaggtctgacttaatttataaatataagagtgggaaacatacatatttttttgcacnnnnnnnnnnnnnnnnnnnnatttttttgcacatgtctctgattttaccagaagtgcactagggtgtaaacagaggctcaatggttagttagtatgcgaacaagcctctcttttctacagcttgagtttaataaaaatgctctcacctgtttgtaaggtcccacacacttagatcaaaggtgccaaaatccaccctctactgtttgcagacagacagactcctgactttgggggggggggtattttgacaccatgtagacacaatggagatcagttattttctacttggtttatttttaaatgaatttttacagctggctattgtcattttacagccccttcttaagtgcccaaaacaggactgactcaatcatacacctccccattcattcaaagagttttgagacaatttcttaaaactgagaattaagaattgtctcattatacatctgaacaaaatcttctaacttgcaactaaagtgacactacctgacttatatatttatctccaaggtctggacattgcacttatatttcgaatctctttgttttcgaatctctttgttttcgagttccaaacccgaaaagcccatggctgtaagtctgaaaacacaaggaacatctttgattctgtggggtgtttgtgaggcacgtatttatatatgtattcttgctttttaatggtctctctggactacgaggagaagatggagggatatacaagatatacacattgaattggactttaatatttgtcaattagaaagattaaagttttgcatttttttagcaaaatctcagaaaaactgtggtgtctggctaggttagcgttaaagacactgtcgtgtggccatttcccggatggcttttacagtggctgtctcaggtgtggagctccaaggagcacctgcttgctcacactcttaacagttcagaaccagtgtatttgaggccgggtggctcaggttccacctaactgggctcgagtgtcactaacactacatgcaatggggtatcaccaaggtgcgctttggaacttggatgcttatttcagactttctcctttctttccccctttcactagtttctgtccccctgcttcttcttggagctcgcccatctcctcttcttcctcccactcctccaagtcttgttctctctctctctcttttttcttttttttttttaattttgcctttcccttcgcttttccgccttccatcctccgccaggaacccggctcccaggaggcgcgagtcgggcgggacccaccgtaggcgccaagccaccaaagctcgtggcgcgcgccgcaggcgggggcgcgagcacgcccgagagccttggcggggctgggcagcccgggccgccgagccgcgtgtgcgcgcagaccgcgagccccnnnnnnnnnnnnnnnnnnnnnnnnnnnnnnnnnnnnnnnnnnnnnnnnnnnnnnnnnnnnnnnnnnnnnnnnnnnnnnnnnnnnnnnnnnnnnnnnnnnnnnnnnnnnnnnnnntcgcccccctccggctcgggtggtggtggtggcgcctcctcctcctctcactgcagcggggagagccagtgccgagccggggagctgggactaggaggcgccgggacgcggctcaacggactgggcgggctgagcggcggcggcggcagcggcggcggcggtggctgtcccctctctccccctcaggctgcggcggcggcggcggcggcggcggcggcggcggcagcggcagcggcggcgggggcatctcgctgtctccacctctgagctgcggagtgggaaccctactttctactccggccgccgccaccgcctcctcgccgtcctcctcgtcctcatcccccggctcccggaagatggtggtgtcagcggagatgtgctgcttctgcttcgatgtgctctactgtcacctgtacggataccagcagccccggaccccccgcttcaccaacgagccctagtgagtaccgcgctccccgtcgccctcttcccccgggctcgggatggggctcagagttgaggcaaagtgtaagtcctccgcctcctgttcgcgggtgcccctctgtccctcctgcctctagggtccccagagtcgcccgacccgtggggggccctcggcgctcctctgctccacgaggagagcaccctaccctcggagcagggggctgctttgccagccatggcccccctggcttccagactgctcccgcttcctctttgcgctaacttccaggagttttgccccttcccttcgatcctttctacccctcaccctccaccccaccagcgtctggggcgatctggatcactgtcggtaccgacctctcctcactttactcgccattgccccacgtgaaagccccgccagtattcccgccccgcgtaccttgcacatggagagctactatcccattgcagggtgaaaaatagcagtgatctaacttctattctgctagtgatggaacttagctctcgatctccagggaggttgcccatcttttcctccgggtttccctgttcctcggggaggggagaggtttcttaaaacaccttttgccttactacctatttttatctgaacgtacccattaaaatgcatttctagtgaagctagcgcaccacctcacagttgagagtgagaccttttttttttttccctcttccttcttcattccagtgtcttggtatagcacattcaaagaatgttgtccccaaagaggcactgtcaatatgtaccaagcgtgcgttcgcttttgtgtagatttcacatttaagcaacctatgttaaactcaatgattcgaggaatagttaacccagtacatgtgtaggcatttttacgatttcctttggcttttgtaactttacattattttatccttcaagtatatggttgaaattgtttaaaatagcactgttacaggctaaaagccaggttacttctaatctctgtccatttggatgtgtgggagatggggcatatggtttttcttttaaaatgtgtaaactgagtgtaaactgactttctgagttaaatgctagacagaatgtaaagtacaaaggaaggcagaatgggaaaagggacgattgtttttattatgactactggcatccacaagaaaaatacagaaaaaaaaaattaagcacactcatactgaaaaccatcaaccccatcccttctgcccaagagctccttgtttcccacagcgtaaagacatgaattgatgttcattttaacttgctgcctctcattttgtgagattagaagaacgaactactactgctggataattatagtagtctgacgctactaaaatattaaattaatatgtaaagtggaaattgcaataaagtgtcctggaaattgtgcgtttgtattgtttgttttctttgctttcattctttaaaatgcctttaattttgtcggactccgctgtgctccggacatttctttaggtttcatgaggaatggacgagaaggtgcccaggtggacactgtggagtgaatgaggggcgtttggaaagttcctaatgtgaattctaggagcttaaatcctaaatctccacctttaattggcctatttatttttcattaagaggtaaaattcatgttaaaaggaaatctgtgagatacttaggtcaagtcacttattagtggccttctcttgggtggctggggtgacttttaggctggctctggaaagtcatgggattgtcaaaatgtactcctgttcagttcttgagctgttacatagttctgcagaggctttttagcattcatgccccattgctctaaagcatatgagaacacactttcaggaggtgcaattttctcactttttagagtgagtgtgggttaactgaataactatcacagtatttaagaggaaaatgagcttgaccaattcataaggggaatgttttaaaaacttattattactattattattattattattattattattattagcagtggccacgttccacatggacttaggtgtttcccttttaatacccgagttgctgaatttttgcctctcaggtccttaagcaactaagacatgcatctgaccactgtgaatacattgagatggtggtggaagaattgtggctatgaggggttaggaggctttcagtgtgtcccatttctacagactagctagtttatagaaggcactgaacctcagcaaccagagaatgaagaatgtctctcctttccatttaaactgatttttcaagtgtacgatgtcaaattcaagaacatcttcctgatggtgggagtgcaataactggatatttcacagtgccttggaaaagcaccacacgtttctccattttatgagtttgatattgtgtgcttattcttgtggcactgtataggcttaaattgtttttctttttactccactgacttatgggaataatgtcatgggcaatatgtttaaagtctttttttttccttgtctagcagaagatgtgcttctgacaatatcaaattatcatatgtaaaagcatagagtagtattgtcatctcctccctaggaccttactgtcagaatgcttgtaactggtgggatctgacatttatagatttagaagtcaccgctacatctgttaaccctgccacagtaaaaggtcattagagaatttaattatttatatgtttttcagggttggggaagaggtcgtttgtgaaaggtcacgtagatgcaactactccatgcttgcccccgtcttttgagtacccagccattgcagagagcactgttggttttttcctccagaaataaggttcaagatgcaaggaaactacaatgttaggtacatcttcgtatttaacagtcaacgcacttctgtgtgaggaagctggtaaaagctactttagaagaacctgttggctactctaaaggttcccctgtggcaggtgtggagccagttagattccagaacattccttctcaatcatggctacacattggaatcattgggaagttattcaaaacgtggatacctgtactctcaccaaagattctgatttagtccctcatggatgggacctggggatcagaattatttaacgccccccccaggtaattttagtgtgtagcatggagaactgctgactgttttctaggtttttaatttgagatttggattaatttgatcggggtagtgccacagactccatattttatgagcatcttgggtaattttggcagacaatcaggttgggaaatacttgcagtgtggtccataaaagacatcacctgggaacttattagaaatgtaggttcccaagccccacctcaacaccccctgaattagaatctgcattttaacaagctccctaggtgattctcatccacattaaagtttatggtggacttgttctctgactttagcatacattgtagttttctgttgtgcttgttaaaattgcaagttgctgggcactttcccagagtttgatccagttgctctggggtgaagctgtacatttgcatttctaacaagctccctggtgatgctgatgctacagttcccagggtcacaccctgagtaactggttagggagaaatgagggcctgcatgggtgcgtgagtgactgactgtggcaggttggactggcatgggtctctctctgttttcctgtcctttatcactctcaaacatcactacgggaattgagtgctaccaagagcagaaatcagattctggggatggtgtggggcaggggttactctaggaaacttgttatgtgattttaggtttttcaaggaaagtgaccatgtgaagggcatatttcaggagttaaaaatcagcataaatagactatcttagcatgagttactgttaagtaaagacccctcttgtctccacgaaagtacttttttataggtgataagattttttcaaagcccttatgtatacttctgtttgctggaacttatttaaagaatttccctcattagtaaagaaatatgaaaagggtcccagttaaagcactgagattatatagtcttaggtttttaatgctgtggtataggttatatctcatgaaccttttaaattattgtaccatctgggaaattaatgtaacactagatttttttgtggacatttacacatggatgttttgcttttaaatatcagtaagtgtgattttctgttgcaaggaacataacctttttttaaaaacccactcttggacatgctgatctcgcaacgctcaagtcagaggatgcagcattaactcttgccttactatgagaataaaatgactgtttcaacaggcttgggaggtggagggttgccttgagatgtaagcattgtgctccaccggagtagtagcaaccctgcttattgaggatcatcaagatcaaaaagatgatttgataatgcagttcaggtcaagtgatagtaaattggcattgtaaacatacacaattacatttctattgtcttttttggaagaagagggactaaaataagtagaaagtgtgtctctactgcagatgatacaactggaccatgacagattttcttatccatactagcataatgggactaacttcctttctctgaccatatggtatagttttttttttttaattataaaagaaaaacattttttctgacacttactgagacttttgaaggtataatatggtttttttgcaccaatgttgatttacattggagaacttagtgtctcttcttactgatagagaagacagacatgttctgttattacttgtgccacaaaaccatcagtgactgacacagacgtgtaaaaacatgaattacaaaattatttttaatctgtacatccaggtgtatatacagttgagtgtatttaatgtaaaaagtagagctctttattttccagtcttccccatatggctgaaaggactgataatctaacccataaattttccttgcttataaattgtgcttgagttcagattccagttaaagtagcaggctaggaggagcctctgctggcttctctcagttctatgggaagaaagatcataaacaaaaatgtaaaagttactttgctaacacatgtatgagctgcttttctaagtatgtttttctcttttaaaaactacactttctgaaactgaagctgtgtcatagacacacaaaacctttttggctacaatggattgtatttttaagtcagttgtgtttcccctttctatggataaattcgctttttgacaacgcatatgtatggaacactaaacttgtgtaatgagattagtcagagtgcccaggtttcctggatttcaataggcattattctgtgctttccatgtcacacatgcttgcctgttttagagcagcacaatgcccagagcttttacatttacattttgtaagtagtctctttttcaaacttgtgtaataatgtctttttatactgttctgaatcaattaagctaagtgaggactagcagtaaaaacaagtggctgccaagaatggaccttcaatgtgtaagctgtccttccacattcagtaattgggcggttgctcacaagacactggagactgtgggaaggcagtggttgtgtaggtgggaagactagattcccaacagtaaacttatttagagttgagcttctgtagttattgttgctaagagcaaaacgaatcacaagcttatatagtataaagaaaaaaaaatccaaagcaagatgtatggtgtaatagtatattgttggttgggtggaggaaaattatgtttggtccaactataagtggcatttttgtatcaagtgtgggtgtattttctacatttcttaatatatcacactttaaaacttgcccaaccttaaaaatatgttagtgttgaatatctgactggaaattatgtgtcaccacaatctctctctctctctctctctctctctctctctctctctctctccctctctctctctctctgtgtgtgtgtgtgtgtgtctgtgtgtctgtgtgtgtgttaagcgtatggagaaaaatggtcctatccccttaaagtttcctatcttcttcaagcaatgatagaaataaggaagttgcttataattatttcaacacaatgcaggcctgctcagttaataagatacaggtaaaataaaaaggcacggcataaaagagggaccaggaaaagatatgtgggaggggatgacttaagtcttttttttttttaatgggaaaagcacaggggttgaagagctttcgtggccaacagagattgaactctaggttgttctcaaaccggttgctgttactgccacaccctttccacagtgcacagggattcccagcagctgtcttcagtcaccagcttgctctctcagcattcttcacaccattctgctttgctgtggtctctttaattcataaaaacttcaaagaaattctactttgtgctgggagttcccaggggagtctggatgagaggttttgaattagatgatcatttcttgaattagagatcaggaacataagagaggcttctgcagtgtaagaggaattggaagatgagtcttcagataggagagagtggctaagatggcgtggtagtcggagagtggtgttggaaagtgggcaagttgacactgagtggagattgtgactgtgagagtgttgcgaaatgaagagctggaagaagggatcagcgttttcaggcatttcttcctggagggccaggttttgtgtaggagtgagaagattgcagctcacctgctttctggcttccatcattgcctagctattctgatgcgcagaaaagatagttaagccacggtagtagaatggctgtgtaatctgctcatgagtacatctttcttaggagaaagaagactgctttatagaattaggatcaagtgtaaagatgagatagtttttggaaggggttcttaagtgaggtggctgcatatgagtaaacaaagcaaaactgagggacagcgcactcttcaacattccagttgctgggataggggaattcaaagaagagaggatttgaacatgagtcagagcttataagactgaagcccatggcaggatgcaccagagaaaacaggaagaaacaaatggtccaacaggtgacatcatgtttcttggtatgtatcgttcgatatgttggcagttactaaatggcattttttaaggatttttttaaattaatttatttttttacactcccacccactcccatccacccacccggcatttaattttattttattttattttattttattttattttattttatttattttttttggtggcgttgcttctccttctacctttacaagggctcaggggattgaactctgctcaccagactttcattttcatggcaaacacctttacccttgagccatttctctttaaattatcagaagcacagagcagccacagcttttgtgatgttttggttagtctctggggatcacttctgcttcttgagctacacagtgaccgtgaactgctcagatgggcagagatcaatgagagttttcagctttgtactgctagtaaaaactaactggcagaaagttgcatttccctactgtatgtgtttttacagtcaatcttcaagcttgccaatttgtgaagcggtcagtgatttcttagctttccttagttctgtatcataatacagccttcagcaaacttgtctcatggaggattaccaaaggaagttaattgtttcagaacctcaattaaaggggaataaaaatgagggactaggagtgttggtactagatgctaggttgtgtgtcctcaagcttagaagggaaaatagattgaaacaaggacactcttttgcagctttgctcaacaggggaggaagggtgttatcaattgacaggattagccatattgctttatgatctttgctatgggacgttgtaaatgtcctgctccaggccaggcctactaattagttaaagaataaggcctgtgatagtcttggtgattcttgccttccccttgtccatttcatttttcagataatctacagtgtgacccaaagccacatgcaatgctggcaaagcaaacttgactctgttaggcaatatcccgccagaagatgctgacaagctctctagtaatggaaactggcgacactgacttcaacgtctctagtttgccttgccattccatatattttaatgaggtctgtaggcatatgctgtacaattctagaaccatatttgccctccatcggggtttggatattgcgaggttagctaacaacagaaactgttttcctttaggtgttagtggatctttgtgtcattcttccagaatggaagctgagacaaaaacaaacctttggtagtgttggcttaaggtttccacaggattgtgtttgcctcatatgttcatgtgattgtcacattagtgtgtttcttctctgtaacatcatttttgcttatagtagcctaataactacacagttaattatagatgctttggatacaaattaagtttcgtaaatgttggtaaagctggacctcgatgcatagatccatatagtaaggccaccatttgtgtgctgaatttgcagttaggaggtaagtatttatatatgatgggtgctcatacatcatttttcatgttgataagtagagaatggtatagatttattcgctaaagatgaatcttgtgacgccatttgacctttttctttgttacagtagtgctttcaacacattttaagagttcccacattacaaaaacaaaaaacaaaacaatgtttgttgaagttagttagcagtagggtctggggcagtcagtagttaaccatctacttctgcagccctgcatgcctcagttcaaaacccctctcaggaacaaatgggagcgagagctgacattaaggaggcaatgtgtgctttgtggtctattttactccacaaactcccccagcttgcttgctttctcatctgtagaaagtcacctagagctagaggcaggaatagagggctcatgagaatcaaggagtggaaaaatgacttgggagtgacatgaccaggatttaggaccgaactcttttgactcagctctgagtctgagcacatggtccagagagatgagctccaggaagcatggtttatagcgtatgcactgagatagttctccttcagcaccagtgggcacggcactcctgttcaaaaataattattttaatcagaaacagatataagagtgccaactgtagggcctctgagtaatttcagcagactgcattgaaaaccattaacacatggtttcatcagaatgaggccttggcaaatatttgaaagctgtaagacaaataactttaccgtagttataaatgcctctgattattacccttatttttcttatactgctgtgaatatagttagagattcttggatattcagctataccttatttttctgcctttctccctccccctctctctttctctctcccccccacagccttatctaaatgtgtgtgatgtttgcttttttgtgatgtttcttttatttagttttctcccgcttgctatttataacagattatgggacatgtaatattagaggacagacacaactataatttttatccctccctccttttcatagtacttagtattgaatgcagagcatccttacccctgtactataatttctgtttgcacagttgcataacatagctgtatgaagactcatccttctatcttatacaccttttgtctcccgtgacccttaacaacctaatttgtacataatattcccacagtttcagccatatacatgcttctgatttttctgtattttacatatatgagactctgcctactgtggcaaggagttacctgtttctggtttttaaaaattattcattttaaacttgtatatatgtacatgtctttctgtctctgtctgtctgtctgtctctctctctctttatgtgtatatatgtatgagtatcccagtgctgttagtagacttttcttggttctccaccttattcattgaggcaaaaactctccactgaacctgtagttccctaattatggctagtttagctggccagcttgctccaaggatcctctacctctgccttccaaagagctggaaattacaggtggcccaccacagacatctacatggtttgggggagggtgtccaagcaccagtccctatacttgctgggctgtccatctggactagtttttgttttcttttggacccagagtcttactctagcctaagctgacctggagttcactctgtaggcaggctcagcttcagattgatggtggtcctcctaccttaggctctcaagataaaatgatggacatgaactgccatgcttggctactttaattttttattgtagtaaaatcctaacaagatctttcctcttagcaaatattaaagagtacttattttctaattatacaggatagtggctccacctaaagcaactcatctttttcataggaattttggtaatactttaaaaattaaacttaccaacataaaacagagagtgcagagcagtttacaatatagctcaatttagggcttgatatatttttctaaacttgctgataattatgactaaaccannnnnnnnnnnnnnnnnnnnnnnnnnnnnnnnnnnnnnnnnnnnnnnnnnnnnnnnnnnnnnnnnnnnnnnnnnnnnnnnnnnnnnnnnnnnnnnnnnnnnnnnnnnnnnnnnnnnnnnnnnnnnnnnnnnnnttatttttctcctctctgtccgttagggttttatgatgaatctgctaataataattcacagaaatgcctttgacaggtagaagcttcgcctttgttcacccactttcaaaggtacaaggactaaggcattaaaggagaaaattatttttgacagtttctcagaaatctgtctgggaaaatgtgctttctagagagatggaaaattggaagataaattgcataatgggaattataagtagggcctttaagtccatatgtgtattgtaagccactttaagttaaggtacttcatgagattgctttttatactgtacacacttgtttgtaatgaaaaaatgtcacttaaaggtggaagcagcacctgtgaaataatagctacagtcaagccatagatcttgaaaatttgatttttccccctgttgttgctacccagccagtgtgagattctttaccattagtggggggtatgcagagatttaaaaatacttctattgaattagaaagcatcagtttgaatttggaagcatttcccccttccatttaatgatagtttttcagttctaaataagaaaataaaatttccatcatgaatatcattttaaaatagacctttaaaattgactattcttcaaaccttaagatgtattgaccagtgttagattacggtagtatatgctttatgttacactgagttgtaatactacattcagctcaaacagtatggttgttgtgggcagaaaactgtgctagtgtggtttccgagtggatgtgagaggtctataaaaaggcattcttgtccttaaaaaacttgtagtcatattgaggagttgaggttcataaaatgcataatcaagttgcatatcctttagtggctgaatagatggtaaaagacaatcagtttcataggaatttgcaccgatcgatgtgggctaggattatatagaagggctttacagacaaagtggaatccaatctgggtagaatttcatagacaggaaaaacagtctaggtggggaaacaaacaaacaggtcagaatgagcattagacagtggtcattggataccaatcaaaggtagattgaacttatggagaacctagcaagaaacggacctgttagctgatagttgaaattcaggcactgggaaatgatgctctaccaattgacaacttaaagctagtaatggtcctgtgaattccctctttcttgctaaagcttccctttgttcagttcattatgcttcagcagctcttttaatgcatgaatgtcatgaagcctggacaagagacaacacaagcaggagtctgctgcgtagacaaagtgacaaagtgctttcattcatcaatacatattcagcataagtcacttagaacatcgttatgtcatactcagtgctttctgtgtcttgtatctttttcttttagacacccatgtcttaaatgtaaagttgaaaaaaactgacttgctgtaaagattatgtaatttaaaaaacaaaccaccctagttattatagaactaaacagttcaaaccacttttttctcccacaattaatagtttgctttgatattcagcttatttaatataatgaaggtactgagaattatatcaattattggaggattgtatactaattattgaaaatatttttaaaattggtttaaacatctattagtctaatgaatgttctcattgtagttcttaacataccctgtttaagatgtttcaattttgagacaaaccatataagcaaactttattaaagctctatactactattttgtaacaaaattttagaatcatttcctaaattaccagagaacagcactttatttcctagtgaatactgcttactcttagaaaaaaagcaaatctttccatctattacctgatggtttatctttagttatattaagacataaatttaagacacaaattgaccactgttaaagaagagctttcttccctttgaggtgttttgagatagactcatgttttagactgtcttctcgctagagtggaggataactttcagttgctgatttttctgcctatacttcctaattattggttttcaggcatatgtcacgatgaccagtttcatgtggcactggagatcaaatctaggacttggtgcattctaggcaaacactctataaactgaactacatccccagcccaggagagtgggaggtaatattatatattgtccatgtttacaagctaactttattttcccaggtttcaatgaatgtgcatttttatttgtcagtggcctctataaggtagagataatagttaagaaagagtcattttggctatcgcagtaaaacaagtaaattctatattaaagtggaaatctgggcttgggtcccatgggtctccattccagtgctgactaggcagctcctaaaaccttgactcatgtttattgcaattcagtatagcatgtcagtttttgcttgatcttcatgtttcttttcacaaccatgaagagttgtggccatttgctaggttaaataatgtttcatcaacccaggatggcctctactgttttcatatatcagaattgctatgttaattttaatactttcctctcctagtctgtctccccttaaatttaatatataaatttagggagaaccttttactcttccactgcataattcctttttgttgtttcaccaatttcaagaatgagtgtccaatttcttgaatgtctaaaggcctgggagcactggaattttacagtttctatggctttaattctagcagtgcatatcctcttatatcatatggaatcttatttcctggtcttaactgtttcttccatttgcgggacctagtggagtaatgagtggaagggactctaaactttttttttttttgtttttgttttgttttgtttttttgagacagggtttctctgtatagccctggctgtcctggaactcactctgtagaccaggctgacctcaaactcagaaattcacctgcctctgtctcccaagtgctgggattaaaggtgtgcgccaccactgcccggctgggattataaacttatcactgtcaaattgtttcagacaatggatttgaatatatacagaagtgtagatacaccatttaatgggatcaattttgaatttgtgataatataattctaaaaagtttacagaatctttttcttgacagtatttaaagcaaagaatgagtgaaatgtccagtaatgcataaactttaactgtgtttaccaaactgctgaaatctactcttagatgctaagtttacctgaatatagacatattagaaaacaatgaagaatttttctaaacataagtacctatactctatttttggattctagattacaattttctctggagtataaaaaccttaagacacaatcattattaacccgaatatattgatacatatactagatacctagtagaaaataacacatgctagaaacataaatggagatacagctttctagacttaaaatttagaacacaaatttgatgttaaaataaataggtgtaaaatagattataaattcacaaaaataaagcatgagaagacaaagaaaattaaaattaccatttacaaagagctactgttattgttaggacatggcaagtttctcaaaggcaatttatccctcatcttggtgatatggagatgtggtgggacatttagggcatagacccttagagaaggaagttaggtcatttgggacttgcccttaaaaagagatattgggtccatgttccctttatttcttttctctgcttctggttgacatggggttcactcaacttttgtttatcatcacagtacagtgctgccccaggcctaaagcaacagaaagaaatgactgttgactaaagtctttaaaactgtgagccaaagtaaacctttcctctggttaagttggttatctcagctatttgtcacctaacagaagattaacccaccgctactcacagnnnnnnnnnnnnnnnnnnnnatgatacttaaatttaatagttttaaaagatttatggtatgttggcccagtgactggaccagtattactcctttgtaagaaaaaaaaaggcactgtggtagaaagctgatttctaccatatacccactttatccttatattgccacattggggatagcctacattttgtgggaaaagccaattccttttagcctgaatagacatatgtcctaattagatacacagccactaagtaaatgaaatatggtcaatatctcttaacaatcaaggaaatgcaaatcataactattcatccctactaagatggcaattataagaaagagaaaacattagcagggatagagagcaaaggaaagcttacatacttttggagttaatgtcagtcaattcttacaatcaggaaaagtagtatatagacattcttaaatatagagaacttccatatgatccagttacagcacttccaaagaacaaaaggagtaggttgaagataaatctgtatgttcatgttgttacattagcgacactaatgaccaaagtgtgtactgataaaatagataaggaaattgatacacacatagtcacaaacatactttggaatgctgtctagccataaaagaaggaaatcctgccattttaaaagcataaacaaacctggaaaagataatgctatgtgaaataaactagacacaaaaaatataccacattgcatcctttttctgttgattcaaattcatagtaaaatatatggatgtagagtagactagcagggtctgaggtcaggatgaaaggaatcttaattgaagtatataaacttagttataagctgaatcaagttttagggatcagatgtacagcatggatggtgatggatatgttcatttgattgtcattatagtataaatgtatacacaagtaatcactatataccatgaatgcataccatatatttttggcaggatctttctctgtagccttggctgtcttggaatttgctatgtagagcagtctggccttgaactcagaaatccacctgcctctgcctcctgagtagtgggattaaagacatgtactgctacatcagacttataccatatttttaattgaatgtctggagaacatctttgtttctgtagaaatttctctctctctctctctctctctctttctctctctctctctttctctctttctctctctctctctttctctctctgtgtgtgtgtgtgtgtgtgtgtgtgtgtgtgtgtgtgtgtagagggggtgtgcacatgtatctatgtggctgtggattacagtgaacagtcttgggtcttgggtgtcatttctctgttgcatttcacctcttgttttgggaaaaggtctattgacttgaacttctgccagctctgccaagctcactgggccagcaagcttccaaggatcttgtttctgctttccatcttcccatcgctgggtttacaggcatgtaccactatctttggttttcttcttttaaagacatgggttctggggaccagtactttacctcctaaaacccacctagccttgtttacataaaaagtcctgatgtctttgttctcattttaatgtacaaaaagtgatttgactaagcctttctccaagggattataaggtgtctttgaaagcaaaaatattatttttgtatgtaatctccctcaaaaatgtttaacaaccgacctgtttattttgtgggtctgagttgaaactgtattcaatgcattagtctttaacctgtacaaaattaatcttttggctgagaagaaacaacactaatttacaactcttaaaccactctatgttaatctccagcactaggtatttgggaaaaacatcttcagaaagaaaatttcatcacatcttaaattattatataatttatgatgcaaagaaaatattcaggcctggtcacatgatacaacagactcacaaagcaacttattctcacatattagccttaaaacatatcagatttatattcttaaaattactctccctgttaagtgaaaaattatttaatgaaagaccttaatggctatccataaaagtttttactcataaatttttgcaattgcatattttagtcccacagattttcaactcttagcagtggaaatatatattgtccattgtatatgcatgctgtttcttttttaataaaatccgtatttacaaaatggaattcagcaaccaggcactgcaaatgtgacaacatcatgaacaacgggactgctattgctggttttatgagtgatttcttatattcagtaactgttcttttaaattggcttcccagaaaagggcttggattttgcaatcatttacaaattgccactgattttcaacgttttattcctgcagcagaaatctgtacactgccacatgagtccccaaactagtctcacgtataattctaggtactattttaatagggacaaaagaatgttacatatttgtctgtttttcttcttgccccatcatttcttcctttcccctcctgcctctgactgtgccctcctctctcaccttctccagatctccttctctatacatatgaatgtgcacacaattgcatacagacattattgtatttatgctgttattaattataccctgaaagctcgctaagtggagagtcacttttatattttatatctcctctcctaatctagtatcaggataatgttactgttgtcaaactttcatagcatactatgttttggcaacatcatgatgagtagttgtagtggataaaagagtatcttctgtattgaaatgaatttttaaagatttttgattgtttatgaaagtcaagacttagagctcataattactgtgttcttcatttcatcaaagaaatgcactgattcctcttttttgaaaccttttatctgttgagttacagtgttagacattgaacagtattgtataattagtctgactggctagcaacatttatttttttctcatcttcttttatataaaattggcacatgtgaatctttaaaacctaagcagaatattgataataacaaatacatttttactgtatctttcagtggaaatcacaattatttgtttgtagtcaccaaagttaaaaaaggaacaggtttcaaggccgatcatatcttttcctctgctgattttatagactttcatagagtaccttaaaatagcagtctaggtggtgatatcaccagagatcctacatatttttctgtggatttttaagagctgaagttaatttttaaaaagactccattaccagtatgattttcatgctcaaggaggggattacaggaataaagacattaaaatttttacccttctataaaattaatgtgactattgacaacagttgtcaaaatagctttttgggccatcaggaagatgacttataaggtgcatgatgcaaagtctgatgccctgagtttgattcttgggacttatgtggtagaagggaagtgccaaattccacaaactgtcctctggcctccactcatactccatggcacatatgcatgagtgtgtgtgcacacacatacacaaacacacacagtataagtaaaatattttgtggttctaaaaaaccacgaaagaaatgaaatttgaacatgaaattctatatcgaagaatatcttttataaaaataagagactaaggacatttttagctaactaaaaattaagaatttgttgcagtctgtcctttaagaaatttttaaagttgggaggaattcttcagactgaaatgaaaggaaactccatgtattgtattcctcagtttacagtagttcaacttaagttttgccttttgtttttgtttttatcaaagtgatatttactcactagattccaaaatttgagttctgaatttgtaacatttaccaggctaaggatatgagatattatgctgtctcaagataccaaatggtaatagtcccagctcccactgagccatgtggtcctgatggtaaacaactgagactctacaatgttctctgttgctaagatgtgatgtttgcggaggctaattttgttaaatatatttttgacttatgatattttttaatttatgatgagtttattggaatgtaacccccacataagtatctatagatataaacttaaatgcacacaaagaaagagcagtagtaaaattaactctaaatgtaaaactaagagagaaaagtattttgattacaactgctttctctgatttaaaagacagcagctgcataaaacaatgatcataaaacccttaatgggtttgtcatctacaaatatgttatttgaactcaggcatggtggtatacacctgtgatcccaccgtttaggaggcttaggcaagagaattatattttccagaacactctgggttacatagtgagttctaagccatcctgggctacatagagactctgtcttggtggtggtggtggggacctgaatggcaggatggcacgaataaaggaggttttaacgaacagatatagatgaagagtttttgtgcattgctgctgttgtttgtattctaaagtagatgaatttaagacagtactattcccaaggtaacccttagttatatgacttaaaagttggtatttaggattagaatctcaatgctttggcatatactcagattctcaattttgagagtaaaaataaatgatatttccaaaaataagctttatttgacagtttctttcatttagtataactaggtacaaatattttgcctaggtaggatattttaatttttttctggatgaaccttaataaaatacttaaaaattcacaacaaacaaaatctgagaacattacagtgaactatgagttcttgtaatttgaagttgataaagctctattgaagagaatttaatttttgcttgcttagaacgtacacaaacttacataatgtgattaatggcataatataataaagaaattctcgatcataagtaatattgtagtttatataacaatcttgttgatttgttcctatgggaagacagtacaatctcctttggtttgttgggttttttttgtttgttttgtttacttacggggaaaatgtgccagacaaaatgagtaaaagctgaataattttgattgttatcttgaattggtcataagtagcaccacacaaggggccttcaggatccaggacgggagcagacaaagcaagatgtcttgctggtaggatgctattgaacttgagctctcagaagggactactagcttccatctgcctccagggatcctagtctccttatttagcatttgtttaccaagtttaaagagagtagtttagcaattttgtcttaatgtttcagctgagaagcaagctctgcctagtgaatggcaagagaaaggaaacagttttctttaatgcacaaaatgccactctcccacccacgaagtcaaaataatatcctcaagggataaagccttgttagttaggaatgcctaatttctttctataatatatgtatacagtctttttcattgccttcataatagtaacagtgttctattttaagccaattagtttaagatctgtttttatagttacttaatttttaaaatttgaagtgttaattaaatgaactggtctccaagatgagtgaccagtataatatttgctgtgaggaatgctgtgacagttgtaaaggattccctgcccttaagaaggttactttctagaacaagaactaatttataagctcataaaccttctaagtgccttagagacatctaaataaagcttagagaattttggctaaggtgacacatggtcacagacatagaatattaacataacaaatgtataagaaactcatttccacaagaaagtctaccttcactatataagcttacatccttttcagtattgatagttaaggttagacagttgttgattagagaatgacttatgcttgtgagagcttaagtttttaacagtgtcatctcaggcacagaaccattggtaaggaatttttctgggcctagggttctaagagtaggtcagttggaaaggtcaggctaataggttgaaggtttgtgtctgttactgtgacagtcattgtggcaggaatagctcatacaatggcacgttacacttgaatagctcatagtgtagctcagaatgttggatcagtggaaaaacctatccctaaatcctatcccatgatctccagatgttctcagttgggtgaaaggcaatatgccagatggagggacaccttaaaagtttgtaacaggaaataatgggcccatggaaagggcaaatagtatatgctcatgttataaacatagtacattccaatattatatgaaggaaatgcagtgtaacagtaccccatctctcatatatctagttcgcttctccagaggtaactagcacggctgccaattgttcgtgttttacagagactttctgtgtgtagacaggtatttatagtacatacttttttgcttttgttttgttttacacaaaagtagcatattatatgtgtaatttttctacacattctcttcagcagttaaggatttatttgagggttactttattttgggagcagttttatttcacagcaaaaagagagagcaggagacatatagagagacaccacataatcctattcactgtttcagtgtatatagtccattatcaagagcacatttttaaaaactgaagactatacattggtaaatcatcttttcaaattcacttaccaaggggtgatatagattttacagaactgaacatatataaacatcttccatcataggctcccgtagaataattttcccgcagcaagtttactatcttaaaacttctctgctttaccgatccctccacctctggaaaccattgattttttttttttttaatgtttcaggattatgttctttccccagaatgacacatagttggaatcatacactacatagcctttcagattggctcctttcacttagtaatttgtattttatttaagtctcatcatgtctttctgtggcttgatagcttgttttttattaagcgctgaatgttagtttattatctgaagtaacatactgtttttatccatttgtctattgaaagacatcttagctgtttccaggttttggcaattaggcataaaaccacttttagacatcagtgtgtgggtttttatgtagacataaaatttcaagtcattcttataaataccaagaagagtaattattgggtcccacaatacgaataacagccaaactcttccaaagttgactggagcattctccttcctcccttcctctcacctcagccagtaatgagtatgtcctgggacatacttccaccgtctgcatatttactaatatccagtttgtctctgtctacttttacttttgattttggaataattatagactcacaagatactgtcaaaaatatagatagatcctatgcactcatcacagcttcacttctggtgccaatcttacataaatataatgcattatcaataccaagatgttaattttttggaatctaatttatctattgtactgtgtcttttatcttaatgctttcaaagtatctttctatatgatatagcatagctaatttaaccaactctatattgaagggcatttagattgtggtgttgctggcacaagaaagggcaagaaacaggatacatcatgtatatactgttagaatgttatctgtgtcaattaggaaaaaaatgccctcttaatatatgtagccctataagcacatatattggaagacagaatgttatgttacaagaccaatagtgtttagcaactctacatgcatacatctgtggatctatgtaggaacctatgtctgatagtggaatgttctttgaaattctttagcatattagtgttctagtttgaatgaagctgtccatttcagactgagcacaactgttttcctcactgctacttcaggtgttgggtgttttctgttatgtatatatgtattgattacaatggattgtgggcttcttggataccagagaccttatgtcttcatctttggtttcctttccttggagaatattattttcaaataaaagtgctgaaagaatttttgttgacatttttttaagtaagccatgagcagtgaattttaaatctgcttctcaatacttcaagaaagtatcttgaaatttgaaaccaaattatctgaattaaaatacccacacataccactcttgcaagagagcaaaagaattgctataaaatcaaccagctaataatggggtactacagtctcaaaagcatgaaggattatagctttaggaagaaaatccagagtaagaacactccttgtgagtaagcaggtggttgcattttggttccactgagtattatagtattggaagaagaataatttttcaccagtgtcttaacttgatgtatatgaaagacttttatatttttataggtcaaagaaagcatattaaactctatttgtaacaagcctaaagtctattatatacattgtatgcttttgctaagtaagtgtagttctgagatagcccatacattttatgccacaaagctcccaattttaccagctcttaatttgtcattgattaggagggaaaaatgcatttttaagactgagtttatcattactgttgagctgtagaaatactttatgactttattttaaatatttcattaaaacttacctcactggaatcacatgtgatatatacatatatgtaaatatatgtatgtatatgactgctataattaaaagacaaaggaaactactgttttgttaaatatgtctgcatatactttttattagtaaataaaattagtagattggccgttcagcatgatcaagacatcttatacaagtgacaactgaaaataggtaaccatagttgtaaaagtgccatgattctaaactgagggaatgaaatgctcgacacccataatgtgtaacagttgacataatagtagaggtcgcttcaaagagactgttgagacagaacttgctctttgtctataatgttcacagtgaattatccagtgtgctttgctactagcacataaatattttaataaaggaggattattacttaaattggaaaaaaatttgtttttcttgattatttgctgtaaaaagtttttttggaaccaaagcacaaaaggattgtgggttcaatgtgagactacgcagtttagtagaagctctgttaacctgctgttaattataacaggcttttacctgttttctaagaaatacagctaattgggttcatttcagtaggtttatttttcaacattagtactaaaatcagattgtgtgcaactttgaatcatggttctataaattcttggctatacttagtaaattacagtattacttccagtataattataagaatgctttaacatgctggatgttgattttaagaatttttatggttaaatattaattttcccttgaatttgaattattcttgtcaactatcattcgaatcccatgtattcatttgacagcctattgctgaaaagtaggaatttaaagactagaacagtatcttatgtttcacaagttttcatagtagtgacttggataggcacgtttatattgtgattatgtatgcttatgcacacatttcttatagtgatcttggtctctctgcacttggtatatccatcaaattaatctacttaatcttacagtatatgtaaacatgctatcttttccatggaactgaatgattgacaatttctatggctgtaaggtatgtgtaaatttctaataaaatttgatatcacatatctctatctatctatctatctatctataattgtaaacctaggtatacacaattaaattgtgagttcagttttaaatatgtatggatatgactgtcacttcccattattctggcttttgtgaatgacagccatctataatcttgcctccttttcttgatctgtccccttgtttgtgtgcctttttgatcttgctccattgctttcagtgaagtgggttgttttacaagtaggaaacacaaagactacatggtgagctgagtaaatttgatagactgtgggagcggcagtgtacacagtagtcattttatagttagtgaacgatttgttgaggaaggactcaggaaggggtttgaattatgattcaagtcacagtgattagaatgtggttgtgttgaagacaactagacattccaggcatcgaggatcatagtcacggctgaatgattaggtttgttcataggactagagggtaatgatatttgagaatttatgaactaaatgtgccccagaatattgcaatgacttgaaattaaagcatttattcattcatgtttactttgttttctgacctactggggaatgctgtaagagttatgtggatgaataagagtaaggggaagtcacatataaaaccattgcattgttaaagagatcactgttgtggttaaagagaggactctggactacataagaaccagttgtgaaattggatttgggaagaacaaatgggtgcaaataatagaccaggaaaggaagggcgtccttttgaatttaattaactactgtgggtgctagttcagaggctcctgttaggttagatctagtcttcaaaagagaagggctgtgcttacttggttaaaagagaagggttgtgcttacttggttaaaagagaagggctgtgcttacttggttaaaagagaagggctgtgcttacttggttaaaagagaagggctgtgcttacttggttaaaagagaagggctgtgcttacttggttaaaagagaagggctgtgcttacttggttaaaagagaagggctgtgcttacttggttaaaagagaagggctgtgcttacttggttaaaagagaagggctgtgcttacttggttaaaagcagaaggcctatcctatcaagccatctgtcttctaaaaaggtaaatactatggcctttctttttcccttctctctattgatttatgctttctgattgctttaagacatacctagagtatgcaatggtgtcatcgtttggaggctgattatgggatggatccctggatatggcagtctcttgatggtccatccttttgtctcagctccaaactttgtctctgtaactccttccatgggtgttttgttcccaattctaagaaggggcaaagtgtcctcactttggtcttcgttcttcttcagtttcatgtgttttgcaaaggcctaacaaacacagaagtggatgctcacagtcagctaatggatggatcacagggctcccaatggaggagctagagaaagtagccaaggagctaaagggatctgcaaccctataggtggaacaacattatgaactaaccagtaccccggagctcatgtctctagctgcatatgtatcaaaagatggcctagtcggccatcactggaaagagaggcccattggacttgcaaactttatatgccccagtacaggggaatgccagggccaaaaagtgggagtgggtgggtaggggagtcggggaggggatgtaggaggcttttgggatagcattggaaatgtaattgaggaaaatacgtaataaaaaaataagaggaaaaaaaagagaaaaaaaagacatacctagagatataatatcctccgtaataaccatctcttttttagtttcctgaaattgaaaattggataattggcctcctcacatttctcattcatagttatattcttaccatatatttctttcatcccaaacttctgtttagtttttcctctcatgctttactagctcctgaagctagggatgataaaacaccttttaatttttgattcctagcgtgtgacacttactagagaggatttgtaatgatatttattttttaagattaatttttacttttagttatgcatgtatgtctctgtgtatttatgtacacatgagtgcagtgcctgtggaggctagaagcagggtatcagatctcctggaactggagttagagatggttgtaaatcacctggcatgggtcctgagaactaaacctagatcctgagcaagaacagtacctgttcttaagtgccgagccatctctaacccataatgctctcttatattaaattgacccgatgaactgcagactggattctcatcttgtttgtgttaaggagttgtgtctccagtactctatccaattttgtctacagaggaaaactcaaaggcttctttggagtctctcttaatctagataacctatatctactctgacttgcctccaaataacacagtaattctccataggcataatgtccacattctccatgtacaagatgatgcatgtagattgatgtgtatgtagtgattgagacaaggaatttagagcagcagtatacacacccatgtgtatggatgaaaactcaggagaacaaggagccagccccctggatacccaacatggagtcaactgctgcaggtagaaatcagaataagccgcactagtttttgtcactatagtgactggaatcctgatatccaggtatcctttctcctacatcaacaaggcagcctttctttaccaagattggagaagaaactagaactgcttgaaacttcttagtgagctaggtctggaggagaaagagccattgctttagtgactccttataactcccagtcatattagatgactgaaatgtattcccttagtaaggggaaaagtataatacattgttatagactaggtggacaccctactggacagtatatcacagaatatttctactatctatatataactttgtattctttgaccaagaaatgtaaattccctccttccttcagcccctagtagctatcattgttattctttttttcttgtatgagtattaaatttcatatatgagatgtggtatttactgttctgtgaaaaactaatcatccatagcatgtcctccagatttatccatgttatagcaaaagacaagattccttaccaccttttaaaggttgaatggtatcccaacgtgtgttatcacattttctccatccatccatccacccatccatccacccatccatccatccatccatccatccatccatccatccatcatctgttggtgaatacttacgctgtttctgttttcttggctgttaaaaggttttgtaaggaacacgaaaaggtagatattagttcctttagttacagaaccagacataggaacatggtaagacgtggcgcttggggctcatgtactccacttattactagcttaattttgtataggtcttgtatagataacctcagctgctctgagttcatgagtgtggtaaccataccatgtctagaaggcagcatttcatggcaatctcctaatcctctggcttttacattctttttgccccttttttgtttgatgttcgctaagcattggtcaagagaatttttatatgtggcatgtggtaaagaactaatttcattcttttccacacgaatatccagttttctttaaactgtttttgaaggccactattgattcctcactgtgtactcttagactcttcgtaaaaaaataataaacaaacaatcagttgaccataaatatgtgagtttgttcttggtgttatattctcttctgttagtaatgtatttatatttatgatcacagcattctacttttgttatggttgctttataatatgttttgatttcagagagcacagtggtgctagtcttgttcttcttgttcactattgctttggctatttgtttgtttttgttccatatacatctaagaattgttttttctatttctatgaaaaatgacattacagttttgatagagattacattgaatctgcagcttccttagaatagtatggacattttctcaacctgagttctcccaggttttgaactgaagatagctttccatttctttcacctttgtctatctgtatctcatatcctctatactgaggtatataaggtctgcatgacaaatgggcctctctttccattctttttaatagctgagtagtactccattgtgtaaatgtaccacattttctgtatccattcctctgttgaggggcatctgggttctttccagcttctgactattataaataaggctgctatgaacatagtggagcatgggtccttcttaccggttggaacatcttctggatatatgcccaggagaggtattgcagaatcctccggtagtactatgtccaattttctgaggaacctccagactgatttccagagtggttgtacaagcttgcaatcccaccaacaatggaggagtgttcctctttctccacatcctcgccagcatctgttgtcacctgaatttttgatcttagccattctgactggtgtgaactggaatctcagggttgttttgatttgcatttccctgatgattaaggatgctgaacattttttcaggtgcttctcagccattcagtatttctcaggtgagaattctttgtttacctctgagccccattttttaatggggttatttgattttctggagtccaccttcttgaattctttatatatattggatattagtcccctatctgatttaggataggtaaagatcctttcccaatctgttggtggtcttattgatggtgtctttggccttacagaagctttgcaattttatgaggtcccatttatcgattctcgatcttacagcacaagccattgctgttctatttaggaatttttcccctgtgcccatatctttgaggctttcccccactttctcctctataagtttcagtgtctctggttttatgtggagctccttgatccacttagatttgaccttagtacaaggagataggaatggatcaattctcattcttctacatgataaccgccagttgtgccagcaccatttgttggaaatgctgtcttttttccactggatggttttagctcccttgtcgaagatcaagtgaccataggtgtgtgggttcatttctgggtcttcaattctattccattggtctacttgtctgtagctataccagtaccatgcagattttatcacaattgctctgtagtacagctttaggtcaggcatggtgattctaccagaggttcttttatccttgagataaaaggttttctgttattccagatgaatttggagattgccctttccaattcgttgaagaattgagttggaattttggtggggattgcattgaatctgtagattgcttttggcaagatagccatttttactatattgattctgccaatccatgagcatgggagatctttccatcttctgagagcttctttaatttcattctttagagacttgaagttcttatcatacagatctttcacttccttagttagagtcacgccaaagcattttatattatttgtgactattgagaagggtgttctttccctaatttctttctcagcctgtttatcctttgtgtagagaaaggccattgacttgtttgagttaattttatatccatatacttcattgaacctgcttatcaggtttaggagttctctggtggaatttttagggtcacttatatatactatcatatcatctgcaaaaagtgatattttgacttcttcctttccaatttgtatccccttgatctccttttgatgtcgaattgctctggctaggacttcaagtacaatgttgaataggtagggagaaagtgggcagccttttctagtccctgattttagtgggattgcttccagcttctcaccatttactctgatgttggctactggtttgctgtagattgcttttatcatggttaggtatgggccttgaattcctgatctttccaagacttttatcatgaatgggtgttggattttgtcaaatgctttctcagcatccaatgagatgatcatgtggtttttgtctttcagtttatttatatattggattacattgatggattttcgtatattaaaccatccctgcatccctggaatgaaacctacttggtcaggatggatgattgttttgatgtgttcttgaattcggttatcgagaattttattgagtatttttgcatcgattcataagggaaattggtctgaagttctccatctttgttgggtctttttgtggtttaggtattagagtaattgtggcttcatagaatgagttgggtagagtaccttctacttctattttgtggaatagtttgtgcagaactggaattagatcttctttgaaggtctgatagaactctgcactaaacccatctggtcctgggattttttttttttgttcagagactattaatgactgcttctatttctttagggggatataggactgtttagatcagtaacctgatcctgatttaactttggtacctggtatctgtgtagaaatgtgtccatttcatccaggttctccagtgttgttgagaatagccttttgtagaaggatctgatggtgttttggatttcttcaggatatgttgttatgtctcccttttcatttctgattttgttaattaggatgctttccctgtgctctttagtgagtctggctaagggtttatctatcttgttgattttctcaaagaaccagctccttgtttggtgcattaaactctaaaaagtctttaatttctttctttatttcttccttgaccaaggtatcattaagaagagtgttgtccagtttccatgagaatgttggctttctattatttatgttgttattgaagatcagccttagtccatggtgatctgataggatgcatgggacaatttcaatatttttgtatctgttgaagcctgttttgtgaccaattacatggtcaattttggagaaggtaccatgaggtgctgagaataaggtatatccttttcttttaggataaaatgttctgtagatatctgttagatccatttgtttcataacgtctgttagtttcactgtgtccctgttttgtttctgtttccacgatctgtccattgatgaaagtggtatgttgaagtctcccactattattgtgtgaggtgcaatgtgtgttttgagctttactaaagtttctttaatgaatgtggctgcccttgtatttggagcatagatattcagaattgagagttcctcttggaagattttacctttgataagtatgaagtgcccctccttgtctttttgatgagtttgggttggaagttgattttattagatattaggatggctactctagcttgtttcttcatatcgtttgcttggaaaattgttttccagcctttcattctgaggtagtttgtcttttttcctgagatgggtttcctgtaagcagcagaatgttgggtcctgtttgtgtagcctgtctgttagtctttgtctttattttggggagttgattccattgatattaagagatattaaggaaacgtaattgttgcttcctattatttttgttgttaaagttggtattctgttcttgtggctgtctttttttaggtttgttgaagtattactttcttgctttttctaggatgtggtttcagtccttgtattgttttttccctgttattatcctttgaagggctggattcgtggaaaggcaatgtgtgaatttgtattgtcgtggaatactttgttttccccatctatggtaattgaaagtttggttgggtatagtagcctgggatggcatttgtgttctcatagtgtctgtataacatctgtccaggctcttctggctttcatagtctctggtgaaaaatctggtataattctgataggcctgcctttatatgttacttgacctttttctcttactgcatttaatattctatctttatttagtgcatttgttgttctgattattatgttttgggaggaatttcttttctggtcctgtctatttggagttctgtaggcttcttttatgttcatgggcatgtctttctttaggtttgggaagttttcttctataattttgttgaagatgtttgctggtcctttaagttgaaaatcttcattctcatcaactcctattatccgtaggtttggtcttctcattgtgtcctggatttcctggatgttttgagttaggatctttttgcattttgcattttctttgattgttgtgccgatgttctctatggaatcttctgcacctgagattctctcttccatctcttgtattctgttgctgatgcttgcatctatggttccagattactttcctagggtttctatctctagcgttgcctcactttgggttttcttaattgtgtccacttccctttttaggtctagtatggttttgttcatttccatcacctgtttggatgttttttcctctttttcttgaaggacttgtaactctttagcaatgttctcctgtatttctttaagtgagttattaatgttcttcttgatgtcctttaccatcatcatgagatatgccttcaaatccgggtctagcttttcaggtgtgttggggtacccaggactggctgaggtgggagtgctgggttctggtgatggtgagtggtcttggtttctgttagtaagattcttatatttgcctttcgctatctggtaatctctggagttagttgttatagttgtctctggttagagcttgtacctctcgtgattctgttagcctctaccagcagacctgggagactagctctctcctgagttttagtggttagatcattctctgtaggcaacctctcctcttgcagagaaggtgcacagatatctgttgttcgaacttgcctcgaacagggcctgtcccagaagctgttagcttcagtagttcatactctcacctgtgcagactagtcttggcaggatccaggaacgaagatggctccagcagatgctctggcaaagccctcctgggcggggtggacacctctcctctggcagggaaggtgcccggatgtctggagtccaaaaaggggtctgccacagaagctgtgtggctctcgcctgtcccagaagctgttagcttctgtagtccaccctctcacttgtgcagactagtcttggggggattcacgaaagaagatggctcctgaagatgctacagccttgccaatagttttttgaagaattttacgcttatatttaatagaaacaatgccttatgattttcttgtggtttcttggactatggtgatatacacccatcttttactaatttttcagttgataatttttattattgtgcttaatctttttactttataatttttacttatgttcagattttctattccttcacagtttgttcttggtttggtttatgtctttaaggattaattttcttctacgctatcacttttgttaaactagtattatccatggatagctcttctgatcctttgtgttttggtgatatcagttgtgtaatgtttttaatttctgatcttatttaatagcctttctattcattagttgaggtagtggtttgtctattttttctcttcaaaacccaaatcttttcattgccttttctctattttatttttattttttataacattccatttgtttatgatctgatctttattcttctactatgttgcttatatgtgcttttgttctttttgatatgttgatatactgctaataaattactgatgggattggatttttggaatggttgatttcccattttttgtccctgtagtttttcccctgtagttggactctcttagagagtctaggctgtccttgaattcatgtcggtcctccagcctcagccttctacgtgctgggattgtaggtgtgaatggcaccatgcctgactcccattttcttctgactaaagcatttttatttctttttaaatttcttctgtggtccatttgctgtttaataatatttgtttaatgccccactatttgtgtgttttccaagattctgttaataatttttagtttcatcacattatgatctaatttaaaaatactttctacctacctgctcttatcttttgatgttagatttttttagcctgatgtttgataacttattcttttttcccctgctctggaccttccgttctttgatttaactggcttttgtttagaacattctgtctctgaaactattttcttgctgtccagttttattttggtttgattaaagtttctttggtattctggtcttaggcaggaaaaggacctcttaacaagcactatgatataaatatttatttcctccaaacttcatatgccaaatcgtaattctacagttgacaaacttaagcagtaggttcctgggaggtaactggaactttatcatgtgcacttcatgagtaggacttagaacccttatagaaagaaggcccagggagaagttgttgtctatgagcaactgacacttaccagacaaacttatctgctggtacctttatctgaaaattcatagtgaacagagttatgagaaatcagtttgtcttgccattatgtgtattgttatcttgtttattattgcttattattacctactttatgatatcttatagtaaggaatccaaatgaactaagatagtaggcatttctttggtatttctgggaagaactcttacttagaatcacctatctatatgctcctaagtcagagaatatttgtcagatggataatactggaatggacatttctagttgacaaagatatgtcaggtttgagaaatggtttgaaaagtcattccaggcatagttaatagactttcctattcacctgtactaaggggctggacttcactactgtccccaaattgagatgtgagttttaccatgaattcagagttttctccttaaaatctgagtcctggtggcacagagtgtacccatgtatttgaacccatgtattaaccaaatttttgagtgaaataacagaagaggaaatgatatacaagctttcttctatctggacatgagaacccttttctgtgtctttgaaggcaaacagccgtggttggtcatattccgtctgctctatatagtgtctttggcaagtaaacttgtctctttaaattcagaactaaacttactttactatttatataaaaattcaatagttgtgcataggtaaaacaatcttgctgtgaaagtaaccaatagtacttaacacctagtgtgctctcactagatgcttatcttattttccttcttgatgttcttaactctgaaccatttgacagatcaaggtacaatctcttatgacccatattcgctccagaagtttacagtttctagatatggaatcatttcatgaactacctgctaaatgactgtcattgtaattaataatagtacttaggaatgtcaatattctctcaggtatctaaggaaggaaattgagaggctgcctacttagtagatgtcacattgactgaaaatgatgagaacatttagagtcatacctttattcatagggacacactacatgggcagtttgcaaaattccttttatcagcaatgtccttgggttatgtattagttatttttcacactcttgtgacaaaaataccaacttaagggagagaggaagggcttcttttcaatcatggtttcaagtgatgtaagttatgacaatggagccagcccagctgtggaggtagtatagaaccagctcatctgtagaggtaggaacttgagttttttgtttgtttgttttcccacatctctgaggaccaggaagcagggagaaaaggaagtaggatttgactataaatatcaaagcctgtcccagtgacctatttcctacatgtacgctttaagaggcagaggttttacagcctcataaaacagtgccactagctaggactcaagtgttgagattacatgagtttacaggacacattttacatccaaacaattctagatctctaaaacaagtcatcaaatgtgtggccttcatcttgagtaaccatgtctgaagaagaagagacttggatggttccttgtgttaaatattgtgcctgaggcacatatcttctgaaaaccctctccttcctgtcctgttccatcgcctttgtcttactaagccccagtgatttgaactccgaggttctggtacctgatatatgtagttactggatttgtaagaagaaagcatttctttgctttctcccaattttatctttgggatgtttctttccctacgatagtcaaaagtgtgtgacttagaatctcaagaaacacgagctatgtctttggtatacatgctgtgcactgtacatccaaaagcagtattcattggtcttagattttggagagaaataatttttaatatgatagattcttgttagaactattagattaaattattccatttatttttcttcaacaaacatatttcatccttgttatgttcttgggctatgcttatgtccatttgaagtttgactctctgtcctcttatgattcataatctagtgagatagatgataaaaatgatagttattgtaaagaaaaatgaagtacttcaaaatttgcctatgttaggatataactttgacaaagttagtactgggaaggtggccttaggaaaggagctctttgcaccttcatttccattatttgtgctatttcttgtgtggctgtggcagccttgatcgagctggagcttaagggagtggccaaatgagtgggagtgaaaggaagttagaaatgaaaccattgtggagagtcagcctcatatgatttcagagtgattttaccttttattcgttcaaatggtgcaacgtgtagtgtcttaatactaagagcaatgaggattgacatattaaaaatatatattaactctgctatgttgatgaaaattgtatgaaaagcattctacttggacgcttttagttctgtggcattaggaccatagaataaattctttttgacatcagttttgaagaaggagctgataagttggaaggaagcagtttttacaatggagtaaatatacttgagtttgaattttaaactataactgtggtttgaccataaattaagacagcctccttaacaacaagaaaaacatttaaagcagctttcatcgattcaactgattcataagtgctggccataaataaatattcttggaggtttaacttgttgaagccagcttctttagccagtgtcttcctggaaagcattttgataaaatgcatattgtgataaaatattttcagactttgatctggtaatcctgtttctttagcagtgtgtactgagtaaataaatctaaaatctcgataaatcatagtgcaccaccactttgtccaacagtttaacaagaagaaaatgattagctaaggtttggaatacttgtgtaatgaaatatcatggagcctttcaaacattgttaaagaatattaaccatgcaggaatagatttctacagttcaactgaaaaggaataacaaacaaacaaacaacaccaagctgtgctgggaatgaacacaagccagtgctgggaatgaaccctaggtcttcacatgtgctcagcaagcaatttcccaccctgacctagacctccagcctgcttctgtagacagcatctccattataagtctttctgttctttgtgttggaagatttatattttcttctctctagttttctgtatgacagaatatatgtagccaacatgaattaaattcatactgaataaacatgttctataagcatttcagcctttgcctcagtgagacaattttgactactatccaatccatttccattagtatgatatatacctttttcagatttttatctttaaaacattttttctttgtagtgaatttttaatcttctaatatttattttgattttttggcatgattttatctttgttggttctggtttcaaggtattcttaaaatactgacagttttattccccattgcaagagtattttttcaggggtaaagtgcttacctagcacatcgcaaggccttcgattcagtgcctagtaccacctcctccatccagagttcatgggctcattaccagctatgctaatctattatttgccgtatgcatgaaaattctatgttagtgggaaaagggagtagggaaggtgtcagtagatcccaaaattaagatctatatttgtttcttctaaaactttacgatctagatttctctaactgaatcttatcttcccaaacatattcatgatgagaagagagctaactttcactgaatttgtctttgagccagatacttttatgtattgtacagttttgcagtctattacaaaaattcttttaaataaaaccatcatttggaaattgtacttacattagaaaattacaaatgtgttcaacagaaagcaatttgaatttaacttaattctaatggcttatttctaatgaaatagttctttatagctaattaattttgccattgctcccattccttccacccaagaaaagatacttttgtggtctctactccctcctttcttgcttgcttgcctccttgctgtgatagtggatgccagcactctgctacagagttgtactcccagctcgctttcttactttatgttttctgaaggttttcactaagttagccaagctgttcttgaacttactatagccaaggcaggccttgagcttacagtccttcttccttagccttctgagtagctgaaatgatagataatgcttgtgacaccagaactgacaaatcatgcttttctctgtagtgcctatgattaagtaggctcctctcattccttactatatcctagtctctagtctaccatcggcctagcaggttagttgtagactcttttaaaaaattttttattaggtattttcttcatttatatttccaatgctatcccaaaagtcccnnnnnnnnnnnnnnnnnnnnnnnnnnnnnnnnnnnnnnnnncctacccacccactcccactttttggccctgacgttcccctgtactggggcatataaagtttgcaagaccaaggggcctctcttcccaatgatggccaactagcccatcttctgatacatatgcagctagagtccagagctccggggtactggttagttcataatgttgttctacctatagggttgcagatccctttagctccttggatactttctctagctcctccattgggggccctgtgctccatccaatagctgactgtgagcctccacttctgtgtttgctaggcccgggcatagtctcacaagagacagctatatcagggtcctttcagcaaaatcttgctagtgtatgcaatggtgtcagattttttaaacccaagcatttaaatacacgtagaaagttgtattagagattgttggtacagctgtgtgtgtgtgtgtgtgtgtgtgtgtgtgtgtgtgtgtgttttcctcctcctttctcttatcttcctggggtccctttgtttggcttctatttgatttgtttacagagatgtaggctttgaagtaacagctatataggactattaaagagaagggtagagcaagtggactgctttataggtaaacatgtacctgggttgcagccactgtcattcataggttgtactttcctctcacatgtctgcattgactttcttgttgctgtcctaatttcctgtagaaatttactttgttctttgtctcctaaattagaaagtagttcacattactctataaatattgaactatcatagtgttgcctgatgtgttagtgggtacttttaaaatacatttttggatataatcatttaatggtattatcttattcttttttttttctgtttcgtgataaagggctttgtgtatctgttttccttcatatggaatttctgtccttaggtaaatgctcctttatagatatgccattgccattgcaaggtttgtagtagtaaaactgatatattttgtgttgttgtgatcatagtgagataagtagctgcgaggtaaaactgtataaatagtcacaactaaaatatcccctataaaaatagaaataaagacatatacatcatatacagttcatgattactgagaacatcctcaagtatgtcaggtcttgtaaatatggcttttcagattgtttttattttttaactcatggagggggaataagagtgatctatttttggcagggactcaagggaatatcagtgtgactgttacctgccacttttgtcacggtcaatttctacctgagttctttgggtttttttttctctttctttctctcattattttggacagtgacatctctaaccttttggtctgagcaatgtgttgcccctgaaattggttgagtcacttaatattttccccacctgtcaaagctgtagagatctgtaccttttgccttctgcttcctgagccattttcctgctagtagtaatcttctattgtgtctggcaagttttcccacatgtttgatatgaaacctaccagagtttgatccttaaagttactcaaggttaagaggctttgagacttctgttcacgaaagagtaactggtacatgattggttactttcaagttaagaactgggaaccacacaaaatatgtgaagaaaaaaatgtattctgacattgggcaccaggcatacaggctgcaatctctgaaacggaacaaatgaacaacatgaatgttacagacatcctgactttttgtttgcaatcagtttcaagatctgtgagcctgtgatcttgctgaacttaagagacaaagaggtgccgggcgtggtggcgcacgcctttattcccagcacttgggaggcagaggcagtcggatttctgagttcgaggccagcctggtgtacaaagtgagctccaggacagccagggctatacagagaaaccctgtttcaaaaaaccaaaaaaaaaaaaaaaagacaaagaggtgccgatagcaggaattggtggaagatgttattagagatggggagctatggacagaagtaactcccaaattctgcatggatgtaattctgtgtaggtatcgtcataaacatctgagtttctacaccaggatctaggaaacactgcctaattaccatgtgcatacagtagagcctcacaaaccttcaactatagtagtagagttaaattaaccctagagtaaaaggctactctgatcacaagtgaacaaacaaaaccacaccttgaaaaatgactaacagaagttttactgcatacaaaacttgaatgctccctaagggaatagagcaaagcccagatcctcagcagtgtaattgttaaaaaagatctagcccccccccccatattagatcttccaagaagcagtaaaatgtgagctgtaactaggagaaagtcagtcaacagaaacagaaccaaagattaatagagggagacttaaacgactctgaaaatacattgaaggattaaatggaaagcataaatattacaaataaagaaatagaagagtatagagaaccaaaaggaacttctggaagggaaaagtgtaccatatgaaatcaacatttattggatgagataaatagcaaggtaaacattacagaaaaaagtactgatgaatttgaatatgtaagagtagaaattgtccaatctcagacacaatgagaatagccaagttggggaaaagtcactgaagtctgaggaactattaagcagatttatatgctatgtaactagagtcaaggaaagagaataggtagaaaatagttgaagtaatgagtataaaatttccaaatatgttgaacactttggacctctctctccatagatctaagaaactaaataacagaaaatttagaagcaaaaaaactacaagtaagagtaattgtaatcaacctgttaaaaccagtgattgcatttcaaatgctaatggagaaaaaaaaaacattaagtgcagagagggtcatttccttctcatcagaaacactgatagtcagaggacaatacactggcaactttcaagtacttaaagtgagaaaatgtacttctgattttaaagtctataggtaataaaagcatctataaaacgaagaagaaatagaaatgagggtgaaattcatggtttgagatgaaaatagaaataataggctccatcacaccccagctgtaagaaatattcctggcagttttgagacagaaggcaagtaatggctgatgggggcagagagaggtatgaccttgggctggctggccagtcagtcagtctaagcaaaacagtgagctccagatttagggacacggagtttcaatctctagccaacagataagcgggcactcatacttctcacacatacatgaaaacaatgtatacacatacatgcacacacaaatatagatattgtagatgtaaatgtaaccatacaatagttagttagaagtaatgtaatcactgctattaaaagttacaaaaaatgtaagacctaaatggatactgtagataagagctaactttaaaaataaacactgcttaaaagcatgaatgtggaaaaagatatgtgaacaataaaccaagaggaagccagaatgctcatattagtataaaatgtagtctttaggaagagtggtgttaccaggaataaggctagccatttcataaagataaagtgaccaattcactaagaaatcaatgactggaaatatgtccctaacagaacttggaaagtaaatggaaacatgcatattctgataagataaatagacaaaactatcatcagaattgggtattttaactatattaacttggtgcttcatagaaccagaactagtagggaaaacttcattgaggagatagaaggcaaatagcacaaccaactaaatctaattgacatttataaagtattggaaacaagactaccagaatacattttcttctccaatttatgttacattcactgtgagccataaaacatactttcaacatatttaacaaggaactcagataatgtatattctttgaggaaaatgaaattaaaaacaacaaaaggatatctggaaattccccaaatattgggctattatacagtatatttgtttgttgtgattattgttattttgaggtagtcttgtagtgtaatacaggccagcctagaatttactttgtaaccaaagctggcctcaaacttacaatgattttcctgccttaccgtctcatgtgctgggattacaatcatgagctgccatgcctggcttttagtatgcaattcatgtaacatgaattggagaagaaaatgtgaataatgagccaaaatcatgagacattaggagatatttttagatataataatgaaaatacagcatatgnnnnnnnnnnnnnnnnnnnnnnnnnnnnnnnnnnnnnnnnnnnnnnnnnnnnnnnnnnnnnnnnnnnnnnnnnnnnnnnnnnnnnnnnnnnnnnnnnnnnnnnnnnnnnnnnnnnnnnnnnnnnnnnnnnnnnnnnnnnnnnnnnnnnnnnnnnnnnnnnnnnnnnnnnnnnnnnnnnnnnnnnnnnnnnnnnnnnnnnnnnnnnnnnnnnnnnnnnnncaaggcagatgtcagctcctagtaagagcaataaacttgctgagctgatagctagacttacaaagattaaaagggaaaaaacatgcttgcaaatactcaatgttggagacaatataatagatccctttacaacttttggagtcacaggaagaataagagactgttgtgaatattatgctagatatttttacaatgtagataaatgaaagattccttgaaaggcacagttgatcaaaatgaactcagaaggagctaagaaatctgaagagcttaacatctgtcaaagaaattaattaagaatcatccctcagttaaaaatctagctactgacatatttcatggtaaatcctataagatgtttaaagaacaaataaggtaaattcagaatagagaggacagtagaacacttctgaattcatgccacaaggccgatgagattgggacctgttggtgagaatgtacaggagccatggagaacagtgtagaaattgctgagaaatattaattcaggactgccacagtgctccaacagttcacatttgagtacatattcaaaagaattgaaaacagcttaggggtttcgcaggtctaatatacactgtgtcattattcacaatagccaaggtatggaagtaacacataatagtcaataaataaataaataaataaataaaggaattgttatactgccttttaaatggaaaacattcctggtatttgcaacaatgtggattcatgtagagactattttgctaagtgagataaagcagccacaggagaacaaacactgcatgattacaaatgctgtggcgatgcttctatgagaactctgtagaagtgattactagaagcttaagacagagctgggggattgttcattgttatgttaggttacagttacacttgatttaagctgtaaaaaatctcctatgtgacagagtcctatagttaatatagtacggttatatcaaaatccatgaaggtggtttcatgttaagtatccctaaacaaaaggatgcaactttgggtaagctgacagataggtcttttaccttgcttgtgatgatagtgtcatagttgtttgtaaccatacaaactcattaaattgtgtataatacatttagctaactaaagctgttaaaacttgaagaaaaatatcagtgtcctcatttgtaatagtcccaaacaagaagccacctgcagatctttcaccaaacttgaacaacctacacatctatcactaaactagaggcaacctatatagctatcacagtttactggataactctttgttgtattcattcaatggaatgctaaacaatagtaatgatcattcaagacgtttcaatatccagagcactgttgctaggtgcaagaatactgacacagtagaagctagatagaatgatcctatttatatggaattctagaaaagacgaaactttagtgatagaaagtaggttagtatttaccaagatccaggattgcaaggaaggaagctataactaaagggcatgaaggaactctttgggataataagagttccagaccttgattgaggttcaacttacatgcatgtgtacatttgctacagtttttggaattttacatttgattctggtgcttttttgtataaaaattatgtttaggtaaagggatgtttaagaagcagtttggaagaaataccactgcaggctaaaccaattgtagctgagtggtagaatgcttgcctaacttgtatgagggtattggttcagtcctcaacaccacacacgcacacactctcatacacacagagacacacaatcctatatagttcatggtagaggaccttggaagtttcaggtgttttctgaaagtgaaaagaaggaatgagggagaggaaaactagatcatcagttgtttgcatagtccctggagtctgattttcttccttgcttgcagccaaagaaggaccttaaaaatcaaaagagtcagccttgttaactaaatgcagaaagcacgtgaaaaacaaatccatcacttttattatgggtcttatttattaggctgacacattccatcagatctccatggaatgagaaaggagataaaatctagaacaaagaagctaaaatgattttccagctcattttacattagtgcttaaattaatcagcgtgtttatttcctatctactccattcctcctgagtgggctccacagcaaaggcaagaaggtaaagaatagatcattaactgagaagatagaacataggtacaaaatctaaccacttgcttgtttctgttgttttatttaaagtattgtgatttccctggttgtgctatatattcagtcacaggaaaataccaaagcaaagccccttaaaaatctttaatggtagaaaaaaactaagaggagaccgtacccactaattgtgtccattgctattcattctaaaacttctggacctaattttgttttcttaattttgttcatgctgaggaatcttcagatgtcaacaataaagcctctttttgctcggtctgtttcatattaaaataacccttttcataggaaaagctgagttgcaaggtttaaagctctttgagaaaaacgattttggaataggaaattcaaatggaaattgtttcatttttgaaatttgtagtaaattgtcacctaaaattagtgagttagatactcaaggaataaaaatttgtggtgtgtttctcttatcagggaagaaaccatagctagtccattttcagaatgttgccatgtattaaatccaatgcttattgcagtataaattaggaaaagaaaatgtgtacagatacattacttttcccggccaggtaatcatgcttatctaaattggactgtaataaaataagacagcctgtcgacctgaaactggattttaaagaagtttgctgaaaatggttgatttagtctttctaagggtaagaaatggttccttccgttcgaaaatggacagaatcatagtaatggcctaaaagtccacttctgattggggtcactgcgcgtcgggggtgattagtcttgatttataaagagaatccattttcctagacttcactcctctccttcctttgccatttaccaactaaattagaaatataaaagtaggaggaaagcatatagtgctgctattcttttatttctgttacaaccaaaccaaaaaaactattagaatatggtaattcttgattctcaaaatgtagatatttatgatcttctatactagtcatgctggctgacctcagtgccttagtttcccaggagccatgaggtacaggctccatggttgaagggaggggtatagtataaagctatggttttttgtgtgtttttattaggatatttttatctataataaacaatggtgtgtaaagccgggcgtggtggtacacgcctttaatcccagcactcgaaaggcagaagcaggcggatttctgagttcgaggccagcctggtctacagagtgagttccaggacagccagggctatacagagaaaccctgtctcgaaaaaccaaagaacccccccaaaaaaaaatggtgtggatgaaaaagtgtccaatgcatttagccaccccttcactctcttgatccctccagtttagcctattttctcatttccagttgatgtgagatacagattacccagagcttaaacattatacagtccataatataaattgtataattaatgatcagattccatacagagataaataatcactaaacaaaggcagtgggatttttttatttggaggacagttggtagagaaaaagacagaagaagacttgcatttcccaactgctgtcaaataacaggacagcgtgcaatgagaaagcggggaggaggctctaaagggtgttggtaatagaggatgaaatggtaggctttgatgtgcatttctaataggaactgtgtaagaatttgtaaattggtgctggtctttctagatcagtagttctcaacccgtgggggtcaaatgaccctttttatagggatcccttaagaccatcagaaagcatagatatttaaattatgattcctaacagtagcaaaattacacttattcagtagcaatgaaaataattttatggctggggtcaccacaacatgaggaagtgtattaaagggctgcagctttagagaagtcctgtctcaacctctgatgcacttctggagggggaggaggaggacagggaggaagaggaggggaagaggaatgcgagaagactcgtccctctgcttatctagagagttaacagtttggtatccatagaaatgttcctattctgtggtcatttacacgacagctgtacttactcccctgaagataccacctcaccatgctcacaggaagtggcatgtgaggaccaagtagctttctataagacctgaactctactatatcctggatcatgggatttgtagctcctaaagtataagaaaagtttctttaagcaattattgataattattgatatagtttctgttgcagtcctgctgacaaattcaggatgtaatgatattggcatattttatattcatgaaacctgcaatttatgtggcttggaaaggaaatatacaacttcttttcatcgaagtaggaagagaagtgttttcactcggtggtggaaggaaggcaccatcatttttggtttttatttaagcttcctagatcccagtgtgtaattacatggtatgagaaatataattggatttttgagctaagaaacaaagatacaaggcttctctcttttctcttttatctacctttaaaataaataatcttgcctgagtgcccacagcaaaatataggtatgatttatattatttgtgctaatattgttatctgaaaacttcattcaaaatgagaagtgagagctcgccatggactgtgttctttttttttttttttaacttctcactttacgttgttgtggaaggagaggtaggccttgagctacactattgttaagtaaatacatctgtttcattgtctcatgtgattgtactccaggccgacaaacacatttctaatgcattgtcgcttaaatcaatagactgtctcagaagaggacattggaaatggcatgaaatttgtactgggacaatcctgtacagatttatattgttctttgtgtcattattgttctataacagctatgttttggagagctacttttgatctgacaggaactggctgccacttggcagcgaggattcacctagattaggtagttgcttcctgtttctatatatgggcttgggaaaatagcgtttactttcctccaaagatttctcagaacatactggtacggaatgttcagacgtaggataattcctttaaaagctacatctggttaccctcagaaaaataattccattaatatttcaactcattttgatccttttgtagtttgtagtatttttttttcaatgtatgtaggtggccttaaaccatatggcaaaagcatttccccaaaacatacaatccttgtcttactatgaactattttccatatttccttgttatttgaatagctcctctcagcaggctccaaacccccttttcccctttgatccagttctgcttatgctgatggctaagcttacatacactgacaaacttatacgtgttttaataacgtgtttaagaatgaaatcacctattcctttcctgtgtttggagtgaaaatatgttgttactatttttaggtaaaacgcatcgaatgtctgtgcagtcattgccctgtacagggtcattattattcatacgatgctgtattttgggctcagtgatttgttttgtatcagtctactttaaaatactcaactgcctagattctttttttccattaaatggtgcttttagatgctttacttttaagcctgtgaatactttttttcaagataaaaggtactggatgtgcatttatacatgaaaaatcagagactcagacatttaaggaaaaacttttttctgtctactaaaagtctgaattcttacatcttcaaacatctgtcttaaacttagtaaggctgtcattccctccccttcttgacagctgctttacttcagtcttaactcccaaagtggatgttgcctagggcatgtaagaaataggaaataacatagataatttacctgctatgaggactcttaacaacacatattcaataatgtcaaaaattcaaagaatgttaaatctggcttccagtcctctgcagctttacatccccatgccctgagttactgtgacgtgcctttgcttcctaggctgctttgcaaagatataatcctggagcacccttagccatatattaacaattcctcaaagaatgaccatagcattataagaaaccacatgtaattctctcgactatgtggtcaaattccttttaacatatttcatagttcagtatagtgttagtatgtgtagctctatttatccttatattttaagtatttactggagaagatgtagttatattattagaagaatgacttgtatgtgttctagtggtgtaaataattgaaggtgtagcacttctaagtggcttccatttcaagtgttttggtaagaaatgaattcactcccacttttatgtttcttaattcactggtgatgaaagtatacaatataggtctgtattattgaaaaaccctcaaggtactttgaaagcatggctttatacagatcatagaatgactttcttcattctgtagctgtcagtgctgtcaaaggacctgtcttgtgtagggatgttgtctagtcaatgtaacaagagagtattgatgatcttgctgtccataggagtggttgcagaggtggactacaccaagatggaaaatggaaaaaataaagaggtgaaatttatctatatttagcacatggaagctagaaaacagaaaagttggactttccctttggattttcttttaatacctttggtataggtcacacccagtgcctgaatgtcacctttgccttgatagtgctgtcatagatttcagtactattgagcattgagttcatggaggaagggaccttttcatagtgcaccctggtttgtctgcagtgcttgtttgggacccagtctgccattgtgcctgtcagaacttgccataatttaaatgtttaaggtgggtgggtgattaacctgtttagcagactgtcttactgcccaagaactttttgtttttacctttttattgattctttgtgaattttacactgtgcatctcagtcctgcttgtctccccagcccttcatatcagccctctgcccttgcaagtcccacaaaagaaaacaaaaagaaaagcaagcaaacaagcaaaaacctagtcatggaagctgcagtgtgtcagtgtgccccactacatccccttctgtgcacacatcttcacttgcaaatgttcactgcaatgagtcattggtgtggtttgaggcctcaggcttctgctgcactgggtcctcaccaggactcctcttagttatcatattgttgccctgggtcatggagatactgcaggctttcttgttctttttctaaatttggtttttattttttcaagacagggtttctctatgtacccttggctgtccttgaacttaactctgtagacaagcctggtcttgaactcacagcgatctgtgtgcctcgccatttcagtgctaagattaaaggcatgtaactagggactaatgagaaatacataaaatatggtatatcatcctaaatttaaatattttagaaagcagaagtaagttataccactattattatgaatattcatagtaatacagaccatgctacctgtgatatatttctatttttgcaaaatgtcctaaagcataattggaacataattgttcaactgagtcatgaatcgaggctgttactggcttgctgcagaacccaagtgtctaccatattcagctccattttgtgtaccacatagtatataaaaccttttgtgtaaaactaaaaacttctggagtaagggtatttgctggttaatgtttgcagccactcttcacctatctgaaccatcctgattttactcgggcaaactaaagacgcatcggatctgatgaaatgtctttgtatccctttagcttaattgatggtattttgggcttggtttatagtgcgtgttttcacctgccttgtgagtaagctgtgactgtttgcctcttgctggcttcctatgaaccaatggctgcctttttaatctttcataaggaaaggtttttgctgaagttgttgattatctgttcccagttttttagatgtgacttacaaatgaggcagtgatcctaggtttaaacagaatcctgcagacacctgcgctgatttacggctctagactcaacattaccaggtctgagtgtttattttactatgtttgatctgcaaacaggaaattaatatcggtctgcaagaattgttgatgaagattaacatatagactttgttaaaaccttaattttggtgtctaatgtctcaacccaatgcactagccttgagctccttcaggccttgtcttttggtctttatgtcttaggcactgaacctagcatatgggaaagactcagtagatgctgtcttgttgaattgactggtttaccctattttatcttctgttacagcccactgtttgtaacatggaagattggtcgagacaaaagactgcgtggatgcataggtaccttttctgccatgaatttgcattcaggactcagggagtacacacttaccaggtgaagacccatttctgttttcatgtacttctacttacaaaaaactcttccgctccttgaaagtgatgctttgactccttttcatttgttcaatggttgacattactctctcatttcttgttagcttttttctttttggtgtccaggtaccttatcttataaagtattattgctatgtatcattctataaatgctatggtgacatttatcttgccactgatttttagagtgacttttttttcttccattgggcagcttattttgtataacttgaaaatgagtgactaaatatccatgagttaccaaaagtctgatttctaccttaacagcctagatttgatcacctttaagacctttaaaaaatacttgttggttttttccccttcattttatacattttgcccaacttttatgtgctttaaaacttgaaaagaagtcctaggaagaaagtgctgtcacagcctgacagcatacccgttctcattcccattttgccctcaactgtagcttgcttaagtgctttcctctaacacaatgggaaagtcacaagtgcctccttacatttcataaggctcagccttcaacttctccactaacagaaagctatctaccatgccatctgattttgataaatacaacttgtagcaaattatgttccataattatttcagagaagaagaaaatgtcttaaataatgacctattagtaaaggcatttcctagttttgttcatgttttagtgtggctaccgacacatagttgtaatccatacagtattagtataataagagattggtctttgctaactgttgttacttggggcaagttgcatgacttccataggtaaagtgataattctagtattttcttctatatactcaatatcagtgttaggaggatgttaggagaatgaaataattagttactactttgttacatgattggtgtgaaaatctatcttactgtagagttgtgtaaagccagacttagagcaccaatatttaaaaagccgtaccattaatgttctcatgttctaaatctagaaaactctataaagcagcattttagactccagtttatctgagtgcagacccttttgtccctctagtctggtgtcttgtgtcacgacgattccaaggaacttaactttgtaaactcaagcctgttaagaacttttacaagtgtaaaattttatgtttatgtatacactatttctagtgtagagtttcttggtgctttcaagtgaaattgtgggaaacattccattatgaaatattccatactttacaaatctttggtagcaatggtaactggtaacaacttgcttttgtttagagaaattcttttgcctaggaagtgagaatatccaactttttttttttaagcttgtggtttttttcctgagaataatgtgaactgagtaaatttttcacacaattgaaaattgcctgtatttgtgtacttttaactctgattgcattgtggtctgtgcctgggaacttcctggttacttttcaaccctttccttgtatttctatacagcttccttaaattgtatatagtacattcaaaggaatgcatatatatatatatatatgtatatgtatatgtatatacacacacacacatattttgtgttttatatgcacacatataagcatcctgtttgcctctcaggtttgtgtcaataatttacatataaatcttgatatttagaagagataaacaaaagaaatcttaaaaatttaattactattttaattcattttggaatcataagctgtatagagtcattctttttagaagttttaatgtaataatgcttttcagtcccaaaaacatacttatgttcctctacctgtgtgtttctatgtgtgagtatcttgagaaatgtattttgaattaagagtttttaaagacaagtaattttggattagttacaattattatttgacagcctcataaaatgcattcttcttatccttatcccaccttcttttctcatcactgtcatgctcatcgtccttagaagaccctttctcacagccatgcctctgtttggtttatgacagtgagtttagcatgggttgcttgtatgactagaaggttggaaatatatactgaagcttggtggtctcaccagtgggcaaacaagggaatacagtgactcccctttccctagtgtttatcttccagcagcagtagttcagcagtgaggtactggggcccatgagcccttctctcctccttgtctgactccgtgtacttatttcctacatgtgatgctgttgggaggagctttgttcattctttgtactaacttgtagatattagtaactacatctttacagcgaggaaacagagattaaagaatttaattaatttacttagtcttgcatctagttagtaagtggtagaactcaaatgcatgttcaggccacggactgcaagaacatactttgcactgtgacataaacacagaattctatgtcatgtctatgttctcttaatgggaagtttgattaagttagttaaaatagatgtcataaacagaaataaaattgttattcttattttattttgtagcttcaccatgaaaataacaaactcaaaagattactttaaatttaacaagtcaatgatcagtaattcttcaaaagttctaatgaagagttatgattaaagtttacttgaattattattgtataaaagaaaatgcttatatcaaaatactactctcagataggaaactataatttttggttgtatagcctagatttcaagaggaatttagaatttctaaacatagcaagttagtggttgtttttgaagtctagtcttcctatcataaagtttataactcacaaatgaacagacacaaagagatgaacttaggggcctggctttagccggggagtaaggagagcaggagaatcaaacagttttcagtgatggggtaataataaggacatctagttattggtgggcttcatcagcgattaggtagacattccattttccagaatgctattcacacccattcatattttggtaaaatattagtaaaattatgttttatcattttacaatgtacacttctgtgatcttaactacattcatgttgttgcatgaccatccccacttcttatctcaagaactttttaatcctccctgattggaactttttaccctttaaatgttcattccattcattcctcataagccctaacaactacttttctaccttctgtctctatgaattgacccctccaggtccccaattgctatcacatggctgacttactttactaagcataatgtcttcaaaatttcttcaagtgctaggatatgccattttctttcccttttaagactgaataataatcttgtgtcaattatttatgatggtttgtgtatccatttgttcatctgtggacccttggtcagtgtctacctttgggctattgtgaatagtgctacaatgaagatgggtctccaaatacctgaatagtctctctataaaatagttatctcaaatgacaatcatgtagcttgtttatagtccattaatcttttaaaatagttcttcaaattttccatgtattttttaaatgaaatatctagccttggtttaagttttgattcataaatgaagtctttaattgaaattttgtcatagtcaatgtttacttaattgaaattttgatttattttggattgaaagaagactttataagttgcccgaagatgttctcccaaccaattttaaaaatccatagttagaaggtatgaacactgtgtgataattacagtatgaaactctacagaagctattgcccctctcttcggcttaaagacaaaagcagggaagtttatagtgaacatgaagctggatgcatagctgagggtcacagagacatactcaaaacacagtttggcggtgaagtacatgggttactgtccttttcattgcctagactttgaagtagaaatagtcttttgtctcattgaataagaagtttctagtatttatcattttgttttacccataacttatagtatttatgtggatttatagcttttctaggctggacaatagaaaggcttatctttttttgtacttaaaagcatacttgtaagtaggagatgaggattaagagaggagtgtagtcatctccgtcaatgaaggggtctttaaaatgtcttataaattgatcttgaaagcacagctctaactctatgtgaattcatggcaataacatgttattctagaatacaggagtgactgatacttagtaaagacagggatgtggccagtcaccacacttacaaaatgattatcttttttcccatctgtttcttgtacatagatgtctgctgagcagtggagtaattatgtaggttacagcgggacctggagctccagtcttcactatgctgcctttgttgtgctctgcattctgagaaatttgcagtgggggtttagttctttctaagaaatggagtaaccatataaaaagaagagattgttttgattttgagttttcttttattcggtgtgcacaagtggtgggtatatgtatgtgtgtatgtgctgaaatggaataaccagaaaagcaagcaagggattgtttgcacattgcaaatgttggcttgctgttaggttgtttgagatactgaaaattacaaacagctttgctttttttttctttgaaagggcttattcagattgagtatgtctgggtgactacttgcattgtaaactgatttttttggtgtgtgtttgataacataatctttcatttttggtagagtggtatgggtttacaaccattgtatacagcgtaattatgttttcccactcagaacaggctattctgtgctaattcttgtgattgattattttagtaatacacatggctcattgtgaataattaaattaaacgagttcttccctttttgtgtaatattggttcttacattagcatctgccagattgattgttcttatgaaaactcactgagtcacttctgactgtacattattgtcatggcagcttattctgagatgttaaggacagacagcttttggtaagtgtctatggcaagtgtatgctttgggggaaatacatttatcaaaaaatataatgcaaaactaataacaaatctatgctttactgtttgaaaagggggaaatggctgagttctaaaatgtataccttccatggttatttcaattgaattaccaagtgaaaacttgctagattttgtaaactatttaacttaagaaacaatttggaacctagattgccatacgttttattcaatattacccttatgtaagcatgatgaagatacttatctgtagaaatctgggatcttcgttttagctgctgggttaatgcattcttttcattatcccaagattgtgctaatgtgcagagatgtggctaaaaaaattggccagctgaatgtagaaagagaagcgaaagagcgtggaccattcccagtatggctaatgggtcccgaatcatggagaattgtctgaacccatcttgcacctcttgccatagaaattaaatgcactgagtgtatcagattctaatttcctatcccatctttcagatctccagtctgtacttggaattcccctgctgctttgattaagtgccacaggcacaatgccttggggcagaaaagcagaaagagccatctgcaaaaagctgtgagagaagctgcaaatggagcgtcttcagtgtcaggcctcctgattcttgagtttgacaggcagagagtaaactacaaaaacctgactgcattcttacatacatttatgaccttaaccttcttgctcccatgatgttgctatttcgcctttctaattgtggacacttttaccacattttgagaatgggggtgggggtggtggtagtggtggtggtggtagtgctagtgatctgaatagtttaaaataatgaatgttgaggtttgggtgtggcaatttcatattaaatttttcgctatggtatttttgagcataagaaaatgcttttgaaaagatttccttaaaaggcaaaaagaaagcctttctctgtgatctgtgccctgctcttagacacatgtatattcaaagtagcagtcactagaagaaaattcttttttttttattactgataaccatttgttgcccttctaaggccaaacactgtgttatgctttaatgttgcatcaagaatatatttttcttagaaacaacttccagatgtctttacataattttgtgctttttaaacaaatcacaaatattgagtataaaatgaggtttgaaaggactacattgtttgaactgcttctagttaacaaaattaattatatacacacatatgtcatatgtggaaagagattatgtagcatgtttttcagtatatttaaattttttaagatgaagaatgtaaaaatacagcctaataattggtgccatgatcagaaaatatttgtattactttttaagatttttaaaattttattttatgtgcatatatctatatgcactgtgtgtgttcctggtgccgcattggatcttctggaatttgagttacaggcagttgtgtggggattctgggagcagaaccaggtctgttgcaagagcaacaagtactcttaaccactaagccatctctccagacttattggttttattgattttacaaccttactttagctcacaaaattcacctgtatatgcacattcaaactgcagggacttcatttaaatgagattagcatattggagtccccatttcctcccaaccccctttttaacattttcacattgaaatacgaacttggtgtccttccttatggtaaaagggaaaataagaaaaagccatatagaaaattctacggaagctttaattacagggattgctgagagcgcaacttcctcttgttatacccagctaccctaggcctgctttatatgttctacaaagtcagtttgaaaggttccaactgtggccacttcattggcagtggcaggcaagagaatttctttttgtttgtttttcaggttgcttttaacctaagtcattctagtaagaatttgttgcttcctaaatagggggagttgctagctagatatcaagcactattctaaggttttgaaatagggatcaaggtcgtatatgaaaagtagtgaatttttcactgatggttagtcttatactactaaaaggatcattgctttaagccccaatttaaactatttgctttgttgtgttccacatcccataccccaggctccagttggttgacaggcagagtatatgcatgatcaattatgaaactcaaacacggtatcagtatcaggcaggttacattaagacttctaacagtgagctgtcataagaagagttaataattgctttgactctaagaaaaagtgcagattttaaaaaactgctgatttattttcaaaagctctcttaagagagccaatatggctttgggggaaaggttttcagctctttggaatggaaggaaaactgagaacataggttggccttcaagaagcctgaaagtactatggaaaaaagaaaatctggactcacaacatcctggagaactcgtttattacttcctctttcctgcatttccacctctaacgcaggactagaattagggagagtcattgcagataatactagatttaagctgctgccactattaaatatttcagtgggaaaggctgactagattaaatttaacagtgtgaaaaatccatcaggtacaattgcttctcgttcaaaagtacatcttaaaaggctacattttaaagtactcatctgttgtgggtggagatgttcccatgcctcaggtagcagctcactaaagtgagattctgtggtctcaaactgtgtgccctcctgtgcaatcgcctcttccactccatagattttattattgcctagagcagcacacttaccccattagcccatgtggccacagacactcattggcacagctgaactctacctacgcgcccccttcttttgcctagagtaaaaggcaacatcattacaaaatctccatttcactcagaataaaattatcacaaggctctgcctacttcccctttctttataatcttctgcttcggtctccacgttccacgttcctcagttagccacagcttggctagcttctttgttttcctttgaacatgttgagcgaggttcctcctcagggcttttgtgcatgccatcttctcaacctggactaatcttcgtccagaaacctatacacttggctcatttcttccctttatgtctcagtccaaatgcctttgaatagtatgtctgtctttttgataacagcaacatttgcctcttaatttaccttgcatctttttgatacttagtttttaagaatagaggctctgttgagactgtttcaagagcccaagccttagagctagcagtggccaccttcctgtgccagttacctcaaccctttgtgaaatcagagaagctaaagaatttctatgcactttggtgtctttggttgtaagagagatgataccaatgtgatatgtttcttgtgaaagctaagaggcatatttatgtaaaaatatcagcacattctggttatgtcatatttctgcttttgaagttaaatagtaaacatagtaaacaagtaaactttaaatatgcttgtaggaatttgaattttcctttatcccttacacatgtaaattaacaggcgttcatatagtagaaaagacacaannnnnnnnnnnnnnnnnnnnccacacacacacacacacacacacacacacacacacacacacaatgtgacccttgaacaaagtgccactagtcgatattgtctgttgattgtacactaccaagtaagtatgtccttagttcatctcttcagtttaagccttaatgccactcctttattcaagtctctgattttgactcacagggtacacattcccatccaaaccatttcagaccaggctccagtgttgttttaacaaaattcatatcattgcttaaatgagctactcttttctgtttgcacagagggaggcccatcctcctaagctgcttcccctaccaagccccaacctcacaatccaacatgtgtgcttaggtaccattttctgtgtatattctttcatgcctttctggctttgaacatgtttttcctctgccagctttgcctcaccccatttccatccagtcaactcctactcattattcaagacttggcttgcttgttacttcctctatgaaatttctttgacactccccagcaaagctggttagtcttttgtgttcccacagcacttcgttcaggcctctgttgtaaatatttaacccactggattatcattattgactttatatgtttgtctctccagtatgaaattgcccttactgttagtttaccaagccacgtcaaagcaaataaacacaagccagtctcattgcttggtagcagctttacttgatcctgatagccatgtctgcattcttcctttccatttgcctctgttggcttttgtgacctttcgtatttgagcttataagagatgctgaagctgattgatagtgatgagttgctttaaggccagttgcagttttattgagttgtaggacagaactgggtacagaagactttacagagcagattcacacaagattaatcccttgtctaaatagtcataagagattgatgaagctccacaggaactgatgcttgctgtagagttggaagagacccttagaagtcttctaggcaacctgcctttaaatcttccaggaaatgagcgtttagcttctgtcttagttatttccattgacctggaacgcactactagctaaggagaccctttcattttcagatacctctaacctcactaccttgaccccagttactcttttactaggcgccagtgagtttgaatgccggaagccacagactgcctgtatttagcacattattctttatgaaagccacattaaccagcagtggtaaaaaattactctctgagtaattctttgtcttcagatgtttagtagtggtaagatgcagagttgtacagttgacttccatccacccagccataagatttttaactgactcttattttttaaagctttgaagctactgccatcactgtctatactgtggccctgggggccatagaatctagagatttcaagctagaactagaattagatctttcagttgtctcaatactttatgacatagaattggagctagagttagaacatagacactgtcttgggctatcactcaatttatgtgatagaaggtatacaagtatgcaaatttctatatttttgttttatattaatatatacatcattttaatgaatcctacaataaaagaatcattttataatgtaaagactaatttttaaactacatgcctgacatcatatttttatattaattccatcaaatatagactagtattagagcttttcaatctaaagaagaagactgggccaggaggatggctcagtgagtaaaagcatttgcttccaagccaggtgacctggatttgattcctgggacccaattggtataagaagagaactgactgccacaaattatcctctgacctctacacccatgtgtattcacacactcaataaatgtgatagtcatttaaacctgtagcagtggaagctgttttaggaatgtgaagcaaaacctttagtctattgtgttaggtctctctctctctctctttttttttaatgaaaaaatgtcttcagtgtgaaaacaaacctctactcatgactgaggagctcttgacaattgctggcttctgggggaggctagccagaggctgctaatgctgttcccctgctgggtcagcttcactctagcaggtggccccccactcacagatagatggggggaggattgggagcatggctaagattagtgttcattgaagttcttaaatagttaaaaatacataataaaagtaacaatgtctcaaacatagtagtagttatgttttctaataataattatcatatcaataatcataaactttatttcctgtgtactggacctgtactgattgtgttatatgttgcctcatttaatctcttcagcacctacatcaacttgaagtcatttgatttatattctacatagttagggaaatccaaggcttaggaaaattcagttttactgaatgacaattacaatagcacctggatttgactctgatccaacctctaaaacttgtatttcaaagcacaatatcacactgttcttccctcatgagctttattccctcttctttatagagatacttgcttcattcaatcagctaatcttctagtgttatcttcaattgaaaaaaaaaaattgagtgagcatccttatccttcaggcattcagtttctccactctttgttttgcacaatttcccggtacatggaagtttgtttgttccagttctatttatctccccggccctccagttctcttctctgttaaaatcccaaggcactatcttccttaacaataactgactttcactgcctgagaagccagcaactgtcagtagctcctcagttagaagtggaggtttggtcccaccgttgaaaatatttttcaaaacaaaaggaaacctaatacaataaactacaggctttcttcacagcagtcttcttactccagttcagccttatgcactcccatattccaacacgagcctctcattcaggggacatagaggctgaaagctttgatttccctttctgtgtaatgtgggtacccagcctctaatacatttacatggaatactagttcaattctcaggttctaggaaggaacaactctctgaaacctatgactttgggggcttggggaaagattgaccataagggacaggagaatcatcctgactctgctcatccctacaactggtcagatggaaggcatcatttgagcagtaagaagttagtctactctttagaattacattgaagtaagtacccagatttctaggtcatttaggtcaagcattgctttcattttcttttcttcttcctttttttcctttgtaacttaagactcttaaaacttagcataaaagaagaaagttatataagcagaacataaatgtacctatgactgaattttcctcatagaagaaaaacagattttaggaaggaaatgtgtatgtgtggtaacaggctatacctcttctaccagttttagatttacaagaatcaggcttttaaaaaaaataataaaatcatccagaatttgtcatttttttactgtagtggagatttgaggaataatggaaaaaaggaaatacttttaaatttatagtaatatttttatagatattatctttatatttttgagttaaagaataatgaaaactttagaaatataggcattattgaatgtcttatgggttttctcctgatccaagtaagagcttttctttgtctgatccagataaaacatcatcaagaatcctggtatcaggataggtatttttaaatttgacagtgaaaacaactttctatttttattcacatattgcctgttaattataatgaaatgggtagcagtatttggaacattatccatgttacatgtctcttagaatttaagagaattttactaatgtaagatattgtcatatcacatatttagggcctacatatttgctcttagcaacactgcaaattaatgctggcatggatgagaaaccagcaagcggctagaggtgctagcccagaaattagtagcattttgttcctttaggatgtcagggagactaagcagtattcatgtcacttttttataaagagaaatggaaaactgaatttatttacaatgttagccagaaccagagtgaaagaaattcttaatttgtctgtaccttgcctgtagcaaagttacaatttatagaaaagatgaagcaaaaagcaagacttttcatctgtggatatagttttgagaacagcctatagaactgagagatgagtctttctctgtgagaaaatcctccctctggcaccaaggttctcttgagtgacctatactcatgaccattatgaaatttcctggaatagagataatctttggactctctttgctttgctcattattttagtcttgagggattaggggtgctgtggcatctactgctggattactgtgtaggtaccattggtggcttctgaaacatagaggtataaaagagccatgtacctgccacgtgaaggaacccccctgagcagaatccaagtagtagcctaggttagaagacagccaactaggtatcagcagcaggcagttgcatataaaacctttttctccattgcctgctatctggttacattaggaaggtctagcacaagtgattcacgtttgtgtagtcagcttttgagacagggtctcactgtgtagtgcaggcgggcctcggatacgtgacccttctgcttcaacgtcctgactcaaatgctggggttacagacagtgcaccagtacagtcagtgcgacttcattttgtgttttgatagctttccctcttgtctctgagtcattttttttcagaagccatcgctgattaatcatcctgtggcttgttctcagttgtcctttcttgccagaatgagatgtgttcctgttatctgattgggagtctactctaaattttaatttcgttttcatgtaggccctatcctacctagcatttcagggtattttgctagaagatgtatttctcaataagcagtcaaactatctttaagttactagaaggatgagtgtctgaatgaagatcagacttcttactgggctcttctgtaggagcaagtcctaggaggcacacctcaaccatcccctggtcttccagcagcaaatgcatacatttgacctatatctacacttggagcctcaagaagagttagttcaccagagtaatggcaatattaaacatggtggcatctgaacccttcataaaacggaacctgtaggttcaattctgtggattttgaggccgatgtggctgaatgagagcagatgtcagcatctggtgtcaagggtcataaaacccagctttgtaggagtttttgttcaaagcagtagatcagtgtatgtctgatgaatcccagttcactcagtcatgactcagaacaaagtcttccgaagtatgaatttagggttccggttaaaaagtctccagaacctaggaggaatctcgtcctgtctgacttagagcaccatcagtgcagttctgcccagtgaatctgttacctagtgtatggattcagcaggagtcttagttctctagtccagaataccttgcttatttcattgtccacagctccccacagcctctcgttgcttcaccggaagtgctagcccagtgcagacacataacctcctcccaccactgaactggtatgtgctccaagccacaactttaagtgtcatttgtagcctgaagtcatagttgctaaagaagtaggaggaaagggtgatgggtcttggtacagtggtaattttgccaaatagttgagtgtcagagttggtttttgctattctgttctcgtgtaaggcatatgctattttcagttcacaattcccagaaagaaacttaaactttttcaaagcacataaatgggtacatacttgtggctttatccttttaaaactgtagattttcttttctgtttcccaaaggagtcatttagaaatttcccccaagttcccagagttcctgttccttcctctgtgtgctcacatcacactgcatacggctgtgtggcagtgcttgtttctttgcttgtacacttgtgtgccctacttaggttgatgatcccctccccaacctcgttccgatatttcaccattgctttcccttggtaattgctagaagttaggtatagaccaaaataagagtttgactaagagacaggtctctcggtatacagaatatacagaagtatctatttataagataattaaggtaatgaaagcactggcaactgtaatcctatatgtgagatgcaaggaaacttctgaaaattgtgttaagtcataagaagatgaatcactttgtaatagtggactgttttcatttgtagcaatttactttggaattgaggacctatattttttgttttctgcttacaattttaaatcacagaccttctgcctcattgtgttataacagtatcagtcatcctttaataaaggatggggttactcagttcctacatttagatattctaggtatagtgatgaagttgtgatagtctaaagatgtggcaattaaaatacaaatgtggaatttgttcccaaactggaaggggggcgaccctatatacagtctaaatatgaggtgaatgagaaagagcaggagccggaagaaaagtggtaagtacattatgtgtgtgttcatgtgtacattattgcacaaagttatagctcacaaacatttgtaagacaaggtacagtgaagcctttgtaattgtttttgcagaaaacattttattcatagaagcactactacttgtgtaaatttgaatcctcatgaaagagagatggccatttctgtgaagtgttgcttatagttccttgttttgcaaaggctgagtgggtaggcaagggtggcttcacagaatggtctttctgtggtagcggaacaatttggaagcaccaaagtaataggtaagcaaccggaggtcatgggtccatattgtaccatttattagtagctaactaattatgcttaattttgctaatggataaaggcacttaggttctgttggtacagaaataaaacttgaattcaacaaattgaacgaatcgacagaagatattacttaatgactttttcccagggaagaagagttgagctagcgacttagtcattttcatcattaaatgtagccagtacaaagtgctttggaaatccagcctctaagagctgctgtttacagtcattaattgtggtactatccattcccaaaaggatgccacccctttctgaacttgactttcttctcccattccctgtggaataaatatcgcacagtaaatgtctctgtgaggaataaacagtttggaggttaaatggaggactcagtgtaataaagctgacatgctctaaggagaatgtccttttgatatgcatttggtagggatgtattaatttcaacaaaacatctgatacaaaaagttatgaatgtaggccattgaatgtgtgggtgggggtgaggggcaattctagaaagagaagggatttactgtgtttaacagttgccaacagtcaggtacttggaagttgtgacttttgccagacttggaaatcaagttggatcagctctactgagtccttcagtgggagaagatccaaaccaagctacaagatgaaccagtgtatgaattagaaatatgcttaaaacatgtctccccgttagttttcattagtgtgcttactgttgccctttctgtattctgggctcttaaaaaaaggagctctttgtgacttattggttgcccatgtacagctggatttactgtaaaggtctttagtttgcagcgggtgtcatgttactagagtgcagtgtgtttgctctcttgcttcattcctttctacttatttccttactgtggtcattccaactcagaatagttaccatagttccaaagcttgattgaaagattcattcagttttctccaaatatgtaacaattataacaacacagctgtagttaaagttagaatttttcataaatcctcatggttttgcttcttaatcacatcaggctgaattaaggttttatttatttcagtgcggttattgaatacttaattctggaaaaagtcacagtactaagtactatacagcactactgatgaccatcagggtacatccaccttcaaggcgcttacaattttgtaagaaatacttgtctgtacacaaaagatctatgattaagaatgtaaaaaacagccaggtttggtggagatacaatgtcactggagtgggaagaattagttgaggctcaatagattggcactttgaaggaatggacttaaagctgactctctatggacattttaaaattcaatttcaacattcatgggtggagatatagaaagggtagatatgcgttctctatctaaaacacaccttgcactaaatttaagaaggtatgtgttatttagggaagaagtgttaagtatagtacagcttggcctctagagaccaggagatacagtgatagattgtaaaggcatcgagctgccattggaagatgtcaacagaagagcagggttatctgggatgactctggttatctacatttaagatttggaagggacagatattagtaacaaagatgggcacagtgacaagaatctaataccttctaatgacaaagcaattttgaatttgtcttaagctgtcttttcctctcaactttaagcatggatgatttgttttttatttgtgtgtatatgtgtgttcatgcatatgtgcaggtgcccataagaccaagctgttggaccctctggagttgccattatagacagttgtgagcctcctggtgtcagtgctgggactgaactcagctcatctacatgagtagaaagaactctaaattgctgagccatctctctgagtcctcaacatttattattttttttcctgtgtgggggatttattttttaaaaaaataaatattagtctcttaatatcaattatccagtatcaaataaaaaaatacaaccctgaaaaatgcatatgagcatcattatacagactgagcaggttgggtacatgtatctagtaatacatacatgcatgtttgtagcaataattaatgaaaggagaagctgggaatttggaagagagcaaggaggagtatatgagcaggtttggagagaaagggaaagggaaatgatgtattataatctaaaagtggaattagtttctcagttatagacaaaattatttttgtaaatgcggtggggctgatgagatgacccattgggtaaaatcatttgccatgcaaacctgacaagtcaaggctgatgtccagaaccaatgtcaaggtggaaggagagaaagggttccacaaagttgaacctaacaaagttcctcctatgttagaacatttgttaaaatacagcagaatcctgaaaaaaattatttctaaccaaaaatacatttgtggatgacaagtatgcaaggaaataaatgtttgtaaacactgcatggttgttaggtaatttaatatctgtacttattacttagttttgaggcggtattaaaatagatcctaggttttcttaaaggtaaagagtacatcctttgagtagtacaatgggaactaaagtctgagtgttacaaaaggctgtgttttctactccactcatgtagcaatacttttgagtaatctgttctctcttagggagttttccagatttttttttgtaaatatggttccaatttataagatgcagctttattttgtagctgagtgatgtcctaactaggaaacttttagatggagtaaaattctatccaaagaactgggcatgcatggtggccttgactttgattttctgatcttcttggggaggaagctgaggagagtttcctgttcattgcagtaatacacagtaacaaagaaaacatttccagcagttagctagggtcactaagttttgaataatgttcatataatacaaatgaatagctggttctacaaaaaaaaatttagatggctcattgggtgcaaatattgacacacattctcaagggaaattcctgaaataaagcagaacgagaggatggctgtactatacacaatgttgaagcagaaggattttcaagtaacagattgcatcatttaatgcagatgtgttgtagtagattagcactgaatagtaaaacaacttcagacaagtgcccaaattattttatagctatttttgtttttaatatttatgtgtagtctctatttagttttgctgattttgatagggctccatagaaaagcaatcctcatgtggaacaactcagtagctggtgtgtgccccgtgcttgttggctatcttagaaatattgtcctgagaaaactctcatttctaaggtcccaagcatatgatgtcctgtggtagatgatttttggactgacaatacagaattgacctgaacgattaactcaaaacataaacattcatccttccgtttaaaacagagactctttatggctctccttcccaaaaccattttgacttttcccctgtataaaatgtactggttagcatttcacttttgttggaacattgacctgtgattattttatccagtattcctatgtaggcctgtgaaaggatacctatcaattttagtgtcccaagttttcttaagcaaacacatttggtggttctggtgttttcaaggtttccatagaaacaggatagcttgttgcctttttgttttcttcctaatcgttgtggtttacaattctatttatgaaaaggaggcatcttatcctggccaaccaaagcaaaactaggagaaaatccatggtgtgctactttaatatgtcttgtgctttagggaaacctgtataaatccaggagctagcaatagagttagagtggccagatgtagatttttgacaggataacagagcttcctaggcagtgagccatgcttgcaggggaaatggttgtagggagctggcaagacttccctgtgctcgtgaagtgagagccaatgtagatgcatgcggagtaacaacttccaggaatgcttcctcgggacagtaatgatgctttgttgggtttttacctggtatttatttcacaatgtctagatgcgtagtacttaacgtacagtgttccaaaagattttattagttgttgtagctttatatttttgttgggttaggtgtgtaaatctctaacttcaagaacataagcatttcttaacctcctttctccctcttttatggatagagctatctcgcatagtaaacttaattgggtcagatggtgagcaagcaattgagcttggtgcagatgttttcgttttattttctgttttagttattagtggccattgtcacagtaagcaagtggctagtaataccaccatgtgaataaaagcttccaaattcaaaacagttgcaggaagaccagaatcagcaataaaaatgaatgaaatatttattttaaaattaattgtacttggtttagtgacacagatgtatcaaaataggttgtgttatagtgacagttcactggaaacctgcattttacctgacacagtagctttgtaactaggatgttatactgcctgtagatgagtaaagtcaggaaaataatttgttctttttgagcaagctctttatttcccttacaatcttaattacaaacttgatttgcttagcagatccttattttccagactcgctaaaggaaaccttcagccaaggtctgtttgaattaggccaaattttttgaaatagtagagtttaaattaatgagcctttattctgtttggagagtttgttttccatcattgataattatttccaggaaagttaagtccacagaaaatattcactcagtttccttaatgttgtttaccaaagtcttaagaagtagcttttcctttcacagggctacagagaggacaaggcagtggctgaggaaaatgaggtactataacctggtctcatccctctggagcaggctctgagaagccttctaagctaatactattccatgtaaaaagcaaagcagaccttggaatttgaaagtctaatgtgattgatagagtgcatgctagtacttcaacccccatgagccatgagactaggaccttccaagttgacagacattggacagccctgcccagtgtgcactgctcccacatgtctttcagagaatctaccttttcctataagtaagcctcctggtttccctttgtgtctgtctgtctgtttgtctgtttatttattttaaattcttctctcatatattacagcccatccacaatttcccctccctataagggtctttctctcctatctctcctttcccccagatccacctccccacacacactccacctcgcctcacaaaagaggagagcagaggcttgattttcatcaaggcccctttctccctttcgacattggacacttactaacctaaaatctaacagagaacagaaagtggccagaggtttttttttttcgtattctctctctctctctctctctctctctctctctctctgtgtgtgtgtgtgtgtgtgtgagagagagagagagagagagagagagaattggtagctgattccccaggtatatgttcacttaaggagactattatgctgcctttttcatctatgcctacctttgatgtcttgtgattcatccagtttataatatgtctttttataagatgatgtgaaaagcataaaataggttagtaatatgggcccctatatgtttcatgctacaacaaaatggtaataataacagcataaacattaagatgctgttaaactcgtcaggatgcgagcattcatgttttcctcagggggaaaaggcttgtgagatcaaagctactctatgattctatcatggaatattattacctatttatagcactatgtgagtttcagataaaaatattgccaacacttgcacagtaatctaaataaaaactagaaagaccagttaccacttactaaatgaatatcatttaatggctataaagaaaggaagatatattttaatggcatagtttttaagctgagcaataaaagatatgcataaaatataaggataaaagaatttaagggagcatttaccatttaataaagtatatgtagcagaattattttaatgcctattatattaccaataaatgtgtattgaatgagactttctatattttttacttcattcactatagccctacttaccagctactctgtattatatagtagatgtacagaactgtaaaaaaataatagctattcacctttagtgtaattaaattataatatatacatggatacaaatagtcagaattccttttaaatttgggttcctatagagttttgcctagcctaatagatatctccatagacagattagtatccataaaagttatgatgtcataagaccttgagtttaagtatcattctgtttcttttttattattttattctttcagaagcaacttagtttataagatttgtacttggtattaggtgttatgggtagcacatatgaagtctagtcatgttactgaagtgtagtaaaacttccatgaagcaaagtgttccacaaagcagagtagaacattgaatgaccctagatacattcttgttctttccctgtagcaggcactcataagtatctgctaaaatacatcatgttcattgatactccctgatgcccagagtcattacagctgctaccttgtcatggcaagttctgctcccatgggtgatagtactactatcatatgactatgatttaacttgcatggcttttatctatcgcatttcccatcctcaaatgatgctgtcagccttttcagtatcacttgtgggtttttactattgtacatcataggctggaattagcaactgctatttcagctgcatattatgaagcttctccagtgtgttttatcaccccatgttcttttctcatggaggcccttttcattgagctattccatttttgatggtaaaagaatggaaaactatactggtgaaaatgttgtttgactttgaaaattaggtttctttaaataagaaacagagttaaattatgtccttttctatttatcaaggtcagtttaaacatattgaagggagtaaagtaagatctggtctagtttaggagactaggggtggattaaagtccgagagagccttagtacatcaagcaccacacatatctccatgtactaaatctgcatgtggcattgtgctgtttacctgaaaatgagcactgaggttatcttgccctgaccagcttatagtctgacatatttgtacatacacaatcagaacatacagtggctttttaccatggggacaagactctccagttgttagactttaataaaagggaattaaatgtcttattttaaaaatatgtaacttttgccgttgaatgatcctttatgtaaccaagtaactaaggagaaaggatgcatgtgaatagatggaaatcagaataaggaaagcaggaaagggagagaacctcactgtagaagacagtataagtactgtatatgagcaggggagactgtgtatggactatttaagattaaataaataaatgagcaagaaggagatggtaagaaatgcaggagggctgctctcatgcccttatctattcagtttcttagttgcccttggccttaataggctgacaattgccaggcacccaacattgttaaattatgctgagcagtagctcactgttttgcttcttaaacatctgctttcaagtgttattggatcaggatggagctgatcaagtagtaggtggcagaatgatggaatgttcagtggaaacaggaagaagtcagaagatgtggtagcatctccgtcctgctgcctggtagctgagtaactctggatacatggagtccgctgtcctatgaagagtacatgttctctaaggattttcagcagtgccacttggttgaacccatgactacaggggacttgctcttggaggacttctattatagtttctaagactaagggactatttgctttgtctacttcatgaggttttttgaggttcagctatgatgaaaagaggtaaatgtactttggaaacagtgaaataccatgggaaatggaaatattctccccaaagttaccatgtagcggtcatcatgaaaatagttcagtgtaaatgaatggatgacaaattacaatggtcttaggaagtcaccagtacttatatatatatagtagagaaataggtatgtaaaaagtacagacgaactgtgtagtagacacaacctaacactggatggttaagcagggaggctgtagagatgaggtatgctactttctttcccaaccccctctctgttcattcctggtttctctaaaatccttagggagaagtagacagtgggtcactcacttttctctgtcaccatcacctatctccagaaagaatgaactggaacatggaaacctgttcagcagggaaaaggtcatcttgacccagtgggaaaatgtaggaccacaaacccgcctcacaggtgcctctttcacctgtattcactggcatgtgtaatgttgtaggtggccactgtgtacctttgtctgatagtcacctcgtctcccatcgctaatattttctttcatgtcttccctctagcatattactgtcctttcttccttatcttactaaggtaaacagcaagagaggaaaccatctacaaaggcacaaaggaagaggactgaagggaaactatgaagtaggaagggttcacttccttctattgctttctttcttagttatagagaacagaagctcactttgtatctgatatttctggttagctttacttcttcccttagttacctttagtcctctgccagtgataagtagaaaaattatcaacaaatcacacaatatgaaccatcatatcctctgtcacctgtcctagcctcaaggactgatggtaatgttagaaaggacagtaaatcagtaggtaagactggatggctctaacagggcacacaagttagagtaataacacatgtcttacagtttataaaattcaaattatagatttgattgtcatggaaaaggggaaagaaaaataatatgacatttgtggcagacatgagacaacttattcaggtccaaaaagcagataaaaaatcagaaacaggcccatcagcctagatatgtccaaatcctagtactttggtaactttattatgacttccagcagattaaatttcaagctgtggaaaggcttcaggataagggaatgcttagaatcccactaataagacttattaagtttagacaaaacagatgtctttcaatggcaacagctctgaatcaccaagatgaaaatgggagaagagaaggagggaaaggagcgagtgctttcgctgcagcagtctgcagcctgctcatccttgtacgtcaagctacaagttaaactccccaaaaggaagcaccattaagagggaattcttgaaactgactgaatgtatgtgtatttgtggttattggctacattctgggatatgacaaaggcaatagacaccaggttttgaagtgggcattgtcaacttcaagttttctcacctattttgtgaccatagacaagttgcttaaatctcaacttcattttcttcacatacatcatagcatttatgtactttgaggactgaacttctagaagagtccatgcataacacctggatcacagtaagtgctcactaaattttgattctttagtggctaaagctgcttttgctcgaagtattgtgtctaagtaggttaagaccagtcttctagaacttggtaggaagagttggttagcagctccaaagtggggtgtgtccaagtgggaagaaatattagaaattctttccaggattattttatctagactatgtgaagatatttaagccctactaatatatggcatttgggttgccttttgtaccgttctgttttacacattggcgagtttccctaacattaaatgaggagttctaagggcagctctgattcactatttggtgtgctgtggtcatggagcctgctgtttcattcacacttagcacactccagtgtatttcagtttacacatggctggttaagtcgattctttcggcttgcagtttctttgtagcaatcttcttaagctgttcaaccagttcacccaaagctagataaagcaacctaagcaaaattgacatagcttaaggtttcagtaacagaatgagggcgaggactggcgtgtcaccgcttttcttgccaacagaaggcttcaacccaaggagtttggaaaggaaggaaggaagctactgcctttgggggtctctgagtcctcctccacccgtccatgcttctctctctgcctcttttggtctctgcctttgcccctcatgccctcacccctccactgggccactctgccaccccgtctcccctagctctttagggagttgtctttttccttctgatcattttgttagaatgtaaccagtaggatagaaaataatacacagtgattataatttcatgagcagtttctttatattagtgtatgttaattgtacaaaattggtttcattgtacaaactaaattgcttgataacatctcttggacagaagtaaaatttgccctagagagttaggaaaaaaactagttcaggaaatccaagaaaatattacataacatatgactgcactcttctgtgttgatgtaattattgaagaagcccacagcttacttggcgaaacaggttcctttctgtaaagttacctacaatcctaggtcatttggcacctaacaaactagtagttagatcttccccaaaagggaattaacctatctgatcattcctcttggcgttttataatttattattttaacaggcagtttacacttgttcatgtgttatttagtaatcgacttactgcaagctgaacatcctttatctgaactgcttaggatcagaatgtgcttcggatgtcagatgatgttccagtgctgggggatttgccatacctaatctgattctgcaatctgaaatgctctaaggtctaaaacattttgagtcttctgttgatactcgaaaagttttggattttggagcattttggcttttaggttttcccagtaggatgctcagccattcctattattagtctctgttttccctctcataaataacagaccttaagtgcttcatagatcctttgaaaatgaaagaaaatgaaacaaaggtttttcaaagatgcttgttaaaatcttcctgtggtgggacagaaagccaagcttagtcctgtagctcccttccttttatcaaaccagtccctgggtgtaaacttagtaaatatacccactatcagagttcttcaacaggcactacttaagtatctagtgtatgcaagtcacttctgcagttgtgattcattattttattatttattctgcagttattatttatttacttttattaccgtagtagcactgtgagaccagggactgttctggtgaaaggaagggagctagagcttgactttgtagtcgcactatgggaagattttaacaagcatctttgaggggcctctgtttcattttcaaaatacttagcaagcacttaggacctgtcatttgtgagagggagtgcagaggtactattattttcttcattttacaaatgaaacttccacagattaagatatcacaaggctagtatgcggtgaagccaatatccacatgcaaggatttctcattccacaatacatttgattctatacaactataaaatgtttcttatgtgttaactacaacttcaggtttgcatttgaggtgctctgtctagtggctccaccattaagacatgctttcagtgattgcaaagagatattcagcctggaatataaactaagttttaaaattctaagtattttaagaagtaattcattgagagacaagtgtaaaggtgcttgcctgtaatcccagcatttggacggctcaagcaggaatattgtgaattggtagtcagcctgagctgcagagtaataccttgtctcaagaaatttaacaaattgggtggggtgatgcatgccttcaatcccagcacacctttaatcctaggcagaggcacatggacctttaaaattcaaagccagcattatctacataggcctagctaaatagccctatctacatagttccaggctagctggggctacatagtgagaccccgtttcaaaaccaaaaccaaacaagaaccaaaacaacaacagcaacggagagcttacaactaaagtgaaaccatagtgccctcatttagatgagggagagctccatggaagattctagtctgcgtcagctcattattagattgcagccacttgaaatcagaaataatctcgttttcagttttgccaaaatggaaattgttcgtggccatatcatagtctgttttccaaacccacacagtctttccttcccaatgtgatgagagtactgttcttactgtgtgtagtaatggatgactcaaactcatactgagtcttaaagatgaacctgactcatgcagtgaaaaataaattatcatttgctctggtaggatgtagtttaaagactttcatcagaaaaaaaaagaagcaaaatttaaaacacgatttcatgttgtttgtttccaaaagcagagtagagtaatccagcagcaactctacagagaatgtgttatgtggacgttgcacaggaagaaatgaggtatatttgccatgtgcacatttaaccatctgcttctttaggtagcatacatttggcactcttcatcttgctcgactaaatcaaatttgcagccagttcctctagtttgcagcatacagagacagattctgatgatactcttgccccaggaggagatttctgatggacggctatgactgtctcaaagaacataggcttttacaacagtatttcctcttttattttttgagattataatttaaatatatgtaggtgttttaagaatccaagaaccccaataaaagaccaattgggtgatagcactcttgaaggctaaatgaatttcacaggagccaaacaatacctagcaactggtacagaagttcctaggaggttccttgtttgtacctttgcatgtaggtctctactggagacttttctcggtgtcctccgtgtgtactctcccacccatttcctcatttcttttcttttccctcctttcagccctctttggatcccagacctgtgttcttttctccattcctcatgaattgcccattatcatataacactaaaatgggcatcagagttcaccaatagaaacgtctgttaaacagccagtaagttatctgtaaaactgttaaggaaagaaagaactgtggccaggcaacagtagacatatggcatagagttggaaatgtcctttccctgcataggcagtcaaggtcactttcatctcgcttgttggcagtgtgcttaggtttgagcattacttccatgtttgcattttggtttgtgtcccattgtttcttggttttgaaaaactaaaacacactactcagtgaggaagagaagctctgtgtaaattttcagatgggggtttaggattctagttctctacgtttctgaggtgcaaaggtgttgcatatgcattctgttctcagggtcctagtgctgcctgggaatggcaaaacaaggaatttcctaatggtctaaacctctcagaaagaaatggaaaaagctagttcatacacacttcacttgcttctcttttacccaatagcagtgcttagttgcgggtttaataacttgtgctgcaatatgactgtcagtaataggaagcccctgtcactttggtaacttccgactgcttaagttattagccaactgactctgtttcaggaagcgaatggctgccttgccaggtgcgtcccagtcattcctgttgtaagtaagaatgttatttaggatgagccttgcaatatctaatgttgtgcccttttcagcagtgctttatttcgtttttagcaaacaccctcacaaacctcttgattccttgatagctaaagtcccattttcttaactttttcgttgaagtgctgcttaacattagcttctaactgacagacattaacactgcttctcacttaggtgaaatgtgaccgtggcaaggtgccaggtccaactgaatacattcaaatttggtgtttgaactaaattgtgttttaaattcatcaccatcatatggttaatggggcaaccagctgattttgttcataaacatttggttattttccctaggactatttaaacattagagaatggcttcctatcatttcaaagagaatttcattatcagtttactaggaaatcctcctgttgaattcttaagcgccctccaatttaagttggcagatacttgttgggtataaaatgtttttagtgagccaggcgtggtggcgcacgcctttaatcccagcacttgggaggcagaggcaggcagatttctgagttcaaggccagcctggtctacagagtgagttccaggacagccagggctacacagagaaaccctgtctggaaaaacaaaaacaaaaaaatgttttcagtggacactattcatcatttatttttgtggaattccagtggccaagaagtctaggaatatttgccatttggctactaatgaatgcaactgaattgattgtttatatttttttaggcagagacagtacaggtttcagatcagaattgccaagtaagacaattgttttgtgttccagttaaaatgtataatctattcaaaggtgaagactaacgtgtggttagtaaagggaatttttggacttgagcctaaaaatctgggttagagacttacctccgtctttggcttagctggatcatctcagctaagtcattgcccaactttagaatgcagcatcttctccaaagccctagctttaacagtgtgtacagagtattctgaaaggagcctggctgagggaagctgaattctctcgtgtgtaagctatccacaccagcttggcagcttggcagctcggaatttgcattgagagccattgatgtttctttgctcacaagtttaatgaaaagttacttggagttgggaaacaacgtgactactaacatttccgtttgaatttttgatacaatcagatggtccccccccccccccgtgcctaacatccctttacttctcatgtcggagctttgcagcactgtgcttgagccctaggacagtgacgtaccatgtcatcttctatccgttctcacctcactcttgttctagagcttttctcttcagctctagagtgactgagcagcaagcgcccacagcatgagaacaacttgttccagtttaggtacttgaaaatactaatccatttgaaataggttgaattttactggccttgaattactcttttgttggtcagtttaggaaataacacacactacaaagtattgagaaaatagctatgtaatgacttcatcccatgtattcttttagtgaaaaaaaaaaaaagatctggatgcaaaaagtttatgttcttaaaacagacccagagttattatacaaaatggtgattcccatggtgggaaccatctgattatattaaaaattcaaagggaaatgttagtagtcacattttttttcacccatctccaagtaacttttcattaaacttgtgagcaaagaaacatcaatggctctcaatgcaaattcctggagaaatacagtggcaatgaaagcctagcagggctctaagggatcccaaagagatcaacaaacaagcaaagcaggcccagagttcttagagaaaacaacaaacaaagcagtagatgagcacagtcttggtgaggatgttaaaatcagggacctccatatgtcggagatgggaatacacagttatgcaggtctttgtgggaactcttagtccctcacaaagttaaagacagcattaccttttttattttaaaggtttgcttatttgatttaggtgttttccttgtcctctaggctactgagccatctttccagctcaacagaattaccttaattaccttaatgactagtctttactagtatttaccttaaatgctagtaggtatgtacccaagagaagtgaaaaactcatgtcttgattaaagctgatgtagatattcaagcagcatatttcatttctctgtatttttctctgttgtaagtctaattctacatacatatgtggccaggaactggaggggcgagggggctgggaagttgtggttaatggggatagtttttcagttgaggaatctgtgcatttctggagctaggtgatagtgaatgctacatgaaaccgtgaagatacttaattctacagagacatagatatgtacaaatggtgaaaacattaagtttcgtgcatactttaccacaataaaactccctccctaattcccaaaaatacattttatgatgctaagtatagagggtttgttcctttccttatgtcctttttaatgagaaaactgaaaaatgtgattggccttttaattagctggggatacttctgcacaatgtgttagcattttattccagcatttgtgtgtaaaaggtggttaaaaatatgtcttcaacttgcctttggatgagaacttgagaacatttttaagatctttattgtcagtaggaaaataaagggagcccaaaccatagggcatttatgttgttaaactgtaaaacagtgaaatgctgctttcagagtaagactttgcaatttcctggttttcttggttgattttggcttcttgagtgacatggccatttctactgtataaatatgtaacatctctgcatcttcctcagagaatcttcttttgtatagttagatgggaggagcaccagagtgcactgaaaatacaaatgcagtgagtttcagaatgccaagaagggttagaaagtgggggaaaggtgcaaagcgagagcccatttaaaatacaaaatgtacaaggagtctgcattttggctgagtcagttaaaagggaatgaagttctttctgaaggctgtggggcttccttatgtttctgagtttgtaatctatgagaaagaaacaatgaaaaggttttctaagatactgggtcaatagtttgatccatatgttagataatcagaggtgtgttttgcttgaccaggaagtggtttcgtataaaagcacagggcatatggtgtgtgtgacaggcagggagacagtaagagggggtggggacggtactgttgatttagctcttctactcttggaagaaaaccattttcatcctttacaagggtctttctggagtttggcacagtggcacttgattaaagggtctaatcagagttgatgtactcagaactccactgatggggttaatggcctcactagctcctcctaatcagacctccgtcgcacacacgggcccttttccttgtccttccagagcttttgagtcctgtcttccgttgccctttgtagggcacatgagatccttgtattttgaagagactctgatttgaatgattattttcttttactttgattttttttctgtgatgaaaaaaatcatctttttgagttatttaatgctctgtggtagccgttgcaagttgtattaatgtttctctgttttacaatgtgatttcctctatggaagaaaatcatgtgtgaccagtcattgactcggaggtcttccagcatgttcccactactctagtttttattttcctctaatggaaaagacagcatgttctgcatttacagatgatccagagaaacagagaaagtgctcttgaggaggttgacttgaaccttcactctttccagctgaagtggccacgggattggccagtaaacagactctggtaaatgaagaatactgacttctaaaatggcccttgatgaccacttgtgcacctttgatacagttctgctgcttcttagttatttacctgattcaaatgattgccagtatttgaactgaacgtaggaactgtcatatccagtgatggctttaatctccgctctcttcaacagtgcccttaaagacagccgttttccaccaatgacaagggatgagctgccaaggcttttctgctcggtgtctctgctcactaactttgaagatgtttgcgactatttggactgggaggtaagattatagacacgttacatgaaggtgactcctgagtagatgttaacaacttggaccataaagtgaagctttccatccattcttacccagaaataaagctcccgcggaacaatgagatatgattggcttttttcttttttaaggcaactataccctgtgctgttagaatctcgaaactgaatttggtcttcacttttatgctagctcacctaagcacccaataaaggctgttaataagtagtgagaaggagtgcctggaatctgtttctccctgcatttccattccattctagtgcactgtactgtatgtaactgctactgagcatttagacagtctgagtatacatgttagaaaggagcagcaaaagttagcataattattatcatttgggggaaagaagtttgtgacaatggcagtaaactagaatgaaataatgtgagtttattcctggctacattaatatagacatttgaaattacagcaacaatactgttctatctagggtatgtctgtgcattgctattatcagagaaacctaccttaatcatatctttatttgactttactgtgtgggaactttactaagctctcatggcgatttactttggaggttaaaattgctgagtggaggtcttgcctgtattcctgaataccagctgtgttctcggctttgttgtacatgtacagaggggcgagataggctctttaccttgattcagagagaaatttatatataaggtatgaagaaacgtgtgggggaagattgaaaacaagggaaagatgctgataaatagcatcctctcacataccacttagaaaccgaactactgtacccttccaagagcctttcagtctactgctgttttcgaagaatcattcctattgttactgagacagccttgtaaccagatcattgtcttcatagttaattggacttgaattttatttttgtttttttttatgacttcttggactacagatagttgacttcaccatagtttacttcttctgggtacagaataatattctggagatctgtctcagaagatctctgatctgaattatttttgtgacaccagagctattttatagctttttgtatccgaagatgatgaaagcagcccctctgggttttctcattggctttttgtgtccttatcagaaaatgaaaccatcctaggatctttataaaggaagaaataaaataatttaataacagttatactagaaagtttgaaaagtgtcaacccctttatagaacggaaattccctactttctttttgttaagtctgacattccaatttgatccccctttcctccttcttttccccttatctttcaacctttttgtttgtttgcttgagataggctgtcaccatgttgtccaggctgcccttgaactcaagatcctcttaccctctgccttcctagcagcaggaccacaggtgtgcttcacaccatgagtgctgttgttgttttgttttgatttaatggttccaattgacgtccctatttatgaacatttactatgctctgtatggctatacttttactggtttggaactgttgctttttttttctctagccagagtttaatttttgctctgtagagtagaaaatgcagtgtatatagtggtggtgtggggggcgagaagcagggaaggcctcagatggaggggatgaccaagctacagaagcacttctaccctcattgcagccactgagttgaaaatacagtgcagcatgggtgaacacattcagatgtcttattcacacgtgcttgttcagtagtgtgtgtatgtttcatgggaaagaaaaaaattgcgactccaacaactgataagtaggtaggtaagaataagcacagaattagcaacagcacctgacatcacatcacaggttctcatcagcaaaagctcacctcgctatgtggctttgatgttcgtaaaatgtatctgttttctactgggtggatgggaagtacagcaattgaaatattagcactatgtattttgtcaagtattatttatcttttgtggtcactatctgtcagcttgaatttctacaagagtcaatattctttcgacttcgtgtttgggaacatacattttttaacatttttttaaaaaaatgtatttatatgagcacactgtagctgtctcaaacacaccagaagagggcatcagatctcattacagggggttgctgggaattgaactcagaacctctggaaaggcaggcactactcttaaccactgggccatctccagccctcaatatttgtcttattatgtaaccttctcttgttaatttaaaacaatacacatggcttggtatcagcatttgaaagtgaattacacactgctagaatggtggtactaggaggaacagactgtctctttctgtgatttcatcagtgtttcaaagaagacactggaaactcacaagaagtatattctcaaagagtaacaattgcatttgtaattataagaatgtgagttagttttaggtgtactgttgtagttgaaaatggaatactgttcttctaggaaggatagtctaaaggttgcctttggtaattaatgaaaaccattgctatttaaacagagtgtcaaaatggaagtaaacattttttttatttataaactgatacagttccacccttagatatctgcccaaattaattcaaggctgatatggaaacaaaatcctgaacaagaatgctcatagcagtacttttcacagtaatcacaaactgaaaacccaagcgtttattaatacctatgtcgatatcagccataacccatgctttagcatggataaacctaggaaacatcatgttaaatgaaagaagccagacatgaaatctcacatactgtatgatgctacttatatgaactatccagaatagacaaatctctacaaagattgagggatgggaaaagcatgaaagggaagtgactgcttagtgggtacagcatttccatttgcagtggtcaagtgatccaattagtgggtgttaaattttacaaatgcacacacacatacacatacattcgctctctctctctcacccctctctctctttctctctctctctttctctctctctctttttctctctctctctttttctctctctcactctctctctctctcacacacacacacagagacacatagagttctttcttagtaattttgacttatttaagagaacttaactttaaagtataagaaggaaacataagtccctcataatcttcacccttttgcttctgagaacagtcaggtccttggtaccatctatggcctgtacaggcacatatttaagcagatgcagactgaaaaaggttggaaaacattatttctatagcaaaaatatacacttctgttattgcatttagatgctctaaactgtttctttacatcctttgtctatcaatacatttgcacgcttagttacatgtggttattaggtaaaagatggctttgtatattatttaattatatatttttgatctttcattgtgaaaaatctattatgaaagttataaccttctctttgaaaaatttcccactgtcaaatattagacctctttcccctgaatacaataccctattttctgtatttagttttaacataaaacacagagtccttatggcatatgcttatgccataaggaaaaacaaaattattttcaaatttttaaagaaaaaataagatagtacacttgttataagcagaagttgggataactgatgacatgtgttacttcagcagaatccctaattagagggatcctttaaaggtatgaaaagtgagtgatttagggaaaatcgtcattaactgatatgttgtcatatccacctgcaaagctaaaatgattgttcagtgaggaaaattccaacacaatctccttctcaccaccaccgttctgtgttcttccactgacagcgttatgctaattctaaatgacaggatgattgacagacatggcactttacaaagaaagcaaacctcatgtagcatgttggaaccttccaaaatgacacatagcctgcaagttccactgtttgggagttgtgtttctccttgaaccactatgaaaggatgtaagacaaatggcaatcagcagagcttggtggcttgctctaggtccagtcacctcagctgctcattttcaggctattatcaaggattcagatttgtgtttgtagcactgctgtggcatgcgtgctaccaatgattttgttgggatctaatgtaccacagagctgacaggagtcaacatagtttctaacttataaccaagcatcttttacttctgagctttagagggaagatcatttcaaggcatgaagaacagatgttttctaatgtatcctaaagtaaaagcttagatcatatttagataagttaatgacagttgcatgaactagaagactttttcttctttatctgactttgaagacagctttttgtgtgtgttgtgttggggggggggtcacttttagtataccacacttacatagatagaatcatcccatgcttaatggagctggccagcaggatacttgcatggttctaaactctgtccctggactattaaagctagaccttgtgtctctagtctctcgctgtccccacctaatgtaacaaagcatctgtcattgtatgtgagccttgaggactcctgctactcagcgagctgtacttcattttcaaaagaacctctaatgcacacctctccagcgatcacagttccatttctgatgtatctggctgcagttaataatagggcgctttgtaatagccttcgtgagaataaacagatgagatgaacaaattggctactgtcattatccccccccccatattttaaatgctaatattttccttttcactctccttccccccataaaggtttccattttttttagatcctcttaatgtacaactgaaaaacagagtccccattcatacacagatggctagcatgactcacagagtcaccaagcaaaatgacttctagttgcatatatacagtctgtttccccccttgcttatttttcgtcaactatgatgtacattatgttctgttttatttctgccttaaattcctgcctttgtgaacacgagacaacaacaaataaaacagtctacctagatgaggaaatttctctcattgatatttagaaggaccttgagatggagtgggagatgccactgtggttatggaaatgcagtccttgtcctgaagccctgctctgagtgctctatggagtgctaggggccattggggagggaatgctttgcactccctggccatcagcagaggatttgttaggaatcatcaaggcctcggagggagcaagaagcctaacagggaagcaagcagtaaagcaacttcttagaagtggatttatcccataaatatatgcattatccatttggatccttagtgaatgaacaacagagtctgttctcaggtttcctgccttcctgtctgtattgtttggtggaggaagtgtttctgttatttttttttttcctcttagaatctagactgtcttccttctccttccctggaggttcagttacagttttttcatatgcactttgcatgtgtcccagcatttaatttttttcaaagtgctgcattctgaggaaaaggagacttgggttctgtgacctttctggtccgcagtttctatactaggaagttgaaagggttggactaaagtctcttgacagagtgtagttctgtgtcagagtcccttttaaaaaatggcttctgttttattttatatgcagagaatgaatcagccatttagaaatcataaaaagagttccctaacttttgaaatggccattgtcaatgtaaatgttggccaaaaactgtcaaaagaatccagttttttaaaattatgcattctccatttcattttcacaaagaattctctttggtaacaatgaaatagagctatcaaagcctctatttcattactgcaccatttcctcccttaagtcagtattttacatgtaaatgtaagtgcaacagttgcggtagggagatattattccttttataaatggtattttgctttacagaaggacacagtatactttctttattgccttcctcataatttcaagattaatctattttcataaatcccagccccttataactgttcagaatcaaatctcttttgtaaactaagctaactcgtattgagtcacatactcaatgtacatttagaacttggataagatttttcttagcttatcaggcagacattccctacagaaacttgtttaaccagagatgccctctccacccagcatttgaagagtaaactaagctcaaaaatataaattacttgacttccctcctatttaaattcatctcctttgtcatttcttttttaaaaatggtaggaacgcatttctataacatttgatgataagcaggctttttattaaatgccacctatgttgtctgaactttgcatggtaagcttcagtgtgttcaatttttctgaatgcgtattataattagtctatatgaagtgtttttcccataattacactctgagctgtcatttgctcactgtaaacttttgagtaagaacattttctattattgcaaatgatacattaatatatttggcttcagagctttttaatgtactacttcattaatactgctttatttcaaatcttaactgattattcacaagttcatgggggttattgttagttcaggtactttagtggcaagctactaggtaaaaataaatgttatatctgatttttgttagtgaacttttatggctaaattgacatgctcatgttccttatagataagaggtctaagtttcctgcatgaagcaaaactactacaaaagctaagaactggtcctaagagactgaactaatttattgctaagctaaagtgactaatttacagagatttgagaccagagcagcatatatatattttattcaagggaacacttgcagttattgttacataacaagaaaaagtaatccattaactgaggtagatgatgaaggcaggtttttatattcagctacattaaaatattactaatgcccgagtgatgaatatgtaatcagctatctcttttgatttatattctacaaaacttctcaagaggtattcagagtgcttgaagaccccggtgtgtgatagataaaggcagcctaatatgcacaccttattgactcagttcaggagaaaaatgtttttaatcactaaattactaagtcactaagttacatgataatcatactaggaattacaggacaatcacactaccttttccttctttatattcttctaaagagaagttccatatgtgcagctcttcttatattcatggtcacagttagttgttaaaatttacaacttaaaagttactaatggtgggggaggatatccaaatttcagaaagactttagaaatttgtaaattagccagtttgttaaccagatagatagctgcagaacttcagaatttctacttaaactggtgggcaaagaaacgcagccaaccatatgaccgagaatgtaaatggaggatctagagcatatgtagtctaaacaatgctttcaggagtactgaatttgggggtaagaacacaaaatcttacaacagaattaatctagattacaaacttgaaataggcggacccaggtttgagatattgtcatctcttacgttcaatttgcttttactaggaaaagtcaccattgtggaagggagctggagtcaggtagaatctcctgtgatgggaggagtttgagagggcagtatagagcactgtgggtttgtagtatttttagagaaaagaagcatcaagtttttccacctagaaatctgagagatgcagacgctgggtcacatctgtggactgtcctgtgcagcatttatttctggtcacacagccctaggcttctttctgggtgcatgtgtatatcatcagtggtgcaagccttgaaagagttggtagtgtgccaaacatccctgcttctctcattaagaactgagtcctttcatttacttcaatggtactggtatattacgcctggcaggtcagtcttttgtgaatggccagtaactggctgtgttgttaattacaaagcatattttgccaaatgatttcatccaaaaaagcatgccaaacaacttttaattctctgacctcctgctatatatttctgtatattattcaagatgaactcactggaaaggagtgtggtgagccatggccataccgttaaaaaaaaaaaaaaaaaaaagcacgaggctccaaaaatgggaattaatggaactggccctgccaacagactgagataagatagcacctaaggaaactgattgatattcttggcccaaatattatcaggtgcagatttaatttcaaagtcaggactttggacataattttagaccctaatggtcaaaggtttcatggaacccattcaacttagctggcacacattttatagacaattatactcttgcctagacgactttctctttcttccatcatgttttaacctattcagattgtctgctcactgattaggctcaccagtaaaagcaggatccctttgtaatgctgctaacgtattataggactagcacttgccttacagatagacgagggtttattaagctttgactatgcagctgtagagtgcataacatggactatgtattataatagagtgggagagggcacttttttaatgctcttaggttgagggccactgcattagagactaataattttaagcgaagccacatttctaacaaggggccagataatgaggataaatgaaatctgtactcagtctcagggttcatttcagccattagttataatctcttccaccaaaccttttactatgaagcaaaattgattaatttgcatctatctcttttccctgcacccacatgcttgctgatagaatgaacaaatagagaaatggatgagagaccaaagatgatgggggctgagacccagtagactcggggacacataatccctaaactggagaatcatgataatacatctgaggggtcaacattaatcttgacatgtaatcattcagaacaatgttaaaaacaaaagattgtatagtatcattagtaaaaattacttgcaatggaatggctcagaataaacatgactttctctttagcatgaaatagaaatttgttgaactggtcttaatgttctctcagcacacatagatataggtccctttaattccatatcctcttatctataagtcttgcatttaatttactacaactctagttgatttatagttctacatagcaaaagtacactcttgattaaaacaatattatagtagctgatagaccttgaaagcattttttttcacagacattctaattattttaaaactgacctgcagagcttctagttgaagctagatttgtaagcctccagtttttgcccacttggccatatttctgaagactggtacagtccattagggatatattgccattcttttcctagatgcgttctctttctccatcctaagtagttactaaggtaattatagagcagacttaacttcagggaataccaattctctttgtaactgatcaatatctcattgataaatacaacaatagctgtgataacacaggccagcaaagcaatgcaagggagaacacatatatttttgcttacaattccatggggcatatagtccattgtagtgaggaaggtaaagttgcaagaggatggggttagcacctcacattgcatcagaggttgggaagcagggcagaaaatgatcaagaactgtgggacgaagctataaaacctcaccctgcctgtaaggctctaccttctaaaggtccccgactggagaccaattgttcatacacaggagcggggatgctttccacattcacatcacaacagtgatttttttcagtcgagaagacttagtttgcaaagctggtgatttccataagtggatcagaattggttgtgttccacagagtaccaatttccactctcctgctttgactcttcaatgtatctgtttgttggcagccatggtccaaacatgatttaaaaattaaaaaaagctatttctaaaagagtaccaaagaaaacattactcccattctccgggttctgctagttgaaaaatgagtcaccctagtttgggcttcctagctttgtggcctatcttcctgacctattaaaacttgcttcacaccaagccgttactttgaaatcaccatatttataggagcttttccttgttcaaatcagaggaacccagaaaagtgtttttcttttaaatcaaagtggttgcctgggccttttcacaatacaaaagtaaatcaacagtcttggtaagttttattttgttcaacatgtccttcattttgatctcatataaacaggtttctcgagaaacaatttattttttatttttttaggaaacgattattttaattactaaattactaggatttaaaatctcaagagatttctatagaagagaattgtgttcttatttttaaaaaaggatttatatatctaatctactcctccatctgattaattatttttctccaatatgtaggcgtgtggtttgtcccacttgcatggttggttagtagagattatctggtttaactagggtagtagtcaccgtcaggagttgacccttttccaaaccatacttgctgaaacgtgatctaccctgtaattctaatcaagttttcacccccttcctcacccaaagacagttaaatattgctcaacgtgcagataagaaacctgtctcagagttttgactagacatcttaataacaccaaaattatcttcaattttaacatgacagatttttgataaatagagttaaagattcaaaattgactccggtgaatgatagaggataaattacatgtgctgtgtattttgaagaaccaaattatgaagcatctgatattgtcactgatcaggaagttagtatagagaaagtatcaaatttgtcattgccttagtgctaagtcagatattggggtggttggtaaatgcccttcatcctagaaatatctgggaactagacactcatatttcctctcagcagtccacagtcacagcccatggggtctgagaggccttactgtggtggtttttaaacagctgtcctattgcatttttagcaagaggagatttgtaagaatattgatatcaaatagatagaatagccacagggatacactttaataaaaaaaaatgcagtaatcgctcaaaagatctgacaggctcaaggggtatttgtatgaagacaggatggaatccatttatcagtggacattgccttccctgaaaacctagaaaacttgtgcctaagggcagaaatagcaaaagcggttctcgctgacatgtttctcctctaaaccttaacgtgtttgcacacagagaacgcataaaagactctgtctccattcatgtgctctagaagaagcctgtgtcccaggaatagtgtgtacctgcctttgcactcaccctccagtatgttagacagccttacactcctcttgggaagtcctgatccaaggcaactagagatatgggagaatggaataggatcgttgtccatttaatttttcatttttattatcagtgttttcaaagaagttaagagcttagaatcttttttcttcagctttgtgcactattctatgaggggatggtcagcttccttttgattgtatgctaattgaagggaaagcatgttggttttgcttacaaacaaaaaaaataaaacaaaaaatatactagtagcatatcttcctacagccaatacacttcctttttgggtttcaacaaaagtttcatactttaaaatgtcacagtggtacctgagctaggataataaactatagaattgccttgtccgaggctaattcgaagtccttattgctgttacattgaagatactatgcaacatacagtctggtcgttttcattcctttttagactttccttctaagcagggtctcactatgtagtccatgctatggaactcactgtgtaacatggatacaacactccatatttttttagacttatccgtgttggtttgcctacatgtgagttacgggtttttttcttttattggatattttctttatttacatttcaaatgttatcccctttcctagtttcctctccagaaaccccctatcccatcccaggttttaaaggcactagagcttgcaagagtcagcgtaggaagtttcagaatacaatcttaaattgtgagtgtagctacttgggttttcctctagtttccttattccaggctgggaggtgtggccatcaactatcctactgtatgctactgtatcctactgtatgtatgtttgttgcagatttctaaacaaatagtgtgacatatattggacacacacaaatcagtgtttttgcaggctctatggatagcatactagccttccaatccaaaatcaaagccttggaaaacagaaaatgaatatctactcctaaagacaaggggaacgggttggggacttagcccagtggtagagtgcttatcttagcaagcacaagtccctgggtttggtcctgagctctagaaaaagtaaaaatgaaaggaggggggaattgcattggaagttaaatgataaccttttctttctgtttctatgaagaagtctgtactaataaaactgccaatttctttcaggtgggtgtgcatggcattagaatagaattcatcaatgaaaaaggatcaaaacgcaccgccacctacctaccggaggttgcaaaggagcaaggtcattgttgtcctttatttcataccatctagtgactagtttaaacacgctgcagtgcagtcactgaccttgcagttatgtctgataattgatcaacatcaaattataagaactgactcttccatcactgcctctgcaatgtctgcctcaaattggttaattactcacatggaatctgcacctttcactgatgtctgacagcatcctcataagtgcaaacttttaaaatggcacacatttgtagaagttaggggtttattttaggcagctgtttgttactgctttgtaacacagttttccaggcaccagtgtgcagtaattttgatggcgttaagaggccttaggtttagaaactacatcaaatgtagtttgatgtcattcattgtcagtatctaacaattcttatgtgactgccataactcattcagctaatagtgaaactataagctttccattaagattgggggtgttgtgaaaacatgaagttttttatgtttactctacacttcgtaatcaaaaataattttatttcacagatatgccacacatctttatgaaccaatatggtgacaccaaacaacttcactatagtagtttgtccttcctagccactactgaattctaagtttacattagtttaaatgctttttaaaaattctatcgcacttatcttttcagaaggcacttaaatgtgcttttctcatgtatgctcatataaatatgagagatataacaatagattttaatgttaaacctcaaataaaaatgttaatctttaaggcagttatgtgaagatttatttggattgctttagaaaatgtgttaatactgcaggattaccaactccataaagatattagaatagcattcatattagaaacaatggtattcattgaatatttcacacaaatgtagattatcaagcatagaagataccattaagaccagcaatcaccatgaaatagggattggagccccaactagtaagttgacacaagtcatgttttatttatttaggctttcccttctttttgaaggtaggaccattagagaagagtacctggttgtgatttgtgacagagacatgactgagtagtttcttagacaatttaaggcatgttgtgatggacctgattctatacaaggataaaatgttagctcttctatctgactggtttttaggaccaaaggaattgatggcatttggtgacagggatagctgacctctaccaagtcatttctgtatttaaccaaaggtgcttttgtgacactgcttaactgatattttatctggcttcttctgcacaggatgggaccatattcagaccatagactcattactgagaaaaggaggatacaaagctccaattactaatgaattcagaaaaaccataaagctgaccaggtactgggatggctgggatggcagtttgtaactaaccagtggactttgaaggatatgcctatacctgattttcttttttaagactctcgaactatccttgcttctcttgtctaaaatagtggaaacaaatggcagagtgtcctgagagtggctacaccggaagtctgctgtgcagtaaagcctgcatgatacccgaagtcatcctctccatctctagctccatacgatgacttgggctttgtacagcaagccctgtgagacttgaaactaccttgctggagaaagtactagaattagctattcacaagcttttgacgtcgcctagcagaaccccaggattccaataagcagtccgaaaatttaaatttaaccttagaattttggcagtgataggagtctactatgaaagcttattgaaaaacaaaattgagctgaatgtgaatgctaaataaatgtcaacatggaataatagggattcttacttaaggaaagtattgaacattttagaagaatggggtactgtttccatttatttcagttccagaaaattgtattacatgcctgtagtttcaaaaaatggattgttctcagctctgcacaattacaaatttgagaatgtccccatttctgttcttctcaagcttatagttgaaggagaatggaagggcatgaataaaaagaatcactactacaaggcagactattacagatgtgtaggatcatagtgctagggacggggaactccaggaagtcagtgggtaacagacaacttcaaagtggaggtggacttagggctggctttaaagaacgagtagactatttggcaggtagagagcaagggaggaaagggattcctgaagatgtgctgtgaatcaaagcacgtaagtggtgcagtacaaagccagttctaagaaatataaagcactatgatttggcaggtctttcagcgcatgtaggaaatgtcactaaagggaaatatagtctagaaggttcatgatagagctgatagcctggaataatctgtgagcaggtcaaagtcaaagctgtggggatcccagtgcatggaggagggcagagtgtaaagtttaaactgcgaatggtggaaccaaggaaaatcctgcaaggtaggagtagaagcagctgtcaaagagatgagaagcagggacagcatcagggaaaggtggaggtgtaaaatccatgagcctacagaacaagtggattgtgggagtatcatggaaagttccaaagagaatcctaaggagcctctgacagccatgaaaggacagtggcagaaccaaggaacactgagcacctgctaggaaaagaaagaacctgaggggagaaactgtgcttactctcctgaaaagttgggtagtggacaagtaactagatagagacaaagtgagagggcttcagtactgacgtgtagcatagagcagacccaagatgtgtgaacaaaggaagagtaaagggggaagtgatggaaggtctctgctataaaaggagcccaatgaatgagatgtgtctatgatggcgatagagacatgatggtaaaagatagcctcttccttgttccttcctgatagcaaagtgggtaaaagggacaatgtcattcctggagtagaagggcagaaagagcactaagatcagtgttctgatctcagctttgctgcttaccaagtctgtgactttgggctactaattgcttctctcatggcttcttgtttcccactatataaaatgatctcatagagtccctctggctctgataatagcataccatgtgtttctcaatgttaacttttctcttccccgccttccccttcaggtaccgtagtgaaaagatgaccttgagttatgctgaataccttgctcatcgccagcatcatcatttccaaaatggcatcgggcatccccttccgccatataaccattattcctgacactgagccgcacaaccagtcactgggcctctctgcagacctcttcccaggagaccctacaccttcttggtctagctatctcttttactgtaccattttatgatgatagtttccgttgccatggtgaagcttcgacattgttagttaagagcatcatggtaacgggtaggacaatggcatttgttaagaagatcctgttttattattttagatcactgaatttttttttcagcacatacagcttttgaagttttctttccttacaatattaggtatctttttttgctttgctatctcagacaggtttctgtctttctttgttcctttttttcttcctccttccttcttttgactgtggatggaagaaagtatgctgtttctgagggtttattagatttgtctttagtattcttcggtaagattgtcattttttgatagctgagttggggattaattcttaacaaattcaggtatttgtatattactcatgaatttgcctaaaattctatttgctatgacagcttagtatttgggtcaagtacacattttttcccatggttgaaatgagtgagctttagagtaagtaatgaacattcagaggtccatgataggacttgtcacagagagcaaggaactgtttacgccttctgtgcttctgtgttactgtagaagagactgcctcatgttatagaacaatttacaacctacaacactgttttagaaaagcataagctacctttcaaatgggccgcggaaatcattgtgaaaggcagcatatattgggaagagattagatgcagaacttagtgcctttgagaagactataattaagtcaaattaagaggggtttaaaaaggcaatttagagaatattcttataaaattttattgtttctatataagaaacaacagattacacaaattccttactccaaagtatttttttagctgaaaaaaattattttgagcaaataaccaaaaagacatttgtctattttgtattcatttaaatttgttagctttaggtttcaatgagtcataattggccagagacaactttagctactaagacatgataaagataatctagtgaaacaaaagttcatacatactatgatttcaaatttgtctatcacagagacaatgctgagtttcagagatactacaaagagtttgaatctctttctgcactacagccttttgatagaaacacatttctgtgttgacagataatatggtagacctgtaaagatggcattcagatatgttaattagagcctagctcatttgcagggctatacttcccatggcacaaagaaaacttactgatgtcaatgggaaacccttttgtttatccccaggaaaactcatgatgattctggcaaaagatgacctttgttttatggtagtatatatataggtatatagagatatatatatttgggaaatatataattttttcaaacaggaagtcattagaacaagtggtgagtgaaatgctgcagaatgtatattctacaactatgacataccgctaattattgaaatagtcaagcttatacatttaattgctgtgacaagtgacagactggtagttcagaaaatccttgtctagtttgtaattggctgaattcattgtccttgccatcagggcaaagtacacagcttcagtttttgagagttctttgaagtttggtatttcttcatccacagaatccattgttgacgtatccattttcagttatgatgccttaactaagaagctacttgctagcctgaaagacagtctcagtagccagttccattgaatacagagaaaacataagctgctgagctttagcatgggcttctaagtcccgttgtttctctttggacacactttgtgggtggattagtctttcagtatagaagcaagctgctacctgacattttcttgcccttatagggaaagtgagcacaagctgaatgatattgtctgctaggaaaagagagagcgagcgagagagagagacagagagagagagagacagaaagacagagacagagagagagaagaaaggaaaggggagaaagaaaagaaaaggaaagagaaacggaaaaaagagaagtaaagataacatagaaactgaagagagacagactagaccaatcttgttgtgaaatccatctactccatcatctcatcatttcagagctcctcagcccgggggagcgtacggctagttttttgttgttgttgttgtttttaaagaaaagatctatcacatacatatatgcgtgtatgtctccatatacttacacatgcatacatgcatatgtgtgtgtttatgtatttaacggtgctaatcaatcttgagcaggtcacgtgactggtcatgcggactctaaaatcatatcagattttttaaaaaatccttgatatatgcagatattatacagattttcttaccggtgtaataatgttctactgaagaataaccatcctgcaggcttcaaaggacgaggtcagcaatatttcccaccatggcttggggggaaaggatagttttgtctccttttgtattcaagttgatgcatagtgcatttttgtgtctaagtagctgttgactaaaagactttgtagtgtaaagggtgttatacaaactataatggtgtgcttcaaacaaaccaatgctaggccctttcactcttgttgtatatgacaaagttgttaaatatgtggtttgaaataactttgaacatgtggaaatatgtagcatgtgtctttaactcagacaaagattctaattgcacaagttgtgttctagccagttgtggtttatttgttcagaaacacaaatgtgaattgtactctttatcaccagaatattgtatgagttccgtgatctttaaacagctcagaagtaatacttgaacttcatttgaatagcacaaagtttacagagccccttttaaatgttaattagttccagttaagttttcctttaattttttcttttttttttttttttcttttttcaaatgcaactgggtattttcttggaaaacaatgtgtagtttatttttggtatgtagcaaaaggcttccaattctggaaggttttattgttcttaaacaaggtcagccaggtaccagattctaaaaagaacaattgcccccccccctcaagtggccttctgattgcacgaatgtgctactcccctctccaatcccccctcccttgaggaggtcagtgaaagtgatggaggaagtgcaaggcttgctctcctctccccttccttcccttggatnnnnnnnnnnnnnnnnnnnnccccccacacctcacctaggatgtccactccaatgcaaatggttccattgcacacacagcacaccgcacaccgggaagtttgtatactggcctcttttcctgtcttcaaatgtgcaagaatttgaaagtgtcatctggaataggttccatctcttatgtgtgttagagcaaaccaaagaagcccccagccatgcccaaatgctgctccaaaagcctgccttccagtccttacaaaaaccttgcaggattaaatgtgttaacttttttatttttgtacagtttctaagtgattttttgctagtgatgttaaactgaattaagtttatttgaggagtgtgagcacctcctccatttaaataaactggtgactttccttttcttttttacaagtggaaacccattgtgtgcctctcgatttaagggtttctgattacatttattcttaagaccagcattgatcctttatatacaaagatatgttttccttgttttttattactgtttcagaagaaaatgaaccttttattttgctccagacccagtaactgcgctggtacttagacgcactgagaaaaaaaaaaaaacaaaataaaacaaacaaacaaaaaatacttttgtaagcacctctgaccgcttttgtatatcaaagttgattacttttgagatatttggatctagtttctaagttattttagtgttttatatgtttcccaaaattcctttgaatcggtcaccagcataaagagtttttggtgatgcaatggtgagacttgtaacaagcaaaaagctacctggagtagctctctcctcccttcttagtaacctggtgttttgattacagtgagacatcacaggttatctaaaagcccttcgttataaccagctcctccctccctccttccacactgaattgcttactagtttgaagaagttattggaagtgggcattttatatgacatgtatggctttaaaatattaaaaatgaacaaaaaaagagaaaaatatgaaaaggtttatgtgggtctgtaaggtatggctgtggaaagacattgtagtagctttgacactattgttattacccaataaaatgttaaaaatgaatctttgttttagatttctttatgtaacctgcctcatgataggatgctcaatggcatgtctatgtttaaaacacagagtcttctgggcctcagactgctctttgtagtcaagggtgatcattcatagctggtgaaggacattgataaactatagagaagacaacctgattaagtgccaaccctttcttttaacatcaagccttgccttttctcagagtacaggttggaacctggaaatgttattaagatggtggtcacccaagggctgtatacaccgggcatgctacacactgaggctgaaaagtcagctgctttgccagttccagagtggtacttgtgacttttctggtgacttccagcttggggaaaatgtttgggcttagggttagggcaagtggtgctgtgactttgaagagccagatataatcttgcatcaaaaaaggaagcactggcagcgtggggctctggcagctgcttcttgcgtctgttctatatgggaaagctaccaaccagattgcggacatacctctggctctttatcagtcgtttgctggcatacttcagcctcagttcttacttgaatataaacagtacaattgccccaaagccctagcaccatgtgaaatttataatgtgcttatgtcaatcatggtagctaaaaataaccatctcagaccccaaaggactattgtggtttgggctagtactctattaaggtagtgataaactgtccatggcttattcattttcatcatttatatttaatgggacattaggattgactaatcatttagaccatattaatagtttcaggtagaataaagtaatataacaggcccacaacatcctttttataatattaatggtgaactcaatggtctggacagatttcagctgcactaatcacattgcaactccctcaattcttcctcaagtttcagtacaccatctttagatttcatgccccactggtaccttttaaatagctccaccacttcagaaagcaagtatggatttgtaggctgcagcatgttctccctgttcatggaacgacatgaccaccaagggaccctgccaatatgaggtagagctgccagtcagagctgatgaacaacagactgcccactcaacatggaggcttctttctttggctctgcctttgtgagctgaaacttgtgtgagtttggaccaattgaattcttgataactgcccatctgtgtttgcccggggttttcagtttcaagagggaaagctaaatgggagactgcagctaagaaaagctcttggttttttgttgttgttttgttgttgttttggcaaccgtattgaaaggtaccatctccatacctgaaacccccaagcctgatagaagaaatctctgaagaaatggaagggattatgttaagtgccatttagaaacgaggctaattttgccaaaaagcttggatgtcatctctttaaaatgacaaaaaagagtggagctatagagccgggtgtggtggcgcacgcctttaatcccagcactcgggaggcagaggcagaggcaggcagatttttgagttcgaggccagcctggtctacaaagtgagttccaggacagcctgggctatacagagaaaccctgtctcaaaaaaaaaaaaaaaaaaaaaaaaaaaagagtggagctatagttcagttacagagttcttgtctaacgagtgtgaggccctggattgaatgcctagcaccacccagaaaaatggctctgtaacaatatacagattccccatctgtggggaatcataccaagtctgacagtagaaagccccaatatacactattttgcctataactgcctataatatagcataatttgtaaattaggcccagtcagacattaataactcagaataggtgtgataatgtgctgcaatataattgtcagcatcactactcttgtttgtgacattattaagtaaaataaggcttctgtgagccctaagactgtagtagtgcagttttcaatctgattacgagagaactgttaagtggctaacaggtaggtacaggagatgcagtagacaaagggatagctcacaccctgaacaagaaagatagtgcaatggtgtcagatttcttcatactgcccctaacacaatccaattgaaaacacaaatacttatttctggaaccttccatgtaatattgtcgtactgtggtgacctgcgggtatgtgaaatcacagaaggaaaatggaagcttcataatgttcagtgggtactgttttatctccaagcctttaagtgggagtgctcagtgagctgtcagaggatggacatatgcgcgattgtaaacaggtgtgggcctgcagttgcagatttgcatcctggccactgagtacttatttacactgagggtgagagaaggctgtctacgttttatgctcatcaactaccctggcatccttgagctctcgctccctttccaacacatcttaggtcataagaaaggtgcctaatttgtccaaccattagtctccattcaaagtggaagaaggagctaggtttgttgttttttttttaaatcaaaatcatagttgtcatttgtctatgttaaaaataggcataaagtggcatttcctcgctctgcagtacaaatggatgacagttgctcgtaatgttaagaacaatacaattgtgattgcggagaggaatggcagttgtagttagtttcaggattctttctatattttagtttgactgggcagtagcaagaaggctttcatttgcacaaagaaaaggcatgatacatggcgtgcaatctcatagcagtgggtctgtatcagcctaatctataaaagcccagtacagcgacaaccttctgaaccgatgagtcgacgcttatgaaaagttccagcaggaagaagcatcgcccccatggttgagcagaaatgagtcaacttgcttcagctaactccccaggggttatctattacccttctagatgtaacatgaggtgtccatgagctgttcttttcagagtttggtattccattttaaaagtagcttatacttaaacgcacatgtgtgtttgaattatgtttatggaaaactggaacagttacaataacccacggatctcacgggacaatccaaagatgactgctggagtcccaactgcgaattattctgggaatcactgggaagccttcattagatgaaatgactgccgttttttggccttttcctcccaaatgtcaggctcaatgtgatccatcaatatttattgagtgcctgtggtctttgagtcacggtgctttgcttggtcgcagaatgaatatcatgtaattgcagaagacaaattaataatctgggctgagaatgggggggggaacatacaagttagttcttgctgcagaaactttttcagacacccaggcagcaatggcctgtcatcacatggcttttctaaatggcttccgcgtcacaatgatattaaaatggcattttaagttatggccctggagcgtgtcagtgccataaactactctctataaagtacaataatgatttgtgagtggaactaggtattttttccttatcctcaacatgtggctgtcttgatctctatgaaaactaaggtttatgaacatgcagaatggtatctggaaactgaaaatcacgttccctccatgaacctggcctctgagaggctcatggcccttcctggtaccaagaaagaggatggagataggaggagacagaatctaggcatttgctccaagaggctgcctttgggtgagagatggaagtgcactcagcaagatgcctagtcaaatcctgatcccaaaggatgcaaaaatcccttcatggggtaggaggagaggaagagtaacaaaggcgaatgacacggaaagggaaatcagagtaactttatgaatcacctggttacataggaaggacaaagaggcaaaattgtgttggggttattttgagtcaggaagcacagccatgctgtaaatgccatttgaagtgacagaaagctgctgagttttggccactgagtgaatatcaggtggagcagaaactagaaatatttgtatcactttttgtaaaatgtgtatttcctcctaactgacattctggaatgatccacaatggtacatacacacgatgtgtctcagcataaaacatagtttggggcccggctggataattggaaggaacataatactgccctctcaagtaaagcatcacagaatataaggagagtggcatgaattggagagagtgggaaaccctgtgtgtgtgtgtgtgtgtgtgtgtgcgcgtgcgcgcgcatgtccacaggagcataagtatagagatccacaggagctagagatatccgatccctttgagctgcagacactgtgcggttatgacccactagatatggatgccggattctctggaagagcagtacgcactctttaccagggagccatctttccagccctaaaaaccccatggctttgaggaacagggcgtgtgtgaataatgcaaacatttccctacactctgtgtacttcgaacatccaaggcaatcccaggaacttgtcacagaggcatgcaacacatgcctcagcagcggtctctttaccagaaacacggtcaagggcagcagtgtgtggccttcggtactagtgtaactgaagccatggtccttggtgatttaggacttctttgttttgcctagcatatccagcaatagcactcccaatatgggccatattaggacatgggccagcccgtttgtttgagtagaatggtttgttcttctgctggagattagccttttctctactccagcagaatctgcagccttgaaggtcaaaatagatactatactggcatagcctgggaaagcatgggcaactctttttgctctgtggatggttctatcagaaggttgtatgagaagggtgcacagggcacttgtgagtgaaaaagaaactgcttaattcctttcataggacattttcttttattaagagaaaacttggattgtatacaatttaccagtcagtagcgtgcattctcagtagcatgtagtgtcttcggggttttacagtcacagctttcaatttcaaaacacttttgcatcaccccgtaagcacagcgacagccctatacaagtttctgtgtgcatgtgttttcatttctcagaaatacacacgtgttttcatttcttggaaatacacacttaggcctttgttaaagttaacgccatcttagcagaggtgaagtggtaggtcaatgttatggtttgggtaagtgttccccaaatgtctatgtgtcaagtccccagcctgtgacacgactgggacctggtggaactttgaagaggttaggacctgaagggagaagcttactgattcgggcatgtcctgaagggagtgagggttgggaccctagctccttgccatcagcctttgcatctggctgccttgaaatttgcacctttccccactactggctctcactggccgtgataggacaagtcaccaaggaacacctacactgtgaaccaaaggacaatgtnnnnnnnnnnnnnnnnnnnnnnnnnnnnnnnnnnnnnnnnnnnnnnnnnnnnnnnnnnnnnnnnnnnnnnnnnnnnnnnnnnnnnnnnnnnnnnnnnnnnnnnnnnnnnnnnnnnnnnnnnnnnnnnnnnnnnnnnnnnnnnnnnnnnnnnnnnnnnnnnnnnnnnnnnnnnnnnnnnnnnnnnnnnnnnnnnnnnnnnnnnnnnnnnnnnnnnnnnnnnnnnnnnnnnnnnnnnnnnnnnnnnnnnnnnnnnnnnnnnnnnnnnnnnnnngggtttccctgtactggggcatatacagtttgcaagtccaatgggcctctctttgcagtgatggccaactaggccatcttttgatacatatgcagctagagtcaagagctccggggtattggttagttcataatgttgttccacctatagggttgcagttccctttagctccttgagtaatttctctagctcctccattgggggccgtgtgacccatccaatagctgactgtgatcatccacttctgtgtttgctaggccccggcatagtctcacaagagagagctatatctgggtcctttcagcaaaatcttgctagtgtatgcaatggtgtcagcgtttgggagctgattatgggatggatccctgcatatggcaatcactagatggtccattctttcgtcacagctccaaattttgtctctgtaactccttcaatgggtgttttgttcccatttctaagaaggggcaaagtgctttgctctgttcttaattggacaatttgattttcaagtttttgtttgtt

SEQ ID NO: 700 - DNA, 1757 bp, Mus musculus
tcgcccccctccggctcgggtggtggtggtggcgcctcctcctcctctcactgcagcggggagagccagtgccgagccggggagctgggactaggaggcgccgggacgcggctcaacggactgggcgggctgagcggcggcggcggcagcggcggcggcggtggctgtcccctctctccccctcaggctgcggcggcggcggcggcggcggcggcggcggcggcagcggcagcggcggcgggggcatctcgctgtctccacctctgagctgcggagtgggaaccctactttctactccggccgccgccaccgcctcctcgccgtcctcctcgtcctcatcccccggctcccggaagatggtggtgtcagcggagatgtgctgcttctgcttcgatgtgctctactgtcacctgtacggataccagcagccccggaccccccgcttcaccaacgagccctacccactgtttgtaacatggaagattggtcgagacaaaagactgcgtggatgcataggtaccttttctgccatgaatttgcattcaggactcagggagtacacacttaccagtgcccttaaagacagccgttttccaccaatgacaagggatgagctgccaaggcttttctgctcggtgtctctgctcactaactttgaagatgtttgcgactatttggactgggaggtgggtgtgcatggcattagaatagaattcatcaatgaaaaaggatcaaaacgcaccgccacctacctaccggaggttgcaaaggagcaaggatgggaccatattcagaccatagactcattactgagaaaaggaggatacaaagctccaattactaatgaattcagaaaaaccataaagctgaccaggtaccgtagtgaaaagatgaccttgagttatgctgaataccttgctcatcgccagcatcatcatttccaaaatggcatcgggcatccccttccgccatataaccattattcctgacactgagccgcacaaccagtcactgggcctctctgcagacctcttcccaggagaccctacaccttcttggtctagctatctcttttactgtaccattttatgatgatagtttccgttgccatggtgaagcttcgacattgttagttaagagcatcatggtaacgggtaggacaatggcatttgttaagaagatcctgttttattattttagatcactgaatttttttttcagcacatacagcttttgaagttttctttccttacaatattaggtatctttttttgctttgctatctcagacaggtttctgtctttctttgttcctttttttcttcctccttccttcttttgactgtggatggaagaaagtatgctgtttctgagggtttattagatttgtctttagtattcttcggtaagattgtcattttttgatagctgagttggggattaattcttaacaaattcaggtatttgtatattactcatgaatttgcctaaaattctatttgctatgacagcttagtatttgggtcaagtacacattttttcccatggttgaaatgagtgagctttagagtaagtaatgaacattcagaggtccatgataggacttgtcacagagagcaaggaactgtttacgccttctgtgcttctgtgttactgtagaagagactgcctcatgttatagaacaatttacaacctacaacactgttttagaaaagcataagctacctttcaaatgggccgcggaaatcattgtgaaa

SEQ ID NO: 701 - protein, 272 aa, Mus musculus
PLSPSGCGGGGGGGGGGGSGSGGGGISLSPPLSCGVGTLLSTPAAATASSPSSSSSSPGSRKMVVSAEMCCFCFDVLYCHLYGYQQPRTPRFTNEPYPLFVTWKIGRDKRLRGCIGTFSAMNLHSGLREYTLTSALKDSRFPPMTRDELPRLFCSVSLLTNFEDVCDYLDWEVGVHGIRIEFINEKGSKRTATYLPEVAKEQGWDHIQTIDSLLRKGGYKAPITNEFRKTIKLTRYRSEKMTLSYAEYLAHRQHHHFQNGIGHPLPPYNHYS

SEQ ID NO: 702 - DNA, 139914 bp, Homo sapiens
gaagttgtgcagtaaatgaatgggtgatatgctaaaggcctaagaagatgtttgctacagccccagccaagctatgctcaaagtaatcactaggccttgttgttgatctggggagcaaaagtttgctgaagcagtaaaaatatcatgacatcaaaattttcactggaaacccacagctagtttataaaattaacacccttcctctttaccttttaactatttctctcactccataactctataaacagcattttgttgcctgtcttctctctgtgttcatcatttccatccggatcagttatcattcttttctggcaggccttattatattgatctccttatttatgagactagaagagaataataatcgatgctttgtggtctcagtatttgctcttttcaggatagaagtgtttctgttcaagaattgcttgtaagtatatttcactgaacactgtagtgatgactatcaaagaaataatactaataatgataataataacaactacttaaaataatatttctaggaactatcgctaattaaataaaaaccctcctttgacctagtgctcctctacagctaccatctcatttctttgttcctcttcagagtcaagtatttcaacagagttgtctatatacactatctacatctccccaccaccccattcactttttagtgcactccagtctgacttctggccctgccactccaatgaaactactcatgttattgcaacatgcaacatgcatgttgctaaatataatagacacttctctattctcattttatttgaagtcccttcagtatttaacatcattaaccattcttccttcttaaaagattttcttctttggatattgtgacacaacactctgctggctttcccactatgtcagttgctactcttgtttagtctcattagccagttcatcccaatattgtgcaacctcaggactcaatcctggttttctcttttttctttatattccttctctatgttatgttgtccagaccatggcttctaatactgtctgtatgctaactcccacatttatttatcaagtcaagacctttcatttgagctcatgacatgcatatctgcctacctatttcatatctctatttgcatatttagcggacaccttaaacttacattgtcaagaagtcttgatatcctgtggacctgctcctgtccttatcttttccatgccaatatgtcatcaccacttatttgtttacccaaaccagaaatctagtcataatcataaattctttccttttcctgacctcaacaaaatatgtgtcagtaagtcttgttgactctacctccaaaatttacatggaaattctcctttctttttatcttaaccgccaccacctaggtccaggcctatcctgaattaacgaagtctcctgactgatctccttatctctgctctgttctcctgcattacattctccaaataccagcaaaattgatctcactaaaccgtccagtgtctttccattgctctttgaataaaagccaaattatttatcatggctacgaatgatccactcctgcacctcaataaggaaacagaagacttgaacaacactatacaccaactagaattaacatatacctatacagcattcctcccaataacagcagaatacataatcttctcaagtgcacatgaaacattcttcaggatagatcataagctaggtcataaaagaagcctcaaaaaacataaaaggattgaaatcacaccaaatatattatctaccaccgtggaatgaaattagaaataaaaaacagaaggaaatttgggaaattcacaaatatgtggaaattgaataacacactcctaaataactaataggccaaaaagtcacaagggaaattagaaaatactttgggacaaatgtaaacaaaaccacaaaatatcaaaacttataggccaggcaaggtggcttacacctgtaatcccagcactttaggagaccgaggtgggtggatcactggagatcaggagtttggggtcagcctagccaacatggtgaaaccccgtttctactaaaaatacaaaaaaaatagccaggcgtggtgatgcacacctggaatcccagctactcaggaggctgaggcaggagaatctcttgaacccaggaggtagaggttgcagtgagctgagatcgcaccactgcactccagcctgggagacagagcaagactccatctcaaacaaacaaacagaaaacaaaaccaaaagaaaaaggaagaaaagaaaagaaaaagaaacttacggaatgcagctaaagaagtgcttagagggaaaatgatagccataatacctatatttaaaaagaagaaataattcaattcaataacctaacctgccatttcagaagccagatgagcaaacagaagcaaacagaaggaaataaataaagattaaaacagagataaatgaaatacagaatagaaaaacaatagagaaaagtaaccaaaccaaaagttggttctttaaaaagaacagtaaaattgacaagtctttagttagacaaaaaaagagaaaagactgaaattactaaaatcagaaatgggatgatattactacagaccttacagaaatacagggaattataagagaatactatgagcatttgtatgacaaattagataaaccagaagaaatgaaccaattcctagaaacatacaaactatcaaaagtgactcaaaaagaaacagaaaaatttaacacacctgtaacaaataactagattgagtcagtaataataaaaactccctgtgagggagaggggagtggagatggttaatggctataaaaatatagatggaatgaataagatctggtatttgatagcacaatagtcaacaataatttattgtacatttaaaaataactaagagtataattggaatgtttgtaatgcaaaaaaatgacaaatgcttcaggtgatgcatatcccattttcctgatgagattattgtacatcgtaagctagtatcaaaatatctcatgtactccataaacacactatgaatgcataaaaaattcaaactaaaaaaataaatgaattttaaaactcccaacaaagaaaagcccaggaccagatagcctcactgttaaattctaccacacatttaaagaagaataaacaccaaatccttctcaagctcttccaaaaaatagaaggaaactgcccaaatcatttatgagaccagtattttcctgatgccaaaactagacaaaaacatcacaagaaaagaaaactcagaccactgaatgtagatgtacaatgaatacagatgtaaaaatcctcaaaaatactagtaaatggatccagcaacatataaaaaataattatataccatgatgaagtgggattcatctcaggactggaaggttgatttactatcccaaaattaatgtaaagtattaattttatggtatattaaagtaatatgccacatcaacaacataaagaacaaaaaccacatgatcctgtcaatagacacagtaaaagcatttgacaaaaaatccaacctgtcatgataaattaaaaaaaaaaaaaaacactcaacaaactaccagtagaagggaccttcctcaacctaagggaagctattaaaaactcacagctaacatcatacttaatgctagaagacagaaagctttccccattatatctggaataagatagggatgtctgctctcatcaattctattcaacattgtactagaggttttaggcaaagcaattagacaagagaaaaaaaaatacatccagattggaaagaaagaagtaaaactatcagatgacacaatcttgtgtacacaaaatcttaagaaatccaacaaaaaactattagtagtaagaaatgaattcagctcggttgcaagatacaagatctaaattatgcaatgaggccaggtgtggtggctcacgcctgtaatcccagcactttgggaggctaaagtgggcagatcacttgaggtcaggagttcgagaccagcctggccaatatggtgaaacctcgactctactaaaaatacataaattagctgggcattgtggcgtgcacctgtagtcccagctacttgggaggttgaggcaggagaattgcttgaacctgggaggcagagcttgcagtgagccaagatcatgccactgcactccagcctggagtgagactccatctcaaaaaaaaaaaaaatacaatgaacaatccaaaactgaaattaacaaaattattccatcttcaatagcatcaaaaagaataaaataggaataaatttaacaaaaaagtttaaaattgtaatcccaactttgactctgaagatgggattctaaaatggtacagtcaatttggaaaacagtctgtagtttctgaaaaggttaagtacagagttataatataacacaataactccaccactaggtaaatgagagaaatgaaatgaaatgagagaaatgaaaacacacatctacacacaaacttgtaaaccaattttctttgcaacattattcataacaaccaaaaagtgcaaacacccaaatgtcaatcaattgatgaatggataaacaaaatgtgatatatccatataacagtatgttatttggccataaaaaggaatgaagtactggtagatgctacaacatagaggaagcttgaaaacatcatgtgaactgaaataaagcagacacaaaaaggcaaatattatatgattccatgtatatgaaatgctcagaataggtaaatccatagagacagaaaggagattagaggttgtctagggctgaagaggaataggaaggaatgaagagtaactgctaatgggtatggggtatcttttttggggtgatgaaagtgtccaaaattgattatgttgaaggttgcataactgcatgaatattctaaaaatcatcgaattgtaaaatttaaatgggtggatggtatcctttgtgaattatatctcaataaaaagaagaaagaaagaacaaaccagagaattctggaggaaacacagagcagagtgtagcatgggaaatttcaagccccttagaaaagctatatgctaccatgaagtatctgcaatagaaatagcagcttgaggttttagaagaccgtcaagtggcatgaaagaaatctagaatcccttgtggaatcttgtggaagatgcagaagtcagctgaggattaagcagcagcctacttaccaggcagtggctgtggcataaggtgaacagccccaaagaaaaggctgtagggtggatagccaacgtcaggggccagatggaggatctggctgaagtttggagggttagctgcactattaggagctagggtaggaatcccgaatagtaagtaatgagagacgactgagcttcctgacacaatcattgtgtattactcatgctgagagaataagccataaattgtgaacatttaagcagtgaatagagtgaggcaaaatgagctacacttcaagtgggatctagcagaggttatagggatcagatttctgctcctcggtgccatgagtgagtttgtactttacattgattatttgtacaaaagagacttaattcagaacagacttttatattttaattgacaatgttaatcctcaccctgccaaaactgtgcctccaaccaactggaataggtgccccagaacacaatgagattagttaaacagctatatttttataattaacttttcaggtgaggccaattgggtttcattatgtacattttcaaaccccaatatatgtacagaagctagtagatgaattcttcttttaaaaagagagaaaagagaaaaacagtcaagtaaagactttcccaaactatagtagacaccttcatgttttgattgttcacaactcctctaactgccccaaataacactctgtttgatcatcttcttcctagaaagcctttttctccaatctacaactagctagctttattaattcttccacattcagagtagatattagcatatctaaatctcattaaggagtttatagaactttctctaaaggaaataggtagcaaaacaacattcaattagtttgtactcaagttgacaatagaagatgtaaatgaaacaactagaaaacaatccaaggtagatcatggtgcttttgctcataaatgtgttcattagataaagaaagaattttggaaggaaggatctgttttgtaatcagaaaaacaaaaactgatttacgaatttgaattgaaaagtaggtaaagaatttcagtatttactcacgtattcattcaaatataaaagggaactgattaccacctccaccacaacaaccatgtgttatacgtgtacaaggttagatcaaagtggtagctaagaatattacattctgcagttgttcaaggatgacagttgagaaagtttgatgacagaggataaaaataacacttgtttgggcataaatggcaggtttttttttcaatgaaatatgtgaatgttcctccttttacccacaaccccagaaacctaagaaaataattttgcaacattaagttcaccacctcatcgaattataattattcttattttctgaaatgaaaaaataactatgttgtaaacacgagaacaaattgaggcaatgataatatattaactaactattgggtttaattcaattactagctttgctgcacaataaataatatgcataacctctgtccaagtatttttttccacagttgtaaaacaaagcctttgacaggagttagttaacagcaatttagagctgcctctaaattgcagaaataaaaatgctcacaatttgaatgtgctttgttgacaaagagactatggcctattttttttttttaagtggaatcttcagctcccagattgacagtcagttacaaagagaggaaggcaacttaaagtttcctctggagggtattatcactgcagtccagtatcagcagtgggtagaaaccatgtgctctatcatattttgacctttatacttcaagtcaagagaatcctgagcaaggtcagtttttctatccacccagtgtgcactttgcatagatgtaaaaaaatttttttcacagaatttgttctgtggatttagtttatgtttgaatgaaatatgtttctttttatgctggtgactttacaagaaaacaaggccaggagaggcatttcctcaaatgcctaaaggagacattaccaccatcaccactacttgccaagcgatttataaagcatcttgaggctcaaggttagtatgggagatgagccaggctcaggagaagttaacacaaagataaaggttagtgtttttcccccttttagtcagccaatacaacaaagtacttagataataacccctagcggtcaggtaatgatgtattttctgcaattatcacatttgtgtttgtctattttctttatgctagtgaggtttggaattggaattgaaaatcctctagggaaaagctatttttgtaattcagctggggtgtccttgtctttgggttttcccattgcatcagtcccttagcctggcaggatagccatgatagtgctttgtcttttagatgaaatgcagaactaaggacatgactactggtgcttattaaagattccttgctatttttcacaagagtaggggcgttagactcttgtctactggccaaattctaaattgggagattacattctgctttcctaaattcccctagcagaagcagccatccatggtatcctactttgcttcctgtgctaaactgttttgtgatgtcattaaatggctctggttttttactctagaaatgatcactttagtggggtggggagtaaatcgatacctattgtctgatattatgttcagtctagtttcaaaaaaattaaaaggtagcctgtggtagttaaggacaaagtacaaaacaaaacaccctaacgtacaaaacaccctaacataccagttgttgtggtgctttttaaaaaaaccaatctgctttctcttctgtaacatagacaaaatattaatgcatttttttactccactagtaattgacaaagaattgttatttgtttcatacttaaggttaattctaacagtgatgaagtttgagaggatgaaattacatatcaccgaccaattaaactatcccttttgtctttaggctgcatctaaccattccagattttcatctatctatctcataaaatctttttggaaggagatttttcatctttccttggtaacatatttcagtgtctctcaatctttccataaaaactaagttcttatttctgtttaacctcggttccacctgctggagtgtaatgtcactatcttttgtccatccttagccttgttatcatatattgttagtgagaggcaatgtagtataatggcatggtttttggaatcagacatgccagcattccaatcctagctctgttactttctaggtgtgtgatgttgggcaaattacttctgaggtttaatagcctcatctgttaatgagtaacctcagagcattgttgtgaagataaaacgagatagtatcttattctgaaggattatggggtaggacgaggtatggtattggagacctaaaaagtgttcaatacatactataatagctatttatctgattatgtgcatgtatctgacttaattcataaactcttttagagcgggaggcatacttcctgagtacgccctggatttcaacagaagtatagtgttgtgcacatagtatggtgcagaggctcaatattactgaatgaataaattgttttgtttttattccctgagtggaatgaacagcccccagctatctgcaagatcccacgcatgtagaaaaaaggtgacaaaaatcaatctgcagtttttaaatatgcagatacctgactttatctagatgttttagcatggtgtagatacaatgcaaataacttacgctttctatttctatcacgttcatttctacgaattttaacatttgattattgtcattatttttattattaagctgcacttaggcacccagaaagggactgactcatatgtctcctcatccatccaagcatttaattgagaaattttaaaaatgaatattaagagctaattatatacttgaacaaaatctttcaatttgtgactaagtacattaccttccctatttatctctaagatctgagcactacagataatattcctaattgctttgtacccaagccaagaaataaaaaccaaaaccagaaaagtccaccactgcaagtcccaaagcacaattagtatctttgaaccagtgaagtattagttaggactttatttttggcttttaaatgtttaaacggggcaaggagggtaagttgggggaacaagtacaagatacatagattcagtcggacttgaatatttctccataaggaaaggaaagagtaccctggtgtgtgcttaggctggaattaaaaagacagcagcgtggccatttcctggattgctttgtacacactttacaggggcggtctcaggtatggagctctgggcacctgctcgctcacactccaacagttcagaaacccgtgtatttgaggccgggtggctcaggttccacgtaactgggcttaagtgtcattaatactgcttgcggcggggggttactgagctgtgctttgggacctggatgcttacttcggactttctcctttcttcccccctacccccactagtttccctttccctccttccttcccgggcgtgcccaccttctccctttgctcccactttccgctgtctgactcttgtttccttcaccttcctttctaatcggcttcctgtcttccaacctctgccggccggagagattgagattggggctggggctggggctgcggctcagaagaggcacgagtcgggcgggacaggcgcgaggcgcccagccgcgaaagcgaggagcgcgcaccgaggcgggggcgcgcgcggggcagccgcgtggctaggcagacggggccgggagcggcgcgcgcgcgccccgccagcctctggcgcgcccccggcggcctgagccgcagcgtgctcgcccccgccgccagctcgcctcacttatgggtcggaaacgctgcgtgggggagactgttccaagatggcggcgggttgctgcggggtgaagaagcagaaactgtccagttcgcccccctctggctcgggtggcggtggtggcgcctcctcctcctcccactgcagcggagagagccagtgccgagctggggagctgggactaggaggcgccggtacgcggctcaacgggctgggaggtctaaccggaggaggtagcggcagcggctgtaccctctctcccccccagggctgcggcggcggcggcggggggatcgccctgtcgccacctccgagctgcggagtggggaccctactttctaccccggccgccgccacctcttcctcaccctcctcatcgtccgccgcctcgtcctcatcgccgggctcccggaagatggtggtgtcagcagagatgtgctgcttttgcttcgatgtgctctactgtcacctgtatggataccagcagccccggaccccccgattcaccaacgagccctagtgagtaccgtgccctccgccgccctctcccttgcgctcgggatggggctcagagttgaggcaaagtgcgagtccgcctcccggccggcggatgcccctgccctctcgctgcccgggtccccggagctactcaactgaactaagggcaccctgcgctttttgccctccgaggcaggcaccccacacttggagcagggtgctgctgcaaggaatggccccgtggctcctagaggtgttagctttctctttgcgatgacttcgaggagttttgactcctttacttgtctccttcaccacccccaccacccctcaccctgccccggttttggagatctgggttactcaaggtgttgacctctcctcactttggtttccattaccccaagtgaaagccccgccagtattcccgccccgcgtatcttgcacatggagaactactatcccattgcaggatgaaaaatagcaactatccaacttctgttagtgatggaacttagctctggagcttgtgaggttacccatcttctcctctgggttttcttgtgccctgggaaggggggaggtttcttaaaacacatttttcccttactacttatttttatccaaatacacccattaaaatgtgtttctcgtgtagcgagcgcactgccggcttcctcacatttgaagagtgcgaccttttttttttttttttccattccaccgtctggataatagctcattcaaagagaactgtccccacagagccacggtcagtttgtacattaagcgtgcattcgcttttgtgtcgatttcactttttaagaaatccatgttatacttgatgatttgagaacagttaaatagtaaatgtgtaggaattgttatggtttcctttggttttgtatcttaaattattttacccttcaagtgtgtggttgaaaaattttaaaatagcactgttacagctaaaagccaggttaattctaatccctgtccatttggatgtgtgggaggtggggcatatggttttttttttttaatgtgtaaactgaatgtaaactgactttttgcgttaaatgctagacagaatgtaaagaccaagagagggcagaatgagaaaaagtgcaattgcttttatttgagtacttagcatcaacaagaaaaataatacagaaaaaatttcagtgaaactcgtactgaaaggcatcagccccttttccagctaagacaagtgccccttgtcccccatatcataaatacctgaattgatgttcttttaaaactgctccttttcattttgtgagattagaggattggactactgttgtataagtataaacatttctgcctagactaaaatattaaattaatatgtaaagtggaaattacaataaagtgtcctggaaattgtgcatttgtactgtttgttttctttggctttcattctttaaatgtctttaattttgtatgactcttctgtggtctgtgcattttcttttagacttggttaatctttgggcattggtttatgagaagtgcatgaaagagcatccaggagaacacttcgtcaaataaatatctttataaatttcatagtgttaattctagaagcttaaatcctaagtccacacttttatttagccaattcatttttttggttaagaagtaaaattcattttgaaaagactgccatgtaaaataaatctatgaaatatttattagcttgagtcacttatttgtgacttttatgccttctcttggatgtctgtgatgtattaaagctagtcctgggatgatacttaggttggctctgcaaagtcatgggactgcaaaaattcactcctgtttagttcttgagctgttaacatgagtttggcaaaggctgctttagtattcacgctccattgctccaaagcatatgagaacacactttcaggaggtgctattttcacacattttacagtgagtttgggttaactcaatgactataacaagaattttaaaaggaaagtgagcttgaccagttcatacagaaaatgcttttgaaaatatcattttaacagtagccactttgcacacgtatttagatattattctattcaaacaccccagcccctggatttctttttcatggaattaagcagatgataggacacactttgaccactgtggatatgttgaaacggtggtggaagaataataactattatcatctagcagaccttgaatgtgtcatgtattctataaaacaactaatgtagagtagacactaaacatgaccaagtggagaatgaaagttcacttaagtggaaaatggactgtcttatttccatttatcttcaactcatttttgaggtgtactgtggaaaattcaggaaaacttcctgattatgggagggacataactaagcatttcaacagtgccttagtaactaccacacatttgtctttctgttttacatatttaacagcattgtgtacttattagtgttgctttatcctaagtgccataagacataaacagacatattgggatttttttttctcatagttattatcatgtcatgagcagtgtgtttcaggtcatgtctctgcccaccagatgttgtgcttttgacagttttaacttctcatacgtaaacgcacactcttttcatcctttcccaggacttttctctcagaatgtctgtaactggtgaaatcctcgttttatgggtttagaagctgtagatccatcagttagttatccttccactcagtattgaggggatgtcaatatatgaacaagctgtatggatacaaattcttcactgttgcccccatgttttgattacctacccaattgcagaaagcattgtacaggcaagtttgtgcacagaaatctggttaaagacatgaggaaaacttaactttactgcattttgatattcaaaatcagcactcttggatttatgtagggagcccagatagctattttataggaacctgtttgctactataaagggatccactgtgccaggtgttgagctagttagactccagagcagtcattcttaactttggctgcacattggaatcactgggaagttattaaaaatatggatgcctgagccccaactccagagattctaatttaattggacttgaatggggtcttggatggggcctgggaatcaggattagtaaaagctcaccaggtgagtttaatgtgcagccaaggtggcgaaccactggttatagtctactgaatctttctcttgagatttggataatttgggctagggtagtgccttggaatctgaattttatgagcaccctaaatttcagtaaacaaccgatttgagaaactcttgcattgtggtctgcagaagacatcacctgggaaatcattacaaatataggctctcaggccccgcctcagacctgctgaattagagtctgcagtttaacaagctcctcaggtgattcttacgcacattaaagtttgagaaggactggttctcatactttggagtacatcataatctatagtgcttgttaaaacacaaattgttgggccccattcccggagtttctgattcagttggtgtggggtgggactgtgaatttgcatttctaacaagttccctggtgatgctgatgctacagttcccagggccacacgttgagaacctctggagagagaattgaggacctgaataagtacttgagcgactgtaatggaatggcaattttcaaggccagttttcagtataaaacttcctgcttctgtgtcactatgctttagcatgttcattctaacctagcacccaggagattgagtgctgccgagagtataagagtctgaggttcttgggatggttttagttgaggggtgagggtgactcttggaaacctgtggtatgattttaggtcctttttcagaaattgttaaatgtaagggatacattttaggagttaaaagcattacaaatatgataccttaaggtgaattatattgattttaataagtaaagccccctttgttcccataaaatgctcttatgattctttcactaaagtattgtgaaaagattttaaaagcttttacttatgcctatggttgctggatttcattttaagactttccctctgtaacaaaaatatgaaaggattctgctaaggcactgggattgttcagtcttatatctttaatgctgctgcgtgtcacgttacttgaactttttattttaatcatcctaccacctttgaagttaacgtaatactacattttgtatagaccatagcacatagaagattctttattattaaagtacatcagtaagtgtggttttaaattgcaattaataaaatgtattttaaaaaaatccactcccgcatatgcagattttgagactctgaagaggtgttttaacagttaactctttctcgtcttgccaccgtagtcaagttgctgtttttcagtgtgcttgggaggaattgggttgtgttggggagtaggcattttgtttcaacagaactgtggcaatcctattgcattatcaaaaagatgatttgatagtgctgctcaggttaaaatgatattaaatttgtattttaaatataagccattatatttctgttatatgttttctgatgaagattgaccagaatagccagaagatgtatctgtctatcgcagatgatgccatgaggccatgacagatttccttatccacactaacataacggtactaacttgcattctctggtcataatgtatagtttttcttataaaagcaaaacactgtctgaacaattgagtcattttgaaggtataatatggttgtttttttttaacaatgttgattcccattggaagacaatctgatgtcgtatcttatggatagaaaagaaggcaggcatgtccccagttgtcagttgttctgtaaaagccatcagtgactgagctagaaggatggagaaatataaatcacaaaattgtttttatatccatgcataaaggtgtatgtgggacaaggtatatttagttaaaaagaaaatgcttattttgctttctcccccatatggccaaagggagtgataatttagcccataatttttcttgcttatgaattatgtttgtgctatactcaggtttcagttagcgggtggcagccaagtaggaatctctgctgaaatctctcagtccaatgggaagaaagaccactactgaaaaagtaaaaaatggtctgttaacccatgcatgagttgtttttctaagtatgtatttctcaggcacatgctaacatgtgtgttgttgtctttttaaaaactgtatgctttttgaaaccaaatttgtgttataaatactaaaaccttagctgtagtggattatatttttgaagtgaattgcatttcctatttatagacagttttactttttgagaatttatgtgtgaaacactaaaacttgtgtaatgagattagtcagttcccaagttttcctgatttcaataggcattattatgtactctcgatgtcacacatgcttggctcttataaagcagcacaatgaccagggcttttacatttaaattttgttaaatagtctctttttcaaacttgtgtaataatgtctctttttgatactgttctgaatcaattaagctaagtaagtgaggaccagcagtaaaacccagcatctgccaagaatggaccctcaatgtgtaagctgtctttccacaatcagtaattgggcagttgctcacaggacactggagacagtgtgggaaaccagtggttgtgtaggtggaaagagtagattcccaacagtaagcttatttagagtttagcttctgtagttagtgttgctaagagcaaaaatgacccacagtttatgtagtataaagaaaataacccaaaggaagaagtacagtgtaatagtatagttggttgggtggagcatgttttatgttcagtccaactataagtggcatcttttgtatcaagtgtgggtgtattttctacagctcttaatgtttcagacattgaaacttgctcaaagttaaaaatgttagtgttgaatagctgagtggaaattatatgtcattggaaaaaaaaaccctgtttttgtaaaaaatatacattatcctgagtttcatggttggaaaccagaaaaatagaaggaatagtcctatcctcacagagcttacagtcctgttcaagatatgatactattatcaaagttgcttgaaatacttacaaagcaatatatacatgattgtagattaataaaatacacataaaatgcatacacatggaaatgacatggaataaaggagtggtcagggagaaggctatagggagggaataactggaaccaagttttgaaatggaggaggtacagaaattattggtagagtctgtttgaccagtagatcttgaagtcttacttggttgttcttaaacccgttgctgtcaccaccacaccccttgccacagtacttggggattcccagcagctgtcttcagtcagcaacttgcactctcagcattcttcatatcactccccttgctctggtctctaagatcataaaacttcaaggaaattaaaagtggcctttgtgttgagaatcctctggggaggctggataagagatcttgtatctgcttatagtttcttgtattaggaagagaacaggatttgcagaagagtcctctagagtatcagatgaattgggagaagagtctcaagataggggagactaactaggcttaaggttatgagggcagtaggaaaactggcattggaaagtgggaaagccaccccaggggcagagtttgtgaatataggaatgttgcaaaattgagaattggaagaagttatcagcatatgcaagggttcatactctagggccaggttttgtgtaggagtggaaagattgtagctcacctgtttttggcttccatcattgcctcttcttttcttggctctgtgcctagctattcttgtgctcagaaaaagtttgttaaacagctctgttgaaatggctatgaaatttgatcacaggcataagaactctcctcccctttccctcttcacctattcccagctgtatctaatttgggagaaaggatgagaggacacatcggtttatagaatttgtatcaaatataaagatagctggaatagcttttggatgaggacctgtgattaggtgactacatgtgcatggagaggcactgcaggaaaaaaaaaaacaaattctggttgcttggcagaagtaaaagaagagaggctttgaacatgattcagagttcataagcctggggaaccatgaggatggtggtgccattaaaaaacatggggggaatatgggaagaaacaaatggttgggcaggtgaaatcagatttcttactatgtgtagttccaagtgttggcagttatcaaatgttatttctttttgaattaccagaaccacagagcagcaacagagctattgtgatgttttagttggccccttgggatcactcccccactttgtgactttgaatggctcagataagtagatatcagtgatagttttcagctttgtactgctagtaaaaatacctggcagaattttgggtttctttaatgtaggtttttacattttcttagtcttcaggcttatcaatttgtaaagcaggcagtgatccttttatttccttatgtgtatatcatagtacagccttgagcaagataaagcctcgtggcaggccatctcaggaattcataatttcagaactaaagggaaatttttgaaggactagaagtgcctttggtacaagattctaggttgtgtgtcctaaagcttagaaagtaaaatagattgaatcaagctggatctgttttgtggctttgctcaatgatgaaggatggatgttatgaactgatgggatcagccatattgctttaggatctttgcgatcttcagtggatgggcaaaagtgaaaagttctgcttgagtaaagacctactaatactagtttttttcaataaagtctgtgatagtcttgatgattcttgccttttccctatctgtttcattttacagataatccacattgttacccaaagccacatgcagtgccgggagagcacagttgactgttttatgcagtatcctgccagaagatgctgaccagttctctaataatagaaagtagtgagattgaattaagagcctatatagttcaccttgccattcgatatactttcactgtgatctgtaagcatattacatacaactttagtaacatattttctagtgagatcttggattgctgcaaggtggtaacagattctctgctttgcttcaggtgttagtggatctttgagtaattcctatggaatggagtctctgaaaaattggttttgatgctgttagcctaggggtcccacagcactgtatctgcctcaaataaatgcttatgtactagttacattagtgtgtttcttttctgtgatatcattatcgcttatagtagcctagcaaccacacggttaggtttaggtggtttggggtgcaaataaattatatagctggtaaaacttgggcctcagtacataattcattgtagcaaggcaaacactttgtgctgattttgaacaaaagtgaagtgtttagattgacgggtgcttttttacctccttttttatatggtaagtagaagatggcattggtgatttattcaataaagaagaatctcatgaagtctttgccttttttccatgttagagtaggtattctcaacacaattcatgtgttctcaacacaattcatgagtttccctatgataatgacaaaaacaaattaaaaaaaaaacttgccacagcttcttttgcattaaaacaaaacaagccaataaaaaacttgccactagcttggctgggtacttgattttgtggaatagctctttgatgttaggagtaggtacagagaaagtcagtagttaaaattttttttgagttcacagatccatctacccccacactcttctacttgtccattcaaaaaaccctcacaagaacaaaaaggaataatattctatttttccgacactaatgaggtgggtgatatgtggtttgtggtatactttactccacaaactcctccaactattgtcctgtctggcaatttttgtgggaattgactctcccacattgtaggcattggctgtgtggagaaagagagtcacatgtggttcgaggcagggacagagggcatataggaatcagggagggagtaaaatgaattgtattcaagttaagtgaagcatggattcagggcagaaaagggagattgagcacctgatctggagcaggagtgctttttatgttttacatcataaaaacttagatgtccctcctttagaatcaatggccacagcattcttgttaaaaaataattattctggctaggtgccatggctcacgcctgtaatcccaacactttgagaggctgaggcaggaggattgcttgaacccaggagttctagaccagcctagacaacatagtgagacccccatctctacaaattatatatttgaaaaacttagctgagcatgatggcatgcgcctgtagtcccagctacttgggaggctgaggcaggaggattgcttgaacccaggaggtcgagggtgcagtgagccgtgatcacaccactgcactccagcttgggcgacagagtcagaccatgtctcaaaaaaaaaaaaaaaaaaaaaaagaaaaaaaaaagtttctagcagaagcaaatgcatatcatgaagtttcataatatgaggacctgctatgggtccttttaatacttataagagaccatattgaaaaccatttgtacagtgtcttcagaatgaggcctctacataactctggaagctatgggacaagtagctttacccaaaacagcataaatgtagccactctcctgtaattatccttacttatttttcttgacttgtctatgcacatagctataaatcctcaggtattcagacatatcttctttttaggcctgtatatttatattaatagcctctacttagatgtgtgaagtttgtttcatgtagtttgctcacagttattatctataacaaagattatggaacaggcactattaaatgatagacccaggtataatttctgactggctgcagaatacagtcatacaaaggtacatacctatctcttttgtactttatcttagaaggacctactatggtcaatttaatttgtaaattacattctcacagataactggagtgtcagccattttttgtttatcagtttatcttttatcatatacatgtaggctgatggtagtttactttttttttttttttttggagacagaatcttgctccatcacccaggctagagtgcaatggtatgatttcggctcactgcaacctccgcctcccgggttcaagtgatttctcccgcctcagcctcccaagtagctggaattacaggcacctgccatcatgcccagctaatttttgtatttttgtatttttgtagagacggggtttcaccatgtttgccaggctggtcttgaacacctgacctcaggtgatctgcccgcctctgcctactgaagtgctgggcttacaagtgtgagccaccgtgcccagccacttattttttatggtggtaaaaaagatgagatttttaccctgttagtaaatgtttaagtgtatagtaatgttaactataagcactctgcttagcttaatttttaaaggcacataatagtggctttacctaaagcaactcatttcttctaggaattttgggaatccttcacaaattaaccttataaacttactagaggggccaggcgcggtggctcacgcctgtgatcccagcactttgggaagccaaggcgggcggatcacctgaggtagggagtttgagactggcctgaccaatatggagaaaccccgtctctactaaaaatacaaaattagctgggtgtggtggtgcatgcctgtaatcccagctactccggaggctgaggtaggagaatcgcttgaacccaggagtcaaaggttgctgtgagctgagatcacgccattgcactccagcctaggcaacaagactgaaactccgtctcaaaaataaaaaataaaaaaaataaaagtaccagaggtgcatagctcctttttacaagagagcctaatttaggcttcgaggtatttatttttccaaacctattgaaaattatgaataaactaaaggcattaaaatcaaaagtaactttttaatttttttattttttattttattttatttttcgagacggagtcttgctctgttggccaggctggagtgcagtggcgtgatcttggctcactgcaagctctgcctccgggttcacaccattctcctgcctcagcctcccgagtagctagctgggaccacaggtgcccgccaccaagcccggctaatttcttttttgtttgtttgtttttagtagagacggggtttcaccgtgttagccaggatggtctcgatctcctgacctcgtgatccgcctgcctcggcctcccaaagtgctgggattacaggcgtgagccaccgcgcctcgcccaattttttacttttttgagatggagtcttgctctgtcacccaggctggagtgcagtggtgtgatcttggctcactgaaagctccacctcacgggttcaagtgattctcctgtctcaacctcccgagttgctgtgattacaggtgtgtgccaccatgcccagctgattttttttttttaattttcagtagagatggggtttctgaggaaatgtgttttctagagagatggaaaattggaagataaattgcataatgggatattataagtaaggccgttaagtctatatgtgtatatatagactatataaccatttcagttaagcacttcttgaaattgcttcttacagtatacacacttgtttctaatgaaaaacttacatctaagtgtggcagtggcatctgtgaaataatagatatgatcaagttgcaggtcttgaaagttgtttgtttgccctgttttctgtacaaccagtatgaggctctctatcattagctggggtgtagacgttttaaaaataatatcactgaattgtaatgcatcaatttgggttttggagcagtatctaacttgttccatttagaggtggctttgcagttctaaacaagaaagtagaatttttactatgattatccctttgcttacaggcttttaaaatgaatatttgttgaagtctcaagtcttttttgccagtattatcttaagactgtgtttgacatcaatacctatctcttattctatgcaagtactgctcttaatattatgactggttctaatatttcatttcaacaagtaatacagctgttctgggtagaacactatgctagacccctttatgagtatgggtgagaaatctataaaataggcataaaccatgcttcatgtccttaaaaagcttgcagtcatactgaaaagacaagattcatgaaacaaataatgaagtcacatatgattcaacagctaaatgagtgatggagacagtgatgtctgtaggactcattgtttgggtagactaatgtgggctaagattgtacaggagagctttacagacaaaataggatttaggctaggtagaactttcatagatggaaaaagcagtctaggcagagaaacatcttagacataggtcaggatgagcattatacagtggtcagtgggtaccaatcaaaagtaggttgaagtgggggagaacctagcaagaaaggggacctgtaaggagactagctataacaagcattgggaaatgaaggtctaacagttgacaattttaaaattttaatggcctgtgagtggcctctttcttggtaaaatttctctttgtctgtttaattatgtctcaccagcacctttaatgttgtgaatgtcatgaaaccttgacaagagactaggaaataacacaagcagtagtctgctctgtagacaaagtgctttcattcttcagtacgcattcagcttaagtcagttagattaacattggttatgtcacactgcctgagtgccttctatgttcagtgatcttttttcttctgaacttcagtgtctcaaagatgaagttagaaaaattgtctagctacaaagttatgtagtttaaaaatactataattatgatacaattaaatggtttggtcactttctttcctcctaaagttaatgaagaaattttacttggatattgcaaatttaactgagataatttaggtactagggattataataattttaggaagattgtgaatgatgacagtcttctttatgaaattaatttaaacatagattaggctaatgggaatgttccttatggttcttcacatgagctttaagaatgctacaactcttaagaaacaatctatataagcaaacttgtaaaggttttatactgttatttagaaacaaaattctaaaatagtttcctgaattacaatgagcagcatatttttagtttatgttgaggaatgattatgctttgaagaaaaaaacaagcaaaattctcagtattttagctgaagatgtgtctttaagacataagtttagaacttaaacttctttttcagtgatcactgtaaaattctattttagtaactcccttctgttattcccagaatatgttttagaatataagaaaattattttccaaatatgggactaatctctggcagattgtaaagcatgagcattgtatcagtatactcaggaaacagaaaacaacactagcgtaatgctcactaacagtgttctctatgtagtcagtttatgtctataagtaaatgaactctccctcctatcatagtcgaatctgcaatttgaattatatactattagagtgaggagaaaaaataccagatgttaaaatagtggtagtacaatatttttgaataaaagttgttgaagaggtagatgttgaccctatgtaataatcatagactcctgccacataatgggataggaggccaaatggaatccagtggtttttagtacagaccacacagaggttcctgatcacttttaatatccgtaaatctttcttaacaaaggtggatgccctcatcaggggagtgggaggcaattttgtttatacagggttgaactatttagatttcaacttcatttttcacagacttcaaacaacgtgcatctcaaataggcaggcacctccatagtgtagagcacaactgggggaaaaagtcagggcttttctgttttgattgtggcaagagaacaagcaaacccattttaaagtgaaaaaaatggatgtaggtctaacgggccctgattcctgtctccattgggctacacatagaacctttgcttctgtttatttccgctcagtctagagaaattcagataagttcttacagaagaggagtgctttagtctttaaggtttctttcactttcattaagttatattcaccatctcataataacccttcattaactcttaactaatttaaatagtttgtaccagtccagcacggcctcaggtccattcattttctcagaattgttatatttaaacactttttacttcaatctctcccaccccaaatttgaagtataaatttaggaaaatcagtcaatctctctctctcttttttttttgttttttgatttgtttatttatttttttggagaccaagtcttgctctgtcgcctagactggagtgcaatggcgtgatctcggctcactgcaacctctgccttctgggttcaagcaattctcctgcctcagcctcccaagtagctggggattacaggtgactgctaccacgcctggctaatttttgtatttttagtagagatggggtttcaccatgttggacaggctggtcttgaactcttgacctcaggtgatccacccacttcggcctcccaaagtgctgggattacagtcgtgagtcaccgcgcctggcctaggaaaattctcctcttaccccttcttcaatatagtttctctctggagctttgccattttcaagagcagtaatcttgaatatttgaaagcttggtagcaccttcattatagaatttttactgtgtaaattctagcaatgtttatcactagcaaagttctttactggtcctgctggttttccatttttgggagatggtagaatgatgggaatggggaggtgtaaatttatgacttccaagtttttttttcaatcattggatttgagtgtctacagcagtgtataaacactgtctaactgggtgaattttggaatcagggcagtacaaatctaaaaagtttctagaattttttccagggtgattttaaagcagagaataaatgagatgtcccattgtaccccttcctcctgtgctttacctgaaagaaggtatctttttctcttatgcatataactgaaaccataagatcattgtggatttatttgatattattgttagttagagactgacctggttatatgtagctgtattcaagatggtaggactatgtgcttatggttttcagtgaagtatggcacaggcttatcttttactctatgattccattcccatggaagattggaatgcttgaaaaattatttggcactatttctttcttctttttctactgttttgttttaaattgtaggtttcaaaatgtttaaataaaattttttttctaatatgtttaaagtcatggatttttgatttagtgtctaagaatggattttagggggttggcagacataatgaaatttcatgcaaagatttgtataagtgcatttttctgattagaagtttcatatctttcatcaggtttccatagaagcttcctatagtgccagcttcttaagaatattcaaggagtttcaactaacattggctgggaaagtacaagtcggcttcacaacacccctgaaatctatccttggactctagactaggacctcctaatggactctagattaagaccccctgcaagctcctcaaatatcttatccccagatatttgtcactatttgacctgtctggcagctccttgggaaggccccattcaccaggcttgtctttatttgatctgactcagtggaaaagccctatcctcaggacatttgttgaaaacaagcagcagcaattgtttagcactgtatctgcctgaggtggctgacttttagaccctgtgcaagcaggaagtgaaggctatggcagaattgtaaactctcagagcattgaaggcatacccaacacagggccctttggcaaaggatgaaagatctcttggttcaaaacattttagaaaatatgtcgatcattagctgaccactaggtagctgaacagatacttcaatggacacacatgacagggaatataggctttacagaactagtccaggaaagtcactaaacaaacagtaacaacaaaccttaggggagaagtgatctgatttccaaactttccactttatattgtttaaaatgtctagttttcaaccaaaaaaattaaaatacaaccaacagtaaactatggcacttaattcagggacgtaagcaatcaataagaactgtcactgaggaagcctagatgtgcttactagatgaaactttaaatcagttgttgtaaacctcttcaaagaactgaaggaaatcatggctaaataaaagaaagtatgagaatattagacatattaggaaagaaagaagcatttatctaaacatattggaaactatagctatgtggtggtgtgctagaggataaatgaagccacagggtaaacatgatgtctcttcttcgaatgtcagttttccagaattaaaactgagagcataaatttgatattgaaacaaatataggtatgttatagtgtagaatgtaaaattcacaaaaataaagcattatgaaatttgccatttgtgatgggccacttacggcaactctcaattcctactcatttcacacctttaatttattttgcctatgatgtacgtcagttgaaaagtttgagaagtctaatctaatgatctgttgcttcagtgattgtggaccaatgacaatcctatgttagaaacaaatgggcatgtcacagataagagataactgtaatagaaaaccgatttccacagtatactcactaattgaccattgtgttattttcacacttggaatatcctacctttgatgaacaaaaggaatacctttacacctgaattgacatttctccaaaaaagacatgcagatagctaataggtacaggaaaaggtgctcaacatcactaatcatcagggaaatgcaagtcaaaaccacaataagctatcacctcacacctgttaaggatggctgttatcaaaaagacaagagaacacaggtgttggcaaggatatggacaaaagggaacctttgtacactgttggttggaatgtaaattggcatagccattatggaaaacagtatagaggttcctcagaaaattggaaatagaactactatatgatcaatccagcaatctcacttctgggtatatatccaaaggaagaaaatagtatattgaagagatatctgtgcccccatgttcattgcagcattattcacagtagccaagataacaacctaagtgtccattgacagaaagtggataaagaaatatacacaatggaatattaatcagccataaaagaagggaatcctgccatttgcaaaacatgagtgaacctggtaaacattatgctaagtgaaataagccaaacatagaaagacaaatactgtatgatctcactttttatgtgaagtctaaaaaagttaaactcatagaaacagttgtatggtggttgccaaggtctgaggggtgagggaaattgggagatactgagcaaggatacaaactttcaattataagatgaacaagttcttaggatcttatatagagcatgggtggtgatgggtgtgataatttgattgtgataatacacagtgtgtatacatataacaaattatgttgtacaccttgatctataaaatctttacttttcaattaaatatttttaaaagggaatacctttcttgttttgaaaatgcttgatgtgtcttttctcacattaatgtaatttagaggaagagaaacagatttgaagaagcctgagccaagggattataagttatccttgaaagcacaaatactatttatcatgcagtttccctcatgaaatgttttacggcagacctgtttatctcatagatctgagtcaaagctgaatttaacacgttaaactttaacttatccagaattagtatcttttgtctaagaaccaacactaaaatatttccttatgttaatcaccaacactagaaatttgcttaattttttttcaaaaacaaaattttgtatcactttttgagttactgcatagtttataatgcaaagaaaacatccaagcttagtgaaatgataggataattactaacttagcaattcattcacacatattaactttaaagtacacaagattcaaattcttcaaattaatttctcaattaaatgaaatacaatgaaatgtaaataaaataattaaatgaaaattaattaaggaccttaatggttgcttataaattcctgaaattgcggattgtatgtccatggagtctgaagatccatagtaattaaaacgtattgtgttatatatgtttatagtatgctcatgctgttttttaaaatatgtatagaacattgaactccacataattgatagcatcataaatatcattgagactactgttgttgattttcatgagtgatttcctctatattatctgctctgtttaagttgattttccaagaagaggtcttaatgactttgtaatcactcttacagtgttttattcattgtgattgactatcagtatttttcctcttgcagcctgactcctaaacccagagtctcatatacaattgtaggtgctacgttaagagagacagggcagttatatggaaagtattatgtgttctttcttttcgcttactcttctctctctctcccccaccaaccacacacaaaggtataaggttgttttcatatcatacctgcaactaaactcattcaggatccccagacctctctaaatgggaaaccacttgtaataggtttaacatctcctaatctagtattagggtaatgctactattgttgtaaaagtttctcataacttgtaatttgctttggcatcattataatgaataatcaattgtatgatataaaatagtaagtgttctaatgaaatgcattttaaaaatgtttgattccttataagacttagatcttataatgaccattttcttatttgatcaaagaaatacactgagaccttagtaagcttccttctgtttagttatgacttcaggtattgaactagatgctgtgcagtcagtcctaccatgactaggatcatttatagtctctcatgttcttttatttaaaattaaagtatgtgaatctttaaaaaaataaagcagtattttaaaaatacttgaaatacagccaaacgtttataacaataaatgcttttttattccatctgttattaaaaatacatttgtttccctgtagtcaccaaaggtaaagtagaatataaatcaaagctgatcatattttctctcttctaattctatagatgtttatgaactttacctagcagcttatgtgtacatatcaccagggattccacatattttgttgggcaattttaagagctgatgccttttaggaagacaccaataccagaatgattttcaaactcaagtaaagagggtatttctggaatattggagtaaggacttcagaaaatctactcccctataaaagcaatgtctggcaacaattgttaaaaacaagtttttcagaattctaaaaattaaccaaaagcttccaacaacctgaggagtgtttattcaataaaatagctgattttcggttaaaaaaaaaagttagatttgttgtattttaacttgccctaatccaatcaacctttccccagatccaaaatatctctggaaactagtaaccttgcatccatggtagctgtgaaaacctgtagctactggagagttgcaagctcctcacatcttatccccagataattgtcactattgacctgtgtggtagctccttgggaaggccccattcacgaggcttgtctttatttgatctgactcagtggaaaagccctatcctcaggacatttgttgaaaacaagcagcagcaattgtttaatactgtatctgcctgaggtggctgacttttagaccctgtgcaagcaggaagtgaaggctaaggcagaattgtaaactctcagagcattgaaggcatacccaacacagggctttttggcaaaggatgaaagatctcttggttcaaaacattttagaaaatatgtcggtcattagctgaccactaggtagctgaacagatacttcagtggacacacatgacagggaatataggctttacagaactagtccgggaaagtcactaaacaaacaataacaataaactttaggggagaagagatctgatttccaaactttctactttatattgtttaaaatgtctagttttcaactaaaaaaaattaaaaccaacagtaaactatggcacttaattcagggaggtaagcagtcaataaaaactgtcactgaggaagcctagatgtgcttactagatgaaactttaaatctgttattgtaaacctgttcaaaaaatggaacgaaactgtggctaaagaattaaaggaaagtaagagaatgatgtctcaccaaatagcaaatatcaacagagaaagagagacgttataaagaaccaaatagaaaatctggagttggaaattacaatagatgaaattaaaaaaattattaaaagggttcatcaacggatttgagctgacagaagaatcaagaaacttgaagataggttaactgagattatcatatgtggaaaaaaagaaaaaaggtagcaaagcctaagagacctgtgggacaccatgtagtataccaatgcacacataatggagtccctgaaggggataaaagaacatttgaaggaataactgctgaaaacttcccgaatttgatgaaaatacttagtataacatccaagaagctccatgtactcaaagtaggataaactcaaaaggattcacacccagatacaatgatagtcaaattgttgagagacaaaaagaatcttaaaagcagcaagagtgaagagactcacaagggatcctcaataagcttaacagctaatttctcagcagaaactgggtcggaagggcagtgggatgacatattcaaaatgttagaaaataagactgtcaaccaatatttctatatctagcaaaactatattttataaaggcaagataattaggacattcccagataaacagaaacagataatttgttgctgaagacctgttttggaagaaatatgaaaggtaatccttcagggtgaaatgaaaggaaactattaagttgaatgtacagaaataaagagtactggtaaaggtaactacataggtaaacataaaagacagtataaaggtatgtttgtttataactcttctatctgatttgaaagacagcagctgcataaaaaactaattataaaactgttgatgggcgtatttcatataaagatgtaatttgaatgacagtaatagcacatagggggagggagggaatagagctataggggaacagagtttttgtatattattgacactggttggtattaatctgaactagattgttttaggttaagatgttaattgtaattcttaaggcagccattaagaaagtgactcaaactagaataaagaattggtagttagctttagaaatttcagtgctttggcatgcaggttagattctgaaagtgaggttatagattatttccaaagttaagctttagttgacaatttcatatgttgtaaacatgtacaagtatattgcctaagtagaatatttggtacctttttagataaacttcaataaaatacagagaaaatttataatcattaattctcagaacattttcatgagttaagaattgattattgctccagtttttaatatgagaaaactataccaaagagaatttaaactttgcctgcctcttccaagtatgatttctaatatggtgggagttgcagtactcaagcatggtttagtaacatatccctctactctcctcaaagtgcttaatgatatttttgatattaaaattaatatctttaataatttcatcacacttctcaagaaactgaagacagtttaaaagtctctttgagcttccctgcctttctttcagaacaatttcaagagaccttcagtctaatgtgaagtatctatcactaaatgtgtacatctattgcccagaaagttgtttttagctcaggtggagtctctaaatagaccgtggaaaattgttttctgaaataattatggcacatcaataaaactgctgagtcttttttttttaaaatagaggtttatggattttagaatttagttatctgttaatgagcaaattaaatgcatccttgaaaaaattaattcaagtattttttttttaagtttatacctaaggcagtgtgggagattcaaaggtagaagagatgtggttcctgccctcatcaagacttcctattaggttggtgcaaaagtaattgcgtgttttgccattaaggacaagtgtaaagagttgtaatatgaaaatggattacctttcataattaagtataacgtatctcacctaatgacttacaaaataacaaagttcagtatcataaataccattataacttacattatagtactgatttgttcctctgggaagaaaatcagcttttcttttgacttggtttgagttctgtttatttgagaaagaactaatgtggcaaaccaaatgaataaaagctctcaacaggttttaacgcatcttgaaccatctgctattagcaccaagccagtactgcaatgtttctggagctggctgtcaggatcagggatgtcctgcagacaaaacaagattcctagtgtaggaagctattgaactggtactctcagaagtgactaccatcttcttccctctccccactagggatcttagtctccttatttagcatttgtttaccacatttcaaaagagtagcttagcagttttttagaaatgtttcagcttagatgtaagctgtacatgattgaggaagggagaaaggacacagtgctagtatatagatagtaaaagtgctgatctcatctccgtgaagtcagagcaacatcctcggggatgaggcttggtctagttatgatagcatactttctttccataatatgcttggaaaaatatttaccctcaaaacaaatccactgtactattttaagcaaattagtttggttttaaatcatattttaaaagttatttaatttttaaattacgaaattttaattaaatgaactgtcttcagagatgattgacctagacacaagtaactatgggaatactgtgatagataaggcttccctgcccttaagaagtttatactctagtaagagagctaagttatacaactcagataactgtaatacaaataagtaagtgccttatataggtataaacaaagcctgtagtagttagaggatgatgactgtagatgggagattttagctaagatgtctgatgagtcattgggttcacagacatacagatattaagattaaaaggaaatttataaatcatatttccatgaaaaatcctgccttcactagaataagcctacatatttttcagcattggtatttagggatagacagctgttgacctgaggatgacttaggctaatgagttaatttttaaaacatcattacaggggcagaatcaatggtaaagtatccttctgtgtctgggtttataagagtaggtcaaaaggaatggccaggataacaggtcagataaattcaagaaaatcaggccccctaatgtgtcagacattgtgacaggtacaggtaatactatggtcctttgctcttcagtagctcatagcctagcaggagaactcagaatgctagatcattggaagaacttatctctaaatcttatcccatgatccctggaccttctaaactagatgaaggaaaatataccagatggtggggatactttaaaatcttctgacaggaaaactgtgctcctggaatgaactttttaaaaaggtagtatactcacatggtgtgaaatccaaacacacgaggacaatgagatatagatttccctcctactcctttcgcccagctacctaggtgctcttcacaaaggcaaaaactgctgccaccaatttcttgtgtatctttacagagacagtctatgcatatactactagaatttatgtacatatgcatgtctttttgttttgcacaaagagtagcatactatacatacttttctacatctttttttgcagttaacaatcaattttgtagatactttttaaaagactgttttaagagcagttttggctcacagtgaaagtgagagaaaggtacagagatataccgtatactccttgctcgcacatatatatagcctcccccattaacaacaccccacacctgagtggtacatttgttataactgatgtccctacattaacacatcattatcacccaaacttcatagtttaaggttcacttttggtattgtacattctaagggtttggacaaatgtataattatatgtacccaccagtatagtatcatagaattttcactgtcctaaaaatcctctgtgctctacctattcatttctccctccctaacacttacctttttactgtctccacaattttgcctttttcagagtgtcacatcgttggaatcatacagtgtgtagactttttagattgacttcttttacttggcaatatgcatttaagtttcttctccatcttttcatggcttgatatttcatttctttttagtgctgagtaatattccattgtctagatgtactatagtttgtttattcattcacctactgaaggatatgttggttgtttccaggttttagcaatcacaagtaaagttgttataaacaccatttttctgtgggttttgtgtggacataaggtttcagctcctttgggtaaatacgaaggagcatgattgctggagtgtatggtaaaagtatgtttagttttgtaagaaactctcaaactgtcttccaaagtggttgtaccattttgcattcccaccagcaataaacaagagctgctattgctgcacatccttggagatacttctgtatcagcacacctgcaacttcctggttcttttctttttaaaaactatttattttgaaataattacaggctcacaagaagttacaaaaatagtgcagcaaaatcctgtgtacccatcactcagcttcccactggtgatatataattatagtgtattatcaatactaaaaaattgattgtcacaatgtaatcaactagacagcagtacctgtttctttttaatgcctacaagacattccattctatgggtgttttatttaaccagtcctttattgctgggcattaaaattgtagtattgctggtatagggaaagataggagaaaataaagtctgtgtattcggggccactgctggcatttacattgcttttatgtgaattagaaaagagttccctctctgggtggatgtagtcccataggcacatggcttgggaaactagaatataacctagataaatgtttttagcacctctgcatatatatctctttgaacttaagtgggaatacatatgcaggataatggactgtcatttaaattctgcaatataacatcagtgttccaatgtgaaacttcgaagctgtccctttcagatttagcatgtgctcccatcctcctacctgtaaccgtcatcacctctcccaagtaccttaggtcttgtatattttgtgttattattattattaagacagagtctcactctgtcgcccaggctggagtgcaatggcacgatctctgctcactgcgacctctgccttccagtttcaagtgattctcctgcctcagcctcctgagtagctaggactacaggtgcgcaccaccacgccggctaattttttaaaatacttttactagagatggggtttcaccatgttggccaggctggtcttgaactcctgaccccaagtgatctgcccacctcagcctccccatgtgttgggattaccagcatgagccaccacgcccggcttgtattttctattatttatgtacatgtctaccttacattggatagtaagcttctgtcttcttctttatattttctgtcttcatctttatattttctttcccttctcttccccactccactattatcaatctacatagaacatcattttttataaacgtgctgagtgaatttttgtttaaaatttttcttaaggtgaggaagttaagagcagtgaatttttaaatctgcctctcaatacttcaagaggtgtcatgaaatttttaaaccaaaattattttcaattaaagtacccacacactccacactcataggagagaaaaagagtgtgttattaagtcaaccaactcataatggggtgctacagtttcaaaaacattaataagcattgtagtattgaagaaaacggggtagtagaacttgtgacattgcaagcagggaagtattttatatgtattgtacactcatgttcaataagtagaattctgagaagttgcataagtcttgtgccctaaaaattcctgatttcatcagatcttaacttctgtatgccattgatttaggagggaaattgtccatttttaacactggccttttcattactgttaagcaccagaaatattttataaaattttaataatattaaatatttcattaaaacttacatcattggactcatatgtggtacatatcaggactgctacaaacacacaagaatggaaatgtactttttaaaaaaaatgtgttttctattacatagacgttatactagcaatgtaactaaaattagcagagtaatcatacagcctaatcagcacataaatcttatacaagtgacaagttaaaatagataatagtagttgcaaaagtagcttgagatcaatatcgggtggttatgtttgcttgtatatactatttaaggaggtaagcattggggaagttgggctgaataaaacgggggaggcaagggtgagaaatgctctttagatctaatgttcacagtggatcatcaagtgagaattgctttgctagcaacacataaatattttttcattataggggatgactgttactgggaaagcattggagtaaatatttgttttccttgattatttgctgtaaataattttttgtaaccaaatcaacaaagtactgtgagttcactataggatattacattgtaatatagaagttcctgttttcctgatgttaactataatgggtttctacctgtattccaggaaatagagcaagttgggttgattccagtatgttttatttttcagcttcagtgctaaaatcagattgtgtgcaactctgaatcatggttctataaattcttggctatactaagtaaattacagtatatcttccagtacaattataagaatgctgtaacatgcaggatgttttcttgagcgttttcatgattaaagattaatttcttcctgaatttggcttgatagatttgtattgaagagcactgtcaactaccatttgagtgccatctgtgtatttgacagtatactgtggactaataggaatttaacgaataaaatagtgcatttttggtttggcaggatttcttacagagataaataggctgggcacatttgccttgtaggtatgtgtgtttatgtacatatatgtttcatatcaacgttggcctgtaaacttccagtataaatagaataatttaccaacttgttcttccactgggacataatgtaagtaaactatcttttctagctaactaagcaggtggctatttctatgactagtatgtttcaaattttaatatacattgatgtaattaaattttgtgtgtgtctatgagtataatcatctctcattatctctgcttctgtgggggatcctaatgtaaatagtgtaaaatagtaatatccttgcctccttttcttgactttttccctcattctgtgaactggctttatgtgccttctgtaccttgctccagtgccttaagtggtcagaagtgggtgactaaaagaggtagaaattgccacatgtggataatggggagttgggtatttatgataatacatgggaatgagggagacatattaataattttgaagttaatggacttatttgttgagggaaggattcatggacagttttgaattatgtttcaaatatggatttagaattttatttagggggagaggactagacattctagtcagtgaggatcataaacagagctgagtaagtagttttgtttagagagctgttgggaaataagtatatttgagaattcttgaatcaagagagagaagagtggagtggcttaaaattaaagcatctgtttattcattttgacttgattttctaacctatgtgggaatgctgtagaagttatatggttgaataagtgagggattagacacatttaaatcagagtcattattgaagaaaatatcagaatagtttagtccagggtggactctagtctacataagaattagctgtgagattagatttgtgaggaaagaataagtacaaacaatagtacaggaaagaaatggtatagtttggcatttaactgaataatgtgggtggtgatctagaggctcatgttaggctagcattgtttatccaaaaagaagggctgtaccatttctaatgaatttggagagctctgtcagccatacattgatgaagccctgcagtaatgtctatgattttgcttgcagttatactttgaagatctccagtattctgtcagtttctgagagcgcacaatctgactcttgaaattctggtagagcttgtgaggagaaatcaagagaaattgctgagaacctattatgtggtgtgcatccttctggatgttttacatacctgctttgcttccctgtttctctaccaaatcaaatcttctgtaaagatatatgagggtgggtaggtgaatgggcatcgtgctgagggagaactctccactcttcaaagtttttgccacctaaaaaatgccaaaagccatggtgctacttcagctctttgtgagatttctagcctgccttcttcctttactctttttgatttatgctatctgatggctccaagtcacagatactgagctaaagtcctttctgcagtcatggtcctctttcttgcttccctgaactaccaaactggctaagtgtctctcctttgtgtcccataattcctcattcatagctattttcttatcatttactgctgtatattaaattctattcatgtatttctctccttcacttattagagtataagctcctgaagagtgaggatggtctttttcctttcttatcccaagtgcatggcaaaaatagtagagaaggtgcttaataatggtttcttgtactaagttgaccccatcaactgcagtttggcttctcatcttgtttatccttgtgggatggccttgtacactgtctaaaccattctctctattgcgaaagaatggggcaaggaaacttcttagctttctttttagtctcttttattccagccactctatgctttgaatacctagttttgacttgcttcccggtaacagactaagtctttcaggggtatggtattcacaactctaccctgtactagacagtgtcatgtagactagtaacttggaagattaaggtataagaaattgttgaggtcgggtattctgagcatcagtatacacactgatttcttccccagaatggtgatactcaggaaaccagggagcccctggttacataaggaagtgtgaactgctgcagatagaaattggaacaagacatcctcattactgtaactctgaggtctaatagatgtcctccctacaactacaacaaggtggtctgtgttttccaggattggagaagaaaccaaaacaatttgacagtttttgtcaactaggtctggaggcacttccctgaagtaaaaagatcatctgattcaacgactcctcctcagtctcagtcacattaggtgactacaccagttagtgtgtctctgcattttggttctatttgagaaaaatgtttctgtatggaaaggtaacacaatagtaagagatagtttatccttcatcccctcttttgacaccctactcttgaattctgatagctggagttctttttcttaaacccactaccttcacaagaaggcaaactgtttaaactcacctatctctcacatgatagtagctggtctcataattgacagaatcattggcagtaagaccattatctcttttaaccagtggttgaaaattctacttagttgtctattggagctcaagaaactattaacttatgaacgtaatttagtattgaagcaccttgtgggcctcctggctatcaaagataatcagataccccaaaaggacccttgaactggtatcaaaattcagtagtaactaatgtaggatactagggattagcctcatgattttttttaactaaggtctccagatggccaatgaatttatgaaaccggaaggagctggtggaatgggaggacagagaagatgacgttaagtaactttgcatacatgctctaatttttttttttttttttgagacagggtctcactctgccacccaggctggagggcagtggcacaatcacagctcactgcagcctcaacctcccaggctcaggtgatcctcccacctgagcctcccaagtacctaggactacaggcgcacaacaccatgcctggctaatttttgtaaattttttgtagagacgggtttttgctatgttgctcagggtggtctcaaactcatgggctcaagtgatccggctgcctgggcctcccaaagtgttaggattacaggagtgagccattacgcccggcccatgctctaattttttaatggtcatgtgcccattgagcattcatcattcaggtgagtcataactagagactgtataagggtattgtgaaactctatgcagttctttagtcatgctggggttgggttcttttaaaaacagaccatttccagatagtaaccatatattctggatttccaggacagccctgatttcattttgtcccattgtgtccataagtatacttatgttcgttagacgttatgccagtttttggcttggaaaatatggacatcaggcatataaggacttccttcttgccaactgaaaacagttcatcacagcatagccttgctctttcaaccctgccatcctaactgccagcagtctctgattttgctcccatcttgtatctcccacacttactttaaccctttgtgagttaatttatctcttttctttggtgtctccttgcctctggagtccagcaaattgtgtatccttatactctcacaaagctacttgtatcctagcattttggtaataggatgtactcttttgaaaaatgggacactttcttttttcccagggtgctcttgggggttgaaaactgttctgtgagatactcatcttcagaggcctccgaaaacacattcagtaagaagcagtactactactactaccatgtattgagtgtttactatgtatgagaagttgggtaaaatatttttaaaatctcatttaatcctaaccacctgtgagattggtagtgttcccttttcacagataaggaaatatacttagagagtttgagtttttcaagattctgcatttggaaatccttgctacattccaataagatattagttgtgtacataccaggcttagaattgtggatgaactaccaatgactccaaccccattatagaagaaatttcacctttttacttggtaccaccaggaaataagtatttctatactcttggtagatgaatttttatacattcttcttgtataccactggtcctcaaacttgagaatgcatgaaaaccacctgaagggcttgttactcccagtttctgattcagtaagtgtgagaattaagtgtgtaaaattaaacttgagacttaatttctagtaagttcccagtgatgccaacgttgctggtccagggaccacactttgagtcattgttacatactaattattttttattcagcaaatcattattcagtacttatggtgttctaggcaccgttctaagcactgtggatataataatgaaaaggttaggcagggtctttgttttcataaagcttatagtctagtgggacagatgactaattttattgggataagtgaacagggattgccatagagaacaacagagttgctatcctctactttagatgggttgagaaccctgtctaaaggatggtagttgggtctctttgaggaggtgatagtctaagacctaaaggatatgaagagctcatatggctttcacgcttgaattttcttagctccaacttctgttgccatcactggtgatgactaccttgggagaactccatgaatttcagactgacccctgtgtaattcattctttggtactttgtgtggccttggccaagcttgactgaatagttcctttaagattgtttaccccctctccaccccaaccttcccccaccatccagtatagatacagaagtcagaggaattttaagagtgggctaattttgtcttctggcttcacctagatcacattctttggtatatgatggcttgagaagaatatatgctaaggaattgtgcctgtgaacctgccattcatggccactgcccttaccttataactatcaatgataccttaagattctgtcttaattgccagtttgcaaatttgcctcaaaaggggagacagtgtgggaatctccacaactccttagctaccctgatgttaggtttctctagggaagatttctagattcatgcagtctaagaaggtgttgtcagagcaacacaaaaccaaacttcccttccagttgtggtgactaaagctggaaaaattctagatattcgaaggagactttctacggaactatcatgatttcttgccttcagagttttagttctgaagtttgatgccttactctttttttcccccctctggttctgtcctaccatgacttaaccagcttttcctttgaatccctcctgcctctggagccatttccttgctgtctagtttcattttattttttatttttatttttatttttgagacagagtctcactctgtcacccaggctggagtgcagtggcaagatctcagctcaccgcaaccgccgcctcctgggttcatgcgattgattctcctgcctcagcctcctgagtagctgggattacaggcctgtgccaccacgcccagctaatttttgtatttttagtagagatggggtttcaccatgttggtcaggctggtctcaaactcctgacttcaagtgatccaccctcctcggcctcccaaagtattgggattacaggtgtgagccactgcacccagcctcattttattttaattaaatattttctctggtattctgttcctttggaggaaaagagacccttaccaggtgctacggtatgaatatttgtgacctcccaccagatttatatgttgaattctaatctccaagatgatgctattaggaggtggggttatttgggaggtgattagatcacaaaggtggggccctcatgaatgggattggtgcccttttataaaagaggcccaagggagctcattcatccttcccactgtgtgagacacagcaagatgttgttgtttatgaggaatgggcccgcatcagacactgagtctgctggctccttaatcttggacttcctggcctccagaactatgagaaataaatttgttatttgtgagctacccattttatggtattgtaaatagtccaaacagactaagacaacagatatttctctaggtattttcaggcagagcatttcacttggcctaggtgtatgtatttttggatagcagacttccttagtcttctctcaataaattcctgaaccagagaaggggaatatgagtaattgacttttctggttgccaaagatgtctttagtttacatgaaaaatgttttgaacagttatccagtgcatgcttaaatgggctgtctcttataacacatctgcacatacaggccagatttaactaccttacccagattgaaaatttccttttccttgtggactcagaagtttcttcctgctagtctggttcctgatggtatacagtggataaacattttttttttgttaacccatatatcaaccataagaatgactgaaataaaaaaggaaatggtgtgccagctcactcatagctggagatgataaaccttttctgttgctttagagccagatatccttggttggtagtgtcatgtctgctccatattaacagtgtcttgggcaagtaaaccaatcttgccgagaagaagaaaatgcatatgaaagcacctaatagtacttaattcataatatcataatatgctctcactgaatgttaatgcttgctttcctccttgatgttcttaaagccctgaaacacttgattgagcaaggcataatctctcatggtgtaccccatcagcaccataatcttacattttccagatatggaatccgtttaagaactacctgcttaattatatttattataaaaatgataatctcagagtatccctacttcttcaaggtatccaagaaaggaaattaacaattttgggcgtctacctagtagaggtctcattgacccaaaatgatgatagcattaataattatacctttattgacagaattataatacttagcagtttccaggaactttttaatggatagcgtccttggattcctgtagcagttcatcaagtaggcagtccccatcttgcatatctgtgtccaaggatgaagggaataggatgattccttcatggtcttttgactgatggatagtggagctgagctttgggcctaagtcttctgacacccctcctttccctgccctattccagcacttttatccaactatgccacatttttttttttaatctgaggttctggtacatgatttctcaaattactagaattctaagacaaaatgtttcttaggtttcacctcattttatctctgagatgtttatgttcctaagagatagttcttacgtgtgggagttttaaactctacctagaggtcagagaaagctgtttatgcctttgatgtaaattttgtgcaccatacttagactatactacacattccaaaacagtatttcttgggcctagacttgtaacaaaactctctagtgtgatgtattctcattcactcttttatattaacctattttattctttcagcaaacatatttagcccttactatgtgtcaggggataggaataggaccgtgcaaaaagacaacctctgttttcttggagcttacgctgtagtggataggaaataagcaaatgggtagtgatgtgtactgtgaagaaaaataaagcacttttaaattttcgcccaagccatgagattactaaattgtggtatctatcagtgaccccttgtagaccttatagaccttctaaaaagttagttattgagaagatggcccaggaaaggaacattgtctctgacatccctgtgcagtttctaccttcttttccattatttgaactaagatcttgctttcttgtatggttgtgagcaaccctgatcgagtggagtgtaagggcatggccaaacaaagacagattggagaggaagcctgttaggaataaagcaccttcggagaaacagtctcacaacaaatactgttagagttgtatttgtcatttatcctttaaatgtaatgtgttgccttatagagtgtcacatcaagaacactgaaaagagatgtatttcaaaatatgtatttagctatacaatggttaacaaaacacagcataaaaagcagcctccttaaatgcttctagttttatggtgtactactgtagaatgagttctttttgactgaagtgttttaaaagttttgaagaaccagggagtctgcaagttggaaagaagccattcttaccatgaggcaaatatacttgagtttaatttttaaactataactgctgtttgaccttaaattaagacagtctgttttcattgtggtgttttactggtttaacaatgagaacatttaaagcagctgccaccaattaaaatgattcataagtgctggttgtaaataaatattcttgaaattttaactcagtgaagtcagtctttttagtggcactttctttctggaaagcaatttggtaaaatgcatcaagagctataaaaatgttcatacactttgatctggtaattcagtttcttaaatatccttagaaaataaaactgagatcttgataaactttaataaataaagatgtccctcacagtttatcaaggaaatagttgcctaaattatggtctacctatatgatgtaccatggggccattaaaatatttttgaagagtattaaccatataggaaaatgtttatgcaattcagttgaaaaacaaaactatacaaaaccatacagtatgatcctaaaaatgtgaaaatatttccatagaaagagtgtcaggaaacattatacattttcattttctttgggtagtgagattgtgtatgatatttattttctcctttctacttttctgtattttctagaattttttatagtgaacatgtattgaatttatagtgaataaaaatgttatataagtattttaatcctttcaataagggtgccttttatgaatatccagtccatttatattattatgacctaattttttccacattttcagctttagagcatttttttctagtgaatttttgtttttaacgttttaatgtttatttttatggcacataatgtcaacaattttacctctgcttggtctaatttctaggtattcttctttaaagccaataattcagttccttgttggaatattatttttcaggtggtttacatcaaacagcacacacattcgtagtatgtggtaaagagagttgactctggagccacaatgcctgggtccaaatcttggccctaccacttagcagctatgtgaccactgacaagttaatggctctctctaattctcagtttccctttctttaaaataggggataataatagtatctacctcatagggttgttataaggatttcaaagagttattacatataagtacttaattttaaaaggcctggtatatagtaaatattcaataaaaattggctatttttagtagtgtgtgtgcatatatgcacacatatacacatacatattttcatgataatttgaaaaatgcccttttatatctgccttttcttttatacaattttaattttaaaatgaagggttttatcttattttcagataaaattagtttttcttatatgctttgaaattatttcaaaaagttttcagcaatagaaacctggtttgctttcaatcatattttttccatatttgtaactgatcattcacgtgggctggatggactgaagatcagcttcattctaggtataaaataacttttatttacatacacaaagttgatatattcataaccagttaccctcatctattatttacctcatttattaaagtactgctttaatagagaaggagggggatgggtaggtgtcagtatacttcaaaaataataaaactacatttgtttctttttaaactttataatccagccttctctaatcaaactgatactcccagaaagatttggagggaaagagagctaccttttattgaatcacgtgttgggctagactcttacatgtattatataattctgtagtccaatatgaaaactattttaagtaaagcaatcatttggcaattttactgtcctggattacagaatcacaaatgtgttcctatagaaaacaatttggatttaactgattaactgtttattaaataactaattgcaatagtttttccattattctgtttcatttttttgaaacaggtgtttctgtggtatgtttgcattggcagaataaagaaagaatctgggcaagtttgaaagcatgaaactggtcactgaaagtttcttttcaagaatgaagcatttttttaatcaatctaataatattcaacagagacacatatagataatccagatatcttcatctttagctggatatttggttagtatttaatgccaagaaggagtgtgagaagtagtccctgtgggaaattgtgttttctttggtctttggttctacagctatgtagaaattctggattgagtatgaagtttatttatacatgtacatgtacatttatctgtgggatttatctaagaagcagtggtttggggtattgttcttgctggtgaaagaagtggactgggtggaactctagagaaaaatttgcttttagggataaacatgttcaatagctcaggtggcaaattttgctttcttgtattgatgtgataagctgagtgggtcactgccatttccagaccatatacaccacctttggctgatttgtcttctgtcatgtacctagcagttcagctggaggctttttaaaccaaagtatttaaatatacataggaagttgttgtactggtgcttattggtggctactgtgttctttcttatcttcctagggagtgtggtccttttgtttagcttctgtttcatttgtttacaaagttataggctttgaagtaggcagttatatataggattgcctaaagagacgtggaaagtgagaagtctgctttataagtaagcaattatccttatttcactgccttattacctcagtttctcagccagtgtctttcatgaatttggcttttctcataggcttgacattggcttacttactgctatcctaatttttttgtggaaacttacttagttttgtgtctcccagattagatactagctcagtttactttctgaacatttaactatcaaagctttgcctgatgtgttagtgaggaatttttaaaaaataatttttgataatttaatgatacacatcacattattttttctatttgttccatcataaaagaaattttcatatctggtttccttaatgtagggttcctggccttaggtgactgtccttctatagatatggcattgttattacaagatttgtactggtaagactatgataaatttagtgttttctaggacagtagtgaggtaaatagctgtgctgtaagattgtttaaatcatcatagctgaaaaaataggcctttaaaaatagcgataacagaatacacatacattagacataatgcatgactattaatgacttcctcaagatcttttaggagttatgaataaggtcattcagattgcactttttttaaactcatggagagagtataagaggagtgagctatttttggcatgggcttaaagaaggaaatatcagtgtgactggtaactgacatgtttgtcaagttcagtttctacctgagtgctttaatttcttttaaatttcattactttggactttagagttctcagtatgaaattttttaagagtgacttgtctaacctttgggttctgagtagtgtgttgcccctgaaattggttgagtcattttatattcttctaagagttcaccacctgtcaaagctgaagagatctgtcccttttgccctttatttcctgaaccatttttctttttttattattattatactttaagttctagggtacatgtgcacaacgtgcaggtttgttacatatgtatacatgtgccatgttggtgtgctgcacccattaacttgtcatttacattaggtatatctcctaatgctatccctcccccagccccccaccccatgacaggccccatgacatgtgtgatgttccccaccctgtgtccaagtattctcattgttcagtgcccacctgtgagtgagaacatgcggtgtttggttttctgtccttgcgatagttgctcagaatgatgttcctgaaccatttttctgctggcactaatcttatttgtgataggttttcccacatttaatatgtaaaacctaccacagagtttgaaccttaatgtgacttagggttaaagggctttgagacttctacttttgtccatgaaggagtaactggtgcaagacttgctcctttccaccttacatctcccataaacaactagaaaccagacaaaatacatgaaacaactgtttttagacatcgggcaacagacagcacaggactgtggtcactgagagaaagggaacaaacgaagtgagctctaccatcaccctgactttttgtcagcaggcagtttctagaccacagcattgtgagggggaacccaagcagaactgcaatcttgctgaattggtgagacagagataggaactcagggaggcctaggtggcagaaatttatggagcagagtactggaggaggaaagctactcagagacatagctccagaaatctgcatagatgttccccttatctctggctgaatatgaatctgtgcatgtatcaagggcaacactgtgaggctgggcagaaaacaactgctcaggagctataagctgaaaacttaccagagctcatacagacctgagagatatatgagttcctacagcaagagttgtgagcccttgttgaacacccagggcattccagagagactccagaagggtcatactttagtagtaaaggctacattaaagtaaaggactttaaataattatccacaaataatttaactgcatgacaaaatgaacttcaacagtctttgaagagaggacagcaaattccaaacactcaacaatataatgattataatatctggcatacaaaaaattactagacatttcaagagggaatacaatgtgacccataaccagaaggaagccaatccgtagaaacagaaccagaaatgatggttatagaattagcagacaaggactttaaaacagctattaaaatgtgttgaaggattgaaaggaaaacatgaatatagtgagtaaagaagtgaaagacatataaagaaccaaatggaacttctggagctgaaaagtatactataaaaaatgaaaaattcattgaagaaataaatagcaaattagatgctgcagaggaaaatatcaatgaatttgtatccataacaatagaaattatccaatctgaaacagaatagaaaaaatggaaggaaaaaagcctcagtgaactgtgagacaatatcaagcagattaacctacttgcaactggagtcccataaggaaaggagagagagaaataggcagaaaaaaaattgaagaaataatggctagaaattttccaaatatgatgaaaatgtaaatccataaatctaagaagctcaatgtatccaaaacagaaaaaccacactaaagcaattataattttttaattatttatttatttatttatttttgagacggagtttcactcttgttgcccaggctggaatgcaatggcaccatgtcagctcaccacaacctccgcaccctgggttcaagcgattctcctgcctcagcctcctgagtagctgagattacaggcatgcgtcaccacacccagctaattttatatttttagtagagatggggtttctccatgttggtcaggctggtctcgaactcccggcctcaggtgattcatccacctcagcctcccaaagtgctaggattacaggcgtgagccaccatgcctggcctaaagcaattataattaaattgttgaaaactagtggtagagcattttgaaagccactaggaaaaaaaggacacattacagaggaacaaagagaagaaccatatacttctcatcagaaacaatggaagcttccagaagacaatggaatgacgtctttaaagtgctgaaaaaaaaatactgccaatctcaaatttgataccaatgaaaacaccctttaaaaatgaagaccaaaagaaatgaaggtgaaatatatatttttttcagacaaaaatgaaaagaattatcactggcaaaccttaactacaagaaatttaaaggcagctgtccaggctgaaggaagatgataacagatggaaacttggatctctacaaagtaatgaagagtgccagataaatgtggcaagtgtagggtaaatataaaagacattttccccctcattaaaaaatttctttaaaagttaagttattatttaaaggaaaattaataatctattataggattatatggtatatagaagttaaaggtataacagtagcctcaaaggatgggaggagttaaatggacgtatacgttaaggtctttacattgcttttgtagtgatataatattagctgaaagtaggttgcaataagataaagatgcatcgatacaacctagaaaaattactaaaaagggcataactaataagctaataatggtgataaaattaaatactaaagtatactcatttaatcttacagtaaaagagaagtggagaacaaatgggaaatatagaaaacaaatattggatgtaaagatggtagacttaaacccaactctgtcagcagttatattaaatgtaaatagtctaaccactccagttaaaaggctgcataaaaaatgcaagacctaaccatatactgtgtataagaaacccactttaaggataaagacacaggtatgttaaaagcaaaaagacagaaaaagatatacaaacattcataagaatgctagagttattatgccaataagagatgaattggacttcaggacaggcagtgttacgaggaatgagggccatgtcataatgataaagtggttaactcaagaagacaaaatactaaatgtgtatgtacctaacagatcctcaaaatacatgaaagaaaaaaaatacacataaaaggataagtagacaaaactacaattagagttggatatttcaacattattaattcagtaattgatagaacaagtagacaaaaatcagtgaggagatagaaaacatgatcaatactaccaaccaactggacctaactgacacttataaaacattggacctaacattaccagaatacattttcttttcaaattcacaaaagatctctataaggagacctacaaaacactgatgaaaaatcatagatgacattaacaaatggaaaaacatcccatgctaatggactagaagaatcaatattgttaaaatgaccatgctgcccaaagcaatctacagattccacacaatcactatcaaactaccaatgtcatttttcatggaattagaaaaaacaatcctaaatttcacatggaacaaaaaaagaccatgaatagccaaagcaatcctaaagcaaaaagaccaagttgagagtcatcacaccgcctgacttcaaattacactataaggctatagtaactgaaactaaaacagcatgatactggtacaaaaatagacaaacagatcagtggaacacaatagtgaactggatataaaaccacatacctacaaccaactgatcttcaacaaagtagagaagagtaaacactggggaaaggagtccctattcaataaatggtgctaggaaaattggctagctatgtgcagaagaatgaaactggacccctatctcccaccatatacaaaacttaagatggattaaagacttacatgtaagacctgaaactataataatcctagaggaaaacttaggaaaaactcttctggacatttttctaggtaaagaatttatgatgaaaactctaaaagcaaatgcaacaaaaacagacaaatgaaacttaaaagcttctgcacagcaaaagaaataatcaacagagtaaacagagaacctacagaacaggagaaaacatttgcaaattatgcttctgacaaaggactaacatccagtatctacaaggaagtcaaacaacaagaggggaaaaaccccattaaaagctgggcaaaggacatgaacagaaatttctcaaaagaagacatacaagcagccagcaagcacgtgaaaaaacattcaacatcgcgaatcttcatgcaaattaaaaccacactggggtaccatctcacaccagtcagaatggctactattaaaaagtcaaaaaacaacagatgttggtgtggatgtggagaaaagggaacgcttatacattgttggagggtatgtaaattagttcaacttttatggaaaacaggatggccatttctctaagaactaaaaatagaactactgtttgacccaccaatcccactactgggtatctaccaaaaggaaaagaaatcattacattaaaaagacacctgtactcatgtgttcatcgcagcactattcacaatagcaaagtcatggaaccaatgtaagtgtccatcaacaattgactaaataaagaatatgtggtgtgtcatgcaccatgaaatacaatgcagccattaaaaaaagaatggaattgtgtcctttgcaacaacatggatagagctggaggtcattgtcctaagtaaattaagaaacagccaaataccatatattctcacttgtaaatgggagctaaacagtgagtacacatggacataaagatggaaagaataatagacactggagactccaaaagtgggaagggtgagaggggagtgagagttgaaaaattacctatccagttcaatgttcactatttggttaatgggtacactagaaaccaagtccccaccagtacacagtatacccatgtaacaacaagcacatgtaaaccctaaacctaaaagaaaataaagacaaataaaaaacgcttaactgttttcattgttttgtttgaagtgttacgaattccctgaccatcctgcatacacagtcaaatggaaataccaaaacaaagttccatacaagtttttaatggcataaaaaataggagttgactgtatcaattaatattcattctaaaatttctggacctagttcttctgttattcttagttttgcttaacatttagcttaggaatcggaagacttcaatagaagctcttttttgcctgatttgttttatattaaaataattaattattattatttttttgagatggagtcttgctctgctgcccaggctggagtgcagtggcccgatcttggctcactgcaagctctgccttctgggttcacgccattctcctgcctcagcctcccgagtagctgggactacaggcgcccaccactacgccctgctaatttttttgtatttttagtagagacggggtttcaccatgttagccaggatggtctcgatctcctgacctcgtgatcagcccgctttggcctcccaaagtacaagcgtgagccactgcgcccagcctaaaataactaattttttttaatagtaaagactaagtctcaaaccttaaagccctttgaacaaatgggttcagaataggacttccaaatagaaattacttcatttttgaaatctatagcaaaatgtcatttaaaattaagttgtattttcaggtaatagagatttctggtgtgttcctattatcaggaaaaaaaacccacagctatttttccctttaaatgttctcagtgtaaactaagaaaatatgtgcaaaaatactatttttttccaattaaggtagtctttctcatctaatttagggctctaaaaaactataagattgtctcagcatatcaaatctgggactaattttttttttcgtttgctgaaaattgttgatttgctcttgttaaaggaagaaatggttctttcagttcaaaaattggcagaatcaagctaatcccttaaagtatgcttgtgctttggctgattgtatgtctgtggtgattacccttgattaacaacagcaaaaaattctaccttcccaatcatctgttagactttagtctgccttccttcctctggcatttgccagttaaattggaattatataaatgggagaaagggaatataatgctgctatgatagaatttcttggaacaccaggcaaagaaaagtattgaaagattggtcctgatccccgctttcagatatttgtggtctcctatactaatttatgctgtctatctaagcagtatgatcttattttcctgagccctgtggggtacaggctatttattatacaaagcttggagggaggagtgtggtataaggatacagtggtgacttagtgcattttctttatctacagcaaatggttggatgagaaatgcatctgaatcttaacttctcgaccctgcctcagattagccccctcccatttctctccattcctctcaatttgaatttcatattatctggaggagtctcattcattctataatatgaactacttaatcaaataatcagatcaatacctagctgaggagttgttaaccaatggtataataaatggaaattttgatttggaggaaatttgtatttaacagaggacctgggtttgatgaagtccagctagacaacaggaaaaaatgaagtgagaaggctgagggagatcagaaagagtgctgggaagccatcaagcataaaatggtaggccttgctgtgggcttctaatggtgataatgtagaaacttataaattggggctagtgtttctaggctgatgcagcatttctagtttgtcctggtgtcttctcagctaatctttctctctcccctactgggagaaacaggaggaagaggagattgtgcttatgctcacctgtgtggtgctatgtagtattcataggattttcctattctttggtcttttagaagacacctaggtttgccactcacatttttttttcctgtagtgggggaaaaaaaaaccatattataccagtagtaagaaaatttggaggacttgccaggttctaacactaaccagtttggtgattctgcactgtctgcctggatctctttttgtttttcacctgtaaaatgaaaagcaaatggattatctcttaaagactctttcagtgaatgagcttagatacattgttatatacactttaaactatgtactaaagtttgggttagggatttgtaatggactgaattgtaaccccccaacctctacattcctatgtccaagccctaacccctaatgtgactgtgtttgataaggcctacaagaaattaattaaggtttaatgaagtcatgaagatgggggcctgatccaataggattattgtccttataaaagactgttggagagctcgtgctctccctctccctgcacacactcagaggaaaagctatgtgagtacaaagtggccgtatagcagccttaaagcctagtaaaggaagagagcctttaccaggaactgaactctgccagtaccttaatcttgggctttctagcctccataacagtgaggaaataaatttctgttgtttatgccacctagtgtatagtattttattatggcatccctattacatgatttaaccatgttaggtatgtttttatgaattgaatctgtagtttatatgatttagaaatgaaatgtaaagcttctttttgttgaaataggaagtgaaaggtttttacctggtggtggaaagaagacatcatcatttctgtacttctgcaagctgctagatcctggggaattatggtatttttagctggatgttatgaggaatatagttgtatttttgagctaaattgctgagaaacctgaatacagttgagaaacaatcattatttgatggcagaagaacagaacaagttacagggcttctctcttttcctgtatccccccccccaatataaataaccttgttgagtaccctattctattaattattataattattattgcattggtagagattgatgtaattttgttaatgttgcctcctataaatctcattctaaagaatcttattctaaagaagagcaaattgccagagtctaagacttttttgtaacctctgttttgccttgatatggcaggagagatagggtttaaggtaaaatattattaagtaaatacaccttttttgttgtatcacttaattgtattctgctcctgcaaacatatttctgatttgttctggctcacatcagtagatggggagtgccctgttcagatttacattgcttttcgtacttttgctgattgtatgcaactacatttccctagagctactgttgacctgacagtattggctgctagttggcagggaggattcatcatctagattagatggttacttcctgttcctgtctacagacatgaaaaaatggagtgtttacttttctccaaaggtttctcagaagtaggaaaattactttaaaagctttgtctggttgccttcagataaacattttcattaatatttcatctcattttgagccctcttctagtttgtagtattttttcaatgtatgtaggtggcctcaaaccatatggcaaaagcatttcccaaaacatccaatctttgtcttactatgaactggttttctgtattttttttctcattgagcagctcctctcaacaggctcaaaaccctttttctactttgatctgcctctgattatgctgatgtattaggtcctttttggaactcatacatgttttaatagcacatttaaaaatgaaattgcctattccttccctctgtgttgcgtgaagaaaaaaatttgttcctatttttagataatatgtgttgaatgttctcgtagtcattgccctgtacaacgtggttatcacacacaagatacaatgtcttgtgctcagggatgtttattacgtttctgtctactttaaaatgcttaacttcccggattcttatccccattaaatgttgcttttaggtattttagttgtttttaattccatacacgtgtactttataaaatatgttggatgagcatttgtaatgagaaattagagtcccagatttttaatgaatagttttgttctgtctactaaaagtctgacttcttccatcttcaggcatctgtcctaaacacagtgaggttgtggagtagcactccctcccatctttgacacagatacttccccgcaatcccaactcccaaagtggatgttgcctggggtaggtaaggatcagggagagtatagatcattctgtatctgctctacgtcttatgaaggctcttgagaacacatagtccacagtgcttcaaattcaaagaaatgttaaatctgaaagagcccatagcaagttatcaagactatcagactacttcctgtttcctgaatgtgctgtgcacttttacatgtccatgcccttgcttgttttggagcatctttgctcctcaggctgccttgtaaaatgcagcttgtcctccagcaacttaagctctgaattaatcattctgtcatcagtgatagcatggcattataagaaactattaatatataatttctcccatcttatgtttgagtgccctacaacgtatttcatagtatagtgtttagtttgtgttatttttctactttaagttttaaatgtttacttgagcagatagggttatattatagtaagaatggtgtatgtatatatttcctgggataaataagaaagtagaaggtaaaacacttaaatgactttcatttctagcgtttttgataggaaatgaattcactcacacttttaggtttctcatggaagtcattgaggaagagaatatacaacgtagttctgccttattcagaaaccatcatggtattttaaaaacatgctattatctatattacattgtgattcacttcattctgaagctgccaaaagacctgtcttacatagagatactttggatagccattgttacgggagaggattgatacatttctgtatttctgatttcttaatttatgatcatatgctacttctgtgatcaaaaaataaagtttttttttttttaaaaaaaaagaagagacaggatggcgatcattaaaaagtcaggaaacaacagctcctggagaggatgtggagaaataggaacgcttttacattgttgggagtgtaaattagttcaaccattgtggaagacagtgtggcgattccttaaggatctagaactagaaataccatttgacccagcaatcccattactgggtatatgccgaaaagattataaatcattctactataaagagacatgcacacatatgtttattgcagcactattcacaatagcaaagacttcagaccaacccaaatgtccatcaatgatagactggataaagaaaatatggcacatatacaccatggaatactatgcagccataaaaaggatgagttcatgtcctttgcagggacatggatgaagctggaaaccatcattcttagcaaactaacacaagaacagaaaatcaaacaccacatgttctcactcataaatgggagttgaacaatgagaacatgtggacacagggaggggaacatcacacaccagggcctgtcggggagttgggggctaggggagagatagcattaggataaatacctaatgtaggtgatggattgatgggtgcagcaaaccaccatggcccctgtatacctaatgtaacaaaactgtgcgttctgcacatgtaccccagaacttaaagtataatttaaaaaaaaaaaaagagacaggctgggcacggtgtctcacgtctgtgatcccagcactttgggaggctcaggcgggcagatcacgaggtcaggagtttgagaccagcctgaccaacatggtgaaaccccgtctctactaaaaatacaaaaattagccaggcatggtggtgcatacctgtaatcccagctacttaggaggctgaggcaggagaattgcttgaacccaggtgacggaggtcgcagtgagctgagatcgcaccactgcactcagcctggcaacagagcaagactccatctcaaaacaaaataaaacaaaaaaatggttgctgatattgactatgccagattagaaactgaaaaatgaagaggtgaatttcatccttaaagataaggtttaaattttaagatactggtatttatatgagtaatgaaagaattggtgagaaagtaatcccatctaattcttgtcttcctgatcagtggttagtcaagaacaattggagaaaaattcccaaatggagcattagaatcttggctcaagttataacaggtttattgcatatgatatagaaagcaaaaaaaaaaaaaaactggcttttaccttttgtttgttattttaatacctttagtgtaggtcatccttcacttgaatgctaatgttgacagtaacttgaccttacacttaagtcatctttttgaatgccactggacatttggctcttggaagatggtaactcttagtacttctccctggtttgtatatattacttatttgggaacctatctgccattgtggctgtcagagctcagcataatttaaatgtttaaggagggtgattgaagtacttgaatgagatatcttttcatctatctgctgatgactcactaaagagtattttgaagaaaggatgttctccaactcaccagtgtattagaggaaaaaaacatatggtatatccccttaaaatttaagtttttagaaagcagaaatgcattattccagtattactgtgaatacttatattaccatagaccatccccattgtaaggtacttatctttttataaaatgtcctaaaatgggtaaattatttcataaaaactggcatacaaagttgctctaattagaacgtaattgtttttagacttaaccattaattgaggctgtcagtagtttgcagcagaatccaagcatctactgtattaaacttcatctaaaaccacgttattcttgatgatattttgttataattgatactttgttctttgatgcttgagagattgtatttgcaggtaatacttttatctaaaaattaagatgaattttctggtttcagagtattattttgttaatgtctgctgttgcccttcacctctctgaaccctactgatttttctagatcaagctaaagaatgtcaagcttgatgaagttttcttctatctcaatagcttaaattatggcatttggacatggtttatagtatctatttcctttttccttgtattagttagctgtgtaatagttatgcctgcctcttatactggctcctagagagcaatgactgtgttttaggcatccttgtagcacctttcacagtacatatcccctatattttcaggaagtatttatgaaaaccattggtttttatcccggattttccaaattagacttacaaataagtcagtaatttgaggtttaaatgagtaattacacagttagccataatggttaaggctctatagttaagattgcccaggtttgagtgcctgcttcattatgtatcaactgtgagactccctcatctgtaaataggaatgttagtatcagcctcctagaattgttgatgaagactaacataattagtttgtttaaaacatttattgagatagcaaacatataggatacactcaatataatgtagtagtagtataatataacttttgctaaatgtagtcctattgggctggcctgtgagccccttgaaggcctgtcttttggtctttatatctcaggcacctaacctagcagacagtcaatactcaataaatacttgcttgaattgaattgatttatttaccctatttttatcttccattacagcccactgtttgtaacatggaagattggtcgagacaaaagattacgtggatgcataggtactttttctgccatgaatttgcattcaggactcagggagtacacacttaccaggtgaagaccaatttttgttacctctgcttttacattaaaaaaaaaaacttatgaaacttgaatctgatactttaactccttttactgaattgtcaacgttcttgtcttccttcatgtcaggtttttcctttgtctttaaccatttaccttttctctggtaaaatgttattgatatatattaccataatataaaatactgtgattaatgtattctgccatcgatgttttgaagtgttttttttttcttccagtggccagcttattttgtataacttgaaaaccaatgaccaaatgtccacgggttaccaaaatatgtgatttctatagtaacagtcattatttcttccctcttgtgttttttaaaaatagttgttgtctctttcatcttacacattttgttacacttttaaggacttttgaaattgaaaggagagcctaggaagaaagtgatgccacagcctagcagtataatcattcacattcacacttcacccagaattaattgtagcttgcttattttcttttatctaataaaaggacaaagtaattcctcattacagttgtttaaaactttgttcttaatttctgaattcacaaaaagctatctagcacacaatgtgaattttttggttcaagtttagatttcaagcaaattgtgacccaaaattatttcaaaagaagaaaattccttaaataataagctattagtaaaggaatttcctgtttttgttcacattttagggtgattatctgatacagtttctatagttgtaatatgcacagtgtctgtccaacaagaaattgctccctgctgactattggtacttggggcatgtttctcaacctccataggtaaaatagtaattacagtattttgttctatatacttaatagaggtgttaggagaatgaagtaataatcactattttacttcaggattaatgtggaacattattttactgtagaactgcataaatgcaggctcatagcaccagttaataaaatactgtaactgagtttggtattctcatatttgaaggtatgcagtagctcacagctgcagggttttctcagcttacagtgaagcccagaaaaaaaaccaatggcttgggggatcatattcattttttagcttttcacaggtataagaaactgggtgtttggatttgattaaataacatacaggctgtaagggttgaaacacatattctggaaataaattcaacttgttaaagataatataagtactagtctaggcatgttagattttttttttctgacataaaatacaatgggctcatttttgggacttcagcaaattctgccaatggctacctttttgggacaggtacatattaaattacacatttaatactaatcaatggcaatttattgtacatttcccaaaataagttgttatgaggaacactggttcctttgcgctacctgaagaaaagaattctgtgaccaaataagtttgggaaacactggttaaaaaatgtaaacaactctgctcactgtaggacttctcagaaccttttatgttaatagtgttatgtatatctaagagagagaaatagaatgtagcattttccaggcttatttgactacaggacccttttatcctcccaccccaaagtctgagtgttccaaggaaaacatttttggaaacacaagtctgttttcaaaacagaatattactttatatttgggtagtaagagttggtattatagaaaccctttgtgctttctagtgaaattgtagcagaaatcccattatcaaacattatataccttagaaatctttcgtagtggtcattgtggtagcaattgggttttgtttaaagaaaaaaataaattcttttgccaatgttggcaaggggtgaaaacatccaacttttctggacttgtccatttatatcctagggtaatgaccagaagaattacagtataattttctgacaataatgtgattctgaatgaattgttcaaatacttgaagttggaaatttgcctacatttgtataccttgttaccctcattgcaatctatagctcttcctgtttacttttcatcttttttctcatgtttctatacagcttcctcaaattgtatatatcacattaaagaggcgtgtgtgtgtgcgtgtgtatacatatgtttgtgtgtgtatacacacatgcacatacctggttttacttctcatttttgtttggcttaatttcttttgtataacaagatattaacaatcatactatttggaaaagatgaacaaaagaaaacaagtcttacaaaatacaattaatcttttttcctggattcattttagcatcaaaagttgtaaggagtcatttttaaaagttggaatataatatttttctgttcagtagtgtgcttatcatttttacgtattatgttattatgattatttttgttaatggctgccatttattaagaatttactatgtcagacattgttgaggagctttacatgcatagtccttgtaataacccttaggtactaatatctacattttcaaaatgaggaaactgagaattaggtaatttaaataatttacccactcacacatctattaagtgatagaaccaggattcaaacccagagcatgtgtctacaaaatccatcccctaaccgaggcaaaattttctgattatttatgttttgcagctttgtcatgaaaataatgaacttgaaagcaagttactataaattttataaatcatagatcagtaatccttcaaaaattctagttaggagttaagactgaaattttgcaacaggaaaatccatagatattattatggaaagtatacaactcagagttgtatagagcagacagaagaaaattgacttgaactaatattgtattaaggataaagcttattacaaaacaatactactgtaggataggaaattgtattctttggctacatggactagactttaagaatacaattttttttgaacataaaaattggtgattcttggcttctggtcatcccaccttaaaaacccataactcacaaaatgaataaatagaattaaatgaacttaggggataggggcataaaggagggagaaagcaaaacaaaaaacaaaataaaacaaaacaaaaaataagcagtgaaattaaaggcattctaggtataggcatctttttaaaaattcaaatatccggttcatctgtgattagatagactattgtttgattttcagaatgttactcaattatatctcttctttttttttattgtggggaaatatatgtaacataaaatttaccattttaaccatttttaaatgtatagtcctgtggccttaagcgcaatcatgttgttgtacagtcatcaccaccatccatctccagaacgtttttcatcttccccaactgaaactctacccattaaacatgaactccacattcttcctcctccaggccctggcaaccaccattctactttgcgttgctatgaatttgactactctaggtacctcgtatcagtggaatcatatgatatttgtcattttgtgactagcttatttcacttagcataatgtcttcaaggttcatccatgtggtagcgtgtgtcaatttaccttctttttaaggcagaatatattccattgtatgtatataccacattctgtttatcctttcatccattggtggacgtttgggtgggtggcttctaccttttggctgttgtgaataatgctgcgatgaacataggtgcacaaaatatctgtttgagtaccctttttcctcttaaaagtgaaccagtttatagaagacaatgatctagcttgtgtgtagtcccttaactctaaaacctttcttaaaaatatgaccagatattttttaaaatgaaatgcctatcctgaattaagtttttatttataaataaaattataaacttttaattttaataaaattatttaaacttttagaattaaagtacttgtcatagtcaagttgtatgttcaaatatgaccgggtattttttaaatgaaatgcctatcctgaattaagttttttaaatatatatataaacataatcttttaaatgtaaagtacttgtcaaagtcaagtcatatgttctcctaattgaaattttgattttagattgaaataaaatcttataaagaggctgaggatttcttctcaattgtgaaaatacatagtatttgtgtaggtaatgaaaagtttatgagaagtacatggaactattataaatagactattctttgtctgaccttgaaggatctgggtaaaagcaggaaagattatagaaaatacgaagcaggatggagagctcagaattattgataaaagtctatccatagaatttggtgataaagtccacaaattaccctatttatcattgctcaagacttcaaagtagaaatattctttgtccgagctgaaggagataatttccagtattgtgtttatggcttttatatattagaaagcagaggcagattcatttccccaattttagtacttagaaaacatacttttatagagaggaaaattaccactaatatagatgaatataaacatctcagtcaaaaaagattcctggccgggcgcggtggctcacgcctgtaatcccagtaatcccaggccagcggatcacgaggtcaggagatcgagaccatcctggctaacacggtgaaactccgtctctactaaaaatacaaaaaattagccgggcgtggtggcgggtgcctgtagtcccagctactcgggaggctgaggcaggagaatggcatgaacccgggaggcagagcttgcagtgagccaagattgcgccactgcactccagcctgggtgacagagcgagactccatctcttaaaaaaaaaaaaaaaagaaaaagaaagtttccttaaaattttggctaataaatttcccagcaaaatgcagatctatttctttatgtaaattcaagttggcagtaatttttctagaacacattaagtaattaatagatgtattcttattcagcaaaacaggattgtggtctgtcaccacacttaaaagactatctttttttctcctttgttgtacttagacctctcggcagtgaaataattatgcaggtgctggcagttctagaacttgattgtgaactatgccacttttgttgaactacttaattctaagaaattagcaatgaaagtttagccctttctagggaacagtatgaccacataaaaggtgatgtgctgtgttttgttttggagttttattttgttctgtgtgggttagtggggttgtgtgtcaggggagtttgaggggggattgattgcttgcatggtacaaatattcactttccattagattttttgagatactgaaaatagctaacaaacctactttattactttcaaaggtcctagctagattgggtacttatgggattcattgtaaactgaatttgcttttatattttggtgttgtaatctggcatttttctaaagcagtatgagtttaaagccattataagcagcataatattttccctgtcatagtagaccatcgtgtgatcatttttattcttgattatttgggtaaccactctaggctcattgtgaacacttagattaaacaagttcctcctccctctcatttaatattagtctttatggtagcatcacccagattgatttttcttatgaaaagaaaagctgtatgaatcacctctgactgtacattattgttatggaagctcattctggagatgttaaggccaaacaatttttggcaagtggttgtggcaagacttctggctaaagtatgcattttggggaaataaattagatgtatcacaaacaatgcaaaattaattagtttaatttacaacctacattttttgcctttttataaaagagatgatggcctgagtcctaaaacttatacctaatttgatagtttcagtttattaattacaaaatgagaaacatttgtcagattttataggcacttaatttaaggtacagtttggaacctaggttgttgtacgctctttactcaaaattatccacatgaagcatggtgaactatctgctcaaactggaatcctcattttagccatgaggttaatgcactccttcgttatcccaaggttgtgctaatgtgcagagatgtagccacaaaattcccagcagaatgtggaaactaagcagcaggaaccatttgcagaatgggtaatggctcctgaattgtagagaattgtctgaattcatatagcacctactgccacagaaattaagtgtagtgagtatatcagattctaattccttatcacatcatttagatctttagagtttccagttggaatctccctgctgctttgattaagagccacaggcaaaatgcctggggcagaaaaggccatctgtgaaaaggtagtgttgagagaagctgaaaatgggctttttcagcaccagggctcttggttcttaagtttgatagggagagagtgaactataagaaatttaccctatttttacatctatctgtaaagtttaatacctctctggtccttcgaggctgtttccccttttaatcatgtttaaacagttcatcctgcaaatcttgtcttaattttgccttaggagtttatgatatattaggagagataagaagttatcgaaataattgtagtcctaggtagaaagcagtttttctcaagaagcagaggacgtgatactggatgattactactctatatctgttataaaagctaaaatgtatttaaaggtatctataaattattttatttggttcatccctagttcactttttataaaagcaaaacagtatgtaccactttctggcttgtttttatcctacatggtccaaaaaggtcaaaattatagggatgcgtgtaaatcattattatcaaagcaaccatatacaaggtgttgggtatttatattttaagaaatttgtaatacatattttaaaggggaaaatgatcttgtcatagaagaaaaagcctttgaaatagaggactcttaagagtgtgcatgcacatgcacacatacacagggagtttaccaaacattagctagaaccaagttggattatagctctgatgcttggcaaatgaagaaaattaaaagttatagtttagatttcactttcctcttgtcttgttaaagtgaattcatattttgttttagtacagtaaactgatatctgtctcctttcctgagagtcattgtctgcgatagtcttcattttttcagatgaatgactgaaatggtaaagctaagttagaacacaaatattgtatgaaattattacattggatgtggcctaaaattatactatagacattaaaaatatatttcttttgtctgaatatttacataataaatgttgggcttacttataagtgtctaaagtatttgagtcattaggacctgaatgaacaggaggacagatttgtatcttagtgttctggaagaataagatggttatgctttgatgtaactaaaggtgattatcatgcaaatcctatgcttttaccacttttaaggggacaatgttaggaatttgagtactttaaaataattgaaagttgaggttttggtgtagcaattgaatattaaaattttagttatgatcttatgagcatgagaaatactttttaaaagtagaaggcaaaagaaatgaagcccttctctgtgatctttccccttctctcaaacttcaaactgccttaaatgtggttatccaaagtagtagtccttggaaaaaacttacttttcatcattgataacaatttgttgatctttaaatgctaaacacttattgcatcgtaagtcctttatcttgcatcataaatatatttttcttagaaacaactctagtttttcttacattctctctcaatttttaaataaagagcaaactttcaacataaaagtcctgtcctaaagaactacattatctgatctacttcttgttaacaaaagaaataaatatatctatatttatataacaaaatagacatggacaaattgtaacatttaaaaaattttctattggaatagaatatcatagatgctaggaaattctaaagatggaaaacaatatagtcatgtaccgcataatgacgttttggtcaacagtggactgcatatacaacagtggtcccataagattataatactttaattttactctatcatttctatgtttagatgcacaaatacttaacgattgtgttacagttgcctacattatgcagtatagtaacatgctgtacagctttgtagcctaggagcaataggctatatcatatagcctaggtacgttgtagactataccatctatgtttgtgtaaatacactctatgacgttcacacaacaatgaaattgtttaatgatgcatttctcagaatgaatccccaccattaagcaatacctgactgtatttaatacattcttttgagaatgaagctctaattattgttaatatcaaatatgcagtgtacttttcagtatatttaaaatctgaaagtgaagaaaatacatttggattcataaggtacagatttacacttggtgtgatgttcagaaaactcatttttgttaattttacttcagctcaaaaaattatcctgtaaatctacatatggaaactatagacttattcagattagattagcatgttattgtctccatttttaacactctgttttttttatttctacatggaaatgctaacttttgtatccttcctagtagtgaaagagaaagttagaaaaggccataaaataaattcttcagaagctttaattaaagggattgcccagaactcaacttcttgttgctatacccaactaccttcaggactactttgtatgttctacaaagctgatttaaaaggttccaactgcagtcacttcactgaggatggcaggaaagagaatctcttaagttctgcaggctgcttttaacctaaaccattcttctaagatgaccattacttgcctcctagctaagcctggagaagtattttaagcctttgaaatgagtggagctgtgttgcatatgaagaacagtaaacaactgtacactgctggttagacttgtactgctaatgagatcatgggttcaatccctatttggaccatatttttagacaatagctaccactagatcccaggcgttgattacagtggggctcagacagagcacgtgggcgaatcagtaccaaacccaagttttagcatcatttcagcatatgaaacgtgctacattaaaagtacccaaaacaatgtggtcttaaaatgtgatatacacaaaccctttgaaagtagcaagacagacatgccctttttctaaaattgacaaatcccgaagaggaagaaaagagttgggacaataaaacactggttctggaatctggaatgttgctttaagtccaggccagcagtgacaaaagttattgtaatgacctctgaacagacagacactgccattgagcaggcctctggtatagaaaacatggtacatttgggagttgtgaatatagctccaggtgtgctcctaaatcagttcacagtagattatgcttaacaacattgagatgttattggaggtgtggatgaggaagtttgttgttgcagtccttttttgcaccttattttaaagaataaatgaaacatttttctaattcccttttaaaaaattttaaatggaagggaagtttacttctgatgcttcagtgttgtaagttcaacatatagactgtcaacctaaattcatggtataacacagttcttttcttttttctttctttttttttgtatctgttcaatgaaaataaggtacaacccaggtttttacatagtctgactagaagtattccacttcaagatctgagagtagcattttctcaaactttcaccttaaaaaacaacatcactaaacaaaaactatcacacagaatggataagaagttttgtagatctttttggtgatgaactatgacatgagccttatagattgtaaaatatagttgaaactaatgtacataatgaaaatttttaaattttatttgctgttaaattctgtgaaatttcagttatttaaaataaacatgcaaaaatatgaaatgtaatgtttcagattgcaaggtaatatgtaatatgtttgtaagatactctggtctaatactaactagtagtatttggatttgtacagtcataattcattaaaatgacttcattttaacatgtaccgatgtagactaatattgtaagttctgatttaaagaatggtgacaaaatggcgcatgtaatacttttgcaagtgttggggaggtcggtatgttttgaaaagagtaatttaacttttgggtgctaggaaatgggttatctcaaagaccattgctggcaatgggcaggcctggtaatactggcacagagcattaatcatacaccttattaacggtgaggtgaataactttgaaataaagttttagggaagaaaagagactacccaaaacttagctatctcatgaacagttgatactaattataataataattgctttgaatctaaaagaaaaaagaatatttttagatgttaatttttcttcacaaactctttgaagagtgtcaatgtgacattagagaaaaggtctttggagtggcagtagaactgacaacacaggttggacttcagcaggcctgaaaatggtatggccaaaaggggagatttctttctgcctctaataaagagtagtggctaggaataggagtcatctcagatgatactggatttcagctgaagcaactcttaaatatttcagtggtaaaaggatgactatgttaaattcatgggtttgtaaatacatgttataaaatgtaattgttctttttaaaagcacatatttttttaaaagcctacattttaaagttgtcatctattgtgtattgagatgttcctgtgcctcacagatcagctcactaaggtgtggtagctattgtctaaaaatatgtaccctctcatactgttgcagcttcctcttcataggctttattattgcccagagcagcacatttaccccattagccaaaatggcacaaacaacgcccattggcatgactgaactctccttagttggtgtcaatccttatatctgagataagaagctttcctgtgtctacctttctcacctagagtaaaagccaaagtatttaaaaaacatatatttcactcagagtaaagttaatgttctgcaatgaatgccaccatgctcagcttgcccctctcacctcatctcctactcccctcttcccacctccattcattctcttggccttagctaggctggtttccttgtttccctttgaacacaccaagcatggtccccgccaggggctttgcacttgaattttctttacttgcaacagtcttctactagatagacatgtagcttggcttcctcacgcccttcaggtctctattcaaatgatgccattatcattgacacgtatgtaaaatagcaaggcctacatttgatatctggctctccctgcccgtttaccctgcttcatttttctccgtagcacttatcaccacctggcatactgtaaatttacttgtatatttgtgagtctttcttaatgcgaatgtaaattccatgagggcaaggactgctgtaatattcctcaaagcctacaacagtacgtggtacatagtaggcattcagaaaatattagttgaataaataaaagtcttgtttttatcagcatttagaaattgtggattataaagtataattctttgtcttactactttacctagatgtgaaattatttggtcttattgtggctagtttcttatagttttcattgagtgcatattgaatgtattttttgtgtgtgtgagtggtttgacattaaaattctcttttaaaactcattttatcatgaacacttttaaatactcgcaaaaatagactattataatgatgcagtcatttttataatagtgattttttttctcttttctttttgtggggaacagcgtctcactatgttacccaggctagtcatgaactcctgggctcaaacaatcctccagcctctgcttccctaagtgttgggattacaggtgtgagccaccatacctggctgctttttcattttacttatttttattttaatacttgctttttaagtacagaggcagtatgaggttgtagaaagaggtagccatatctgggttctagttgtgaatccctcaattcttagctttgtgacccaagggaagctactgaatttctgccatgtcttggttttctcatctgtaaaatgggtataattctaaactggtaagtttgttgtgaggattaggatatatatgtatatgaagtatcttatacatactaggtacgtagtaaatatttatattgtagtacatgcatagtaaatatttatatttctgcttcaggaagaaattaagtagtgagaatggccaagaaatgaaattttaaatatatttatagcaatttcagtttttctttttctcttggacacatgtaggtaggcaggaattttcataatatgagaagaaacaagcattatcagtaaataaaccagtgaccccataatcagtcaccatcacatttctgtttatgtaattctttaaaaaatacacacatacatgtaactgatcattgagcaaaacgctatcagtctatatttcctgttggttctgccccacagatatctcttgaatccaccccatcctcttcagcctcactgccactgcctttgtctgggttcttattctggctcactggtttccctgcttccctttgaagccattgtacaccaatcaccagaattatctttgttgacaaaaatctatctcactctccttaaaacagtgcctgttattccttatcaccagagaggaaaacccatttttattaagaagcatagtacttgaggacctaacctcacactccagccatgcacacaattattcaccacttcccaaatatattctttcatgtctctctggcttcacatttttttctttgcctctccccatttccacccagtcaactcctacttatccttcaagactcagcttgctcattgcttcctctgtgagatttccttgacagtccccaggaaaattggtcagtctcttttaggcctctattataacacttaacacactggattataattattaattttatgtttgtctctcccttttgaaattgcgctccacagtagtttaccaagcaacatcaaagcaaactaacaaaaaccagtctcattgctttgtagcaactttgcttgatcctgataaccattctactctctttcttttctgtttgcatatgttagcttatatctgtcacctcttcttgctgccagcatacttgagccagtaagagttaccagtgttgattgatagtgcaaagggtggcttaaggccacttggaattagactgagccagaggacagggatctttatacagaacactttagaaaacaaattgacatgaggttgatctcattataagtgactgaagatgcactatgtgaattgattcctgccatggaaccatagacctagaagagattcttttaagtcatctagtccaacccctatcagatactttaatctctcttaaaaatctcctgagtaatgggcatctagcttctatctgaacatctctgtagacttggaagtcacttccagttaagtagcccatttcatttcaaacacctctgaactctactcccataacttcagttaccacatagttttagtcgaagtgctagaagtcaaagattgcctgcaattagcactttattctttatagaaagctgcattaaccagcagtggttaaacttaaccctccgagtaatatctgaattatctgagtctttaggagtttaggagtagtaagataacacagctttacaattgagtctcatccacccacccatacaaattttaactcttcccttattgttgaaacctttgaagctactgctgccacaatatctctcacagtctaccttagacttctggagttggctgaaccctagagcccagagattccaagatagacctggtgctagatcttttagtgatcccaacaatgtcacagagttggaactagagttagaacacaggtctcctgacattgccttggactatcattacaaattccagaatagaaagtacccatattatatgtgacttgatgcttaaaaaatgaaaaagtacccataaaagtatatgaatttgttaattttagttaagaagcatacaatttcaaggaaccctgtaatgaaatgatcattttgtaatgtaaagatttattcttgagttatctgccttgtgtcaagtttaggcatacttccataaaatgaacaatacccttagaactattcaactgcaggagtaacaatatcagagttagagaatctcaaagcaaaaccttagatttcccctttcctttcctttccctttccgtttccctctcccctttcccctttcctttcctttctttccgagtctcgctctgtcaccaggctggagtgcagtggcatgatctcagctcactgcaacctctgcctcccaggttcaagcgattcttccgcctcagcctcccaagtagctgggactgcaggcatgcgccaccatgcccagctaatttttgtattttcagtggagacggggtttcacaatgttggccaggatagtctcgatctcttgacctcgtgatctgcccaccttggcctcccaaagtgctgggattacaggtgtgagccaccgcacccagccagatttcccttttctttaaacatatctctgcttgttatgtgtcccaatcatacttgtaacttctgttttgtgtgtgtgtgctggaactctcgtaggtattttatataagttacctcatctaatatttccaacaaccttatgaaggtgaaagtatttcacttatattgcagttagggaaaacaaggtcttagatggttaagtaatttgctgaatgacagctaataataacctgattctatctaattccaaagcctgtgctcccaaccactgtgcgatactgcttccttccagtaatatcactcccccttccctggtgaaagcttcttatggacatttgtttcactgactcaacaggtattccctggtgtccacttacagaaaaaaaaaaaatcactgaataacctttctcttcatttgggaactcagtttcttaactcagttttccaaaatctcccttatacccctagtccattaattccagtctcaacttctcttgggttctctttccttttagaatcttgaggcactgtctcccttaatatgacttttttcttcacagctatcctcccagttcagtttggtattctgaacttccatagtcccatcagaatttaccaccttctcagggatacatactccccaaactgatttctttctacatttgatcttagccaaaaggccaagaagtgattgatctctttctgtacaacatttgcacttaatatcagtacatttacatggaatactagtttagcccttagattctagccagacacaactctctgaaatccactgctgactagagagcctcgggggaaggattcaccataaaggaactgtgaataaaagtcctgactcagctattctcttcaactggccaaaaggtagacatttaggagttaagaagtgagacagttccttagaaattataattaaggaaacaaattccaagtttctaagtaattaagaccaaatatattgtcttagttttaatttttgcaatttgaagttccttaggagcagtttttgatagaacaaatgatcataaaacagttagataagtggcagacaaatatatccgtgactggtatcaggaaggaattgaaagtatgtagtcgtggactgtgtccatcttattgaacttagatttcttacaatagtaaggtttaaaaaaacaataaaattctccagattgtatttttttcttttcttttcttttcttttctttttttttgagacaggatctcgctctgtcacccaagatggagtacagtagtgcaatcacagctcattgcagcctcaacctcccaggctcaaggaattctctcacctcagccacccatgtggctggtactacaggtgcataccactatacccagcaaaatttttataatttttgtagagacagggtttcgccatgttgcccaggctggtctcaaactctaggctcaagtgatctgcccacctcagcctcaaaaagtgctgggatttcaggtgtgagccaccacggccagcctcagattgtgtctttttcttaccacagctgggatttgaggatctcagtatttaaaaggcaaagaagatttttagaatgtgctttctgtagtatacaagtattttatgatgcattcttttaaaattctgtggcaaacaatagtgaaaactttagaatcataggcatcattcattatcttctattttgctcctgaaccatttaaaaacttttctttgtctgaaacaagtattattggaaacctgttatcaggataggtatttttaaatttgacagtgaaaatatctttcaaacttgttttcatatactgcctgttaataataatgaaattaatgaattaatagccaggttggttgggacattgtccatgtcacacgtgtttctttctttcgtttttgtttgtttttttttttttgagacagggtttcactcctgttgcctaggctggagtgcagtggtgccctctgggcgcactgcaacctgtgcctccagggctcgagtgattctcctacctcagccacccaagtagctgggattacaggtgcaagccaccatgcctggctaatttttgtattttttgtagagacggggtttcaccatgttgtccaggctggtcttcaactcctgggttcaagtgatctgcccacctcggcctcccaacgtgttgggattacaggtgtaagccaccacacatggccaatttttgtattttttgtagagacggggtttcaccatgttgcccaaggtggtctcaatcacctaggctcaagctatccacctggcttggcctcctaaagtgctgggattacaggagtgagctatcatgcgcagtgctgggattacaggagtgagctatcatgcgcagcccatgtcacgtgtttcctaataggttttcaaagaattttgccacagtaagaagtttttatttcacatattcaagtcccacatacctgatcatggcaaaatggcaaattaatgatgtagttgaagagaaaccagcaaagagctgtagatgctagctcagaaatgagtaacatttttagtctttgggatgtcagtgatggtgcacagtgtatttaagtgtcatttttgtcataagccagagaagcaggaggaaagagtaatgggacatggtaaagcagaaattctgctaagtagctgaatgttagagttgattgctgctattctgtttcttgcctatagtgtagcccattttaagttcaagactaagaaaaccctccaaaaagtttaaaaaattcaaagcaaataaactagtaaatgctcatggctctacacttttacactgcagatttcttctatttcccaaaggactcacccagtgatgtttcctaactccccagagttactgtttcttcccttgtatgttcataacacattactggtatctctgttacagcacttgctttatcttgccttccaatgtagtttcttacatgattgtctttcctacttagattggtagtcccttgaggacctgaactatatttttcacatctttgcatcccctaagtagctatgagggattaggcatagagcaaaataaatgtttgaataggagagtcatttcccctagtatactgaggtatttgtttactagctgggtaagataattaaagaaagtgttaggagccacagcctatgcaaaggaagtgagaaatgaagattaaagcatctctgaaagtataagtcataggaaaataaaattaatttgcaaaggtgatttacttttatttttaggaatggtgagatgtatctgcattttgttttctatttatagttttaaatcaaggaaatttttactcacttgttttataactggatcagttttcatttaataaaggataggaacactcaattcttatgggatatttagatattctaatcacacctattaagttgtgctattataaaaatgaaacagttgaaatacaagtttaagatgtgctcccatggaagaatctatatgtactaattgtacaaatgagatgagaaacagaaatagcctggggaaaagaaatggggatgctatttaacatcctatatattacttctagcagacaattgcaatttacaatcactttataagaagaggtgccatgagggctgcttattaaaattgttttatgaaggacattttattcacagtagcactactgtccatatattatttttaaatccctacgagagagatggtcatttttgtgaagtttcggttgtagttcctggtcctacaaaggtttagtgagtgagtgatggcttgtcagaaatgatctttctgtgatggctgaaaactttgggaggaccaaagtttcaggtgagcaatcctaggtcatagcttcacatcctgccatttattatctagttaattatgcttgattctgcttgatacaaaaataaaatttgcattcaacaaacaaaacagtacctcacctctttttcacaaagaagaagatttgggctagagattgggagattttgtatttagcaaatttttaaaagtccttttgagatgtgtcttctaagggcttttgtttgctatcattaactgtgggaatatttgctcctgaatggatcccaccttatgctgagcccagcttcccttgtcattccccctgcaataaatactatacaataagtgtctatgtaacaaataaacagtttggaggttaaatggaatgctcaatataataaagctccattgcagtagggagaaaagtccttttgatatgcatttgataggaatgtgttaatttcaacaaaacatctggtataaaagagttgtgaatgcaggacatttgagggggttacagaaggagaagggatttactgtgcttaacaattgccagtagtcaggccacttccaagttgtgattttgtcagacttagaaattaagtgggatcacatctactcagcccttcagtgggagaagatccaaatccagctgcagcaaggagcagtgactgattcagaagtagtgagctctatccagtgtctcctagctggttttcattaatatgcttactattgccctctttatattctggctttttaaaaaaatatggcctttgtggtttattggttgaacttgtacagctgaatctactgtaaaaggtcttttttcactggcattatgtcctacagatttgagtgttcttgctgttctatataagataattcaaacttagaatagtcactatagtttcaaagcttgattgaaagatacattcagtgttttctctaaatatgtagcaattataacaacacagctgtagttaaatacataacttattataaatcctgacagtcttccttctcatttatatcaggctgacataaggtttagtcagttcaattccacatttatcgagcacttaactctgaccatggtactgtactaggtactatgcagctacaaagatcaacagtacatgatgtctgtgctcaagagctgagtgatgtcttttgagggaaattggcatgtacacaaaataactgcattagatgtagaaacaatgctactggaagtgggagaaattagctctagttggatagattggggaaggttttactgactagctgacatgtaagccgaacctctatggacatatacgactcaatttcaacattcaaaagtggggatatggagaagatattcattatgcatccagaaaacttcctgagccaaatgtaaggagacagagaaatatatatgagaagagaaatatatacaagcagcccaagttacatccctgactattactattaccctgactcgggctgcttgtattaatatataggatggaatggaaaggatagagattagagaagcagttatgaagctaatcttaaatattccaaatgaaagatggtagaggcctgaattaggttagtaacaggagggatgtaaagaaacatataacagagacaaggtagtaattgaacaagatgagacttgtggaaagtaagctaaagggaagagttgaagatggcttcaaaggttccttcttagatgatggggcagggggaggatgataagatgaaaggtgataggcaacacaagacaagaagcacatttgacacattgtttgttaaagagtcatttttaatgtgaaagtaatttttaattaatcctagattatctttttctgaatttgaatgttgaagattttttaaaattaagaatttattgaaaattgtttgctttcaggatatggtagtgagagtgaaatagagtaatacattattatacattgtatcttattaaatattttatttaaaattaaaataaataaaatagttggaaaagacccttgatatcattattttctcttaggccatgccacaaagcaaagcttagaaaatacagctgaatcctcaaacttctttctaaccaaaaatacattttgtggataagaaatctataaagaaataaatgtttgtaaacattgggcggttgttatggaatttaaatatctgttcttattacctaagaatgtctgggtttcaaggctgaattaaaatagattccaggcatctttaaaggtaaacaacacatctgttgatttgtctagtacaatggaaactgactgaattttgattatgataaaaatcagcatcttccatctatttagcaatacttttgggtaatcttttctcctttggggaattttccagatgtttgggaatatgattccaatttacaagagttgtttttatattgtagctgagtgatgtcctaactatgaaactcttaggttggtgtaactgtatccaaagggtcctctgcaatgtgtgtaggaatgccctgtgacaccttggcttctttgacttgcccagactctcaaagctaggtggctggaaggtttcctggaggcagagtccagttctcattgtagtaatttacattaacaaaggaattaacatttccagctatcttctgggatcactcagttttgagcaacattcatataatgcagtgaaaatgaatagctagtaccacaaaacaatttagatggttcctttggtacagacgttgacttgtattttctgaaaggaagagaagctctgaaattcagtgaaaatgacagggcggttgctattgtacacattattagaaagaaccatttcaaataacaattgtaaacatgtattttaatgctaatatactgtaatagcctagcattgagtagtgaaacaatttcagacaagtgtccaaattgttttatgactacatttatttcttagtatttatttagaaaattagtagtcaatgcttagttttatcccagtatggattataacttgtataatattctatagaaaaatgttacctaactggaataactcagagctgcctccctctgccccagcagttggtttgtgccctatgtttgctgattaccttaaatatttgcccaagtcaagccataatttaaaaagcaaaattctcatttaaagagtcacaagcttagggtgtcaagttgtagatgagtttggacttgtgggccctcttgttcctcctgattaacactgatgatacagagatgacaaatatgattaacccagcatataaagagacataacatcttaaaagagaggagagatttttggtgactttcttggccaatactattttggagattttttttccatacgaaacttactggctagcatttcacttttgttggaacattgacctatgattattttattcagtattcttgcataggcctttgaaaggatacctatcaattttattgtaccaaatgttcttaagaaaacacatttggtagttctgatattttgaaggtttctatagaaacaagaaatcttacagccattttttttatattgttgctctgatttacaattctgtatatgtaaaggaggagtcttatcacctcaaaccaagcaaaatttgtagagcaccgatgatgtgcaagttttgtgtcttacagtaagggaaacctgtacaaatccaggagcttacaatataattagagtagctaggctctctttgtgacaaggtaactaagactcctaggcagtgagccatgcttgcagagggagtggttgtggagagctggaagactgccctgtgctagtgaagtgagagccagtatagatgtgtgaggagtaacaacctccaggaatgcttcctttggacaatgatgctactttgttgggtttgcattagatatttatttcataatgattatatgtttagtacttaacttacaggtttccaaagaattttagctgttgttttggctttttattatgtttgttttttttgtgtgtcggtctataacctcaggggcataagccttttttcccttccccctattttacagctagatgtacccccaaggtatctacattaggtatttctcctaatgctatccctcccctaggcccccaccccccgacaggccctggtgtgtgatgttcccctctctgtgtccatgtgttctcattgttcaactcctacatgtgagtgagaacatgcagtgtttggttttctgttcctgtgttagtttgctgacaatgatggtttccagttttgggcgggtgtatgtgtccaggaatttatccatttcttctagattttctagtttacgtgcgtagaggtgtttatagtattttctgatgttagattgtatttctgtgagataagtggtgatctcccttttataattttttattgtgtctgtttgatccttctctcttttcttctttattagtctggctagcggtctatctactttgttaatcttttcaaaaaaacagctcctgaattcactgatttttttttgaagagtttttcatgtctctatctccttcagttctgctctgatcttagttatttcttatcttctgctagcttttgaatttgtttgctcttgcttctctagttcttttaattgtgatgttggggtgtcaattttagatctttcctgctttctcctgtgggcatttagcgctataaatttccctctaaacactgctttagctgtgtcccaaagattctggtacattgtgtctttgttctcattggtttccaagaacgtatttatttatttccaccttaatttcgttatttacccagtagtcattcaggagcaggttgttcagtttccatgtagttgtatggttttgagtgagtttcttaatcctgagttctaatttgactgcagtgtggttggagagactgtttgttatgatttctgctcttttgcatttgctgaggggtgttttacttccaattatgtggtcaattttagaataagtgctatgtggtgctgagaagaatgtatattctgttgatttggggtggagagttctgtagatgtctattaggttccgttggtccagagctgagctcaagtcctgaatatctctgttaattttctgtcttgttgatccaatattgacagtgaggtgttaaagtctcccactattattgtgtgggagtctaagtctctttgtaggtctctaaggacttgctttatgaatctcggtggtcctgtattgggtgcatatatatttaggatagttagctcttcttgttgcattgatccctttaccattatgtaatgcccttatttgtcttttttttttaatctttgttggtttaaagtctgttttatcagagactaggattgcaaaccctcccccccccgtttttgtttttttttttttgctttccatttgcttggtaaatattcctccatacctttatttgagcccatgtgtgtcttagcatgttagatgtgtctcgtgaatacagcacaccaatgattcttgactctttatccaatttgccagtctgtgtcttttaattggggcatttagcccatttacatttaaggttaatattgttatgtgtgagtttgatcctgtcattatgatgcaagctggttattttgcccgttagttgttgcagtttcttcatagtgtcaatgatctttacaatttggtatgtttttgtggtggctggtaccggtttttcctttccatatttagtgcttccttcaggagctcttgtaaggcaggcctggtggtgacaaaatctctcagcatttgcttgtctataaaggattttatttctcctttgcttatgaagcttagtttggctggatatgaaattctgcattgaaaaatcttttcttttagagtgttgaatgaatattggcccccactctcttctggcttgtggggtttctgccgagagatccactgttagtctgatgggcttccctttgtgggtaacccgacctttctctctggctgcccttaacattttttccttcatttcaaccttggtggatctgatgattatgtgtcttgggattcctcttctcgaggagtatctttgtggtggtctctgtatttcctgaatttgaatgttggcctgtcttgctaggttagggaagttctcctggataatatcctgaagagtgttctgcaacttggttccattctttctgtcactttcaggtacaccaatcaaatcaaaaaatatttggtcttttcatatagtcccatatttcttggaggctttgctcattccttttcattcttttttctctaatcttgtcttcatgctttacttcattaagttgttctttaatctctgatatcctttcttctacttgatgattcggctattgatacttgtgtatgcttcacgaagttctcatgctgtgtttttcagctccatcaggtcatttatgttcttctctaaactggttattctagttagcaattcctctaactttttttcaaggttcttagcttccttgcattgggttagaacatgctcctttatcttggaggagtttgttattacccaccttctgaagcctacttctgtcaatttatcaaattcattctctgttgttttgttcccttgttggcgaggagttgtgatcctttggaggagaagaggcgttctggtttttggaattttcagcctttttgcgctgttttttcctcttctttgtggatttatctagctttggtctttgatattggtgaccttcagatggggttttggtgtggacatcttttttgttgatgttgatgcttttcctttctgtttgttagttttccttttaacagtcaggcccctctgctgcaggtctggtggagtttgctggaggtccactccagaccctgtctgcctgggtatcaccagcagaggctgcagaacagcaaagattgctgcctgttccttcccctggaagcttcatcccagaggggcacccgccagatgccagctggagctctcctgtatgaggtgtctgtcgacccctgctgggaggtgtctcccagtcaggaggcacgggggtcagggacccacttgaggaggcagtctgtcccttagcagagctcgagcactgtgctgggagatccactgctctcttcagagctggcagcaggaacattcaagtctgctgaagctgtgcccacagccacccctttccccaggtgctctgtcccagggagataggatttttatctgaaagtccctgactggggctgctgcctttctttcagagatgccctgcccagagaggaggaatctagagaggcagtctggctacagaggctttgctgagctgcggtggcctccacccagttcgaacttcctggcggctttgtttacactgtgaggggaaaaccgcctactcggcttgagctatatttctgattcagttattagtgactgtaagatttatacttagagatctttgagcatgacaaagactgtaggtgaggatctagcaacaccaacatggaagtaaaagctctcaaattcacaataattgcaggaagcccagtatactcaataaagaatgaatgaaatatttatttaaaaagtagttttgcttgttttagtgacaccgatttgcttgtgttagtgacaacaataactcagaatgggctaatggagtgttaccaagtagaagtcccccagagacctgctttttaacatactacacaaaagatttgtaattatgatgttacagtgcctgtagatggttaattccagaatcctggaaataatttattctctttaagcaagtcctgtatttcccttacaaccttaattataaagttgatttgcttagcagacccttcttttccaaacttgctaaggaaaactttcagtctaggtctgtttgaattagcacaaattttgaaatagtagagttcaaattaatgaggttttattctgttatgaagagcttgttttccatcattgataattatttccaggaaagttaagtctgcagaaagcattctctcagtttccttaatgttgtttaccaaagtttaagaagtggtttttagttacatgaggggagagtgaggacatggcagtggcaaaggaaaatgaggtgctataacctggtctctcagatttgtggagcaggctttgagcagcattctaaaccaatattattccttgtaaaaggcaaaccagaccttggaattttaaagtctaatgtgattgagagaatgtgtgctggtgcatagtaatactttaacccccatcagtcgggtaagttgtaagaacctcttaggtgacaaataccctgacagccccacgaggcatgcaccatttccacccattttccctagagtcagcccttctcccactagataattctcattgcttcagagggttgattttcaacaagtcctccatccccctagactgcttactaacctgaaatcccacagagaacaggaagagtggccactggatttttttggaggatttaaaaaaatttgtgtactaatatctgattttctttaggcccatgttcatctaaagagtccgttatcttatgtttcttttttctatgcctgcccttgatgtcctgtgattcatccagttcataagatgttcctttataagaaggtgagaaaagcataaaaatagactagtaatatgggtccctatgtgtttcaaactgcaataaaatattattattaattgccccatataagaagcaatggagctccttcaggatgcagagtttatgtgtgttttccaggggggtgatagaggctgggagatcaaagcaattctgtaactttatcatggaattatgtttttatctatttatagcagtctatgagttttagatagaaaaatgttgccaaactttgctgtactttgaatgtacagtaatctaaagactaaaaagaacagttaacaccttctaaatgaacagcattaaataaataaaaacaggggaagacacacttcagtggaacagtttaaaaggatattttgaatgtaggggaacactgaccatttaataaagtataaccagtaatgccatttaatatttgttatactgccaataactttattaaatttgaaactaccttcctatattccttcattcattcactaaatatttatttaccagctactgtgtgctaggcactgggtatataatggtgagtaaaaatgagcacagtcaccatactcatagagctaaagttatacctataacatatacatggggataaagagtccaaaagttagtttttaatttggatttctatagggttttgcttagcctggtagatttctagagataggctagtatccatgaactttaagaagtaataagaccttgtgagtttaggtgtcttcctcttttttttttctttttttgttttttatttctggaatgtgacttagtttataagacttgcacttctcattaggtgctttgagtaactcgtataatatggtattgtagtgtagtaaaacttcaatgaaacaaggtgttccacagcattgaaattgaatgtagcatgctcctggatgtatactcgtgcttggcacatagcaggcactcaatacatatttgttgaaatagttcatgttcatagttatgccctcatatcagtaatcattaggactgctacttattcgtgaaaagttttgtcactatggggagcagagctgttatcacatgactgtaatttaaattgcatagattttatccattgcccttttctcttttcttttttttttctagtcctaactgctagaaatattacccctgaaggtatttgttttcttttttttttattatactttaagttctagggtacgtctgcacaacgtgcaggtttgatacataggtatatatgtgccatgttggtttgctgcaccatcaactcatcatttgcattaggtatttctcgtaatgctatccctctgccagcccccaaccccacaacaggccctggtgtgtgatgtcccgcaccctgtgtccaagtgatctcattgttcaattcccatctatgagtaaaaacatgtggtgtttggtttcctgtccttgtgatagtttgctgagaatgatggtttccaacttcatccatgtccctgcaaaggacatgaactcatccctttttatggctgcatagtactccatggtgtatatgtgccacattttcttaatccagtctatcagtgatggacatttaggttggttccaagtctttgctattgtgaatagtgctgcaataaatatacttgtgcatgatttataatcctttgggtatatacccagtaatgggatggctgggtcaaatggtaattctagttctagatccttgaggaatctccacactgtcttccacaatggttgaaccaatttatactcccaccaacagtgtaaaagcattcctatttctccacatcgtctccagcatctgctgtttcctgactttttaatgattgccattctaactggtgtaagatggtatctcattgtggttttgatttgcatttctctgatgaccagtgatgataagcattttttcatgtgtctgttggctgcataaatgtcttcttttgagaagtgtctgttcatatcctttgcccacccttcgacagggtggtttttttcttgttaatttgtttaagttctttgtagattctggatattaattagccctttgtcagatgagtagattgcaaaaattttctcccattctgtaggttgcctgttcacgctgatgccagtttcttttgccatgcagaagctcgttagtttaattagatcccatttgtctattttggcttttgttgccattgcttttgatgttctagtcatgaagtccttgcccatgcctatgtcctgaatggtattgcataggttttcttctagggtttttatggtttcaggtctaacatttaagtctttaatccatcttgaattaatttttgtataaggtgtaaggaagggatccagtttcagctctctacatatggctagccagttttcccagcaccatttattaaatagggaatcctttccctatttcttgtttttgtcaggtttgtcaaagatcagatggttgtagatgtgtggcattatttctgagggctctgttgtgttccattggtctatatctctgttttggtaccagtaccatgctgttttggttactatagccttgcagtatagtttgaagtcaggaagtgtgatgcctccagctttgttcttttggcttaggattgtcttggcaatgcaggctcttttttggttccatatgaactttaaagtagtttttttccagttctgtgaagaaagtcattggtagcttgatggggatggcattgaatctataaattactttgggcagtatggccattttcacgatatcgattctttctatccatgagcatagaatattcttccatttgtttgtgtcctcttttatttcgttgagcagtggtttgtaattctccttgaagaggtccttcacatcccttctaagttggattcctaggtattttattctctttgtagcaattgtgaatgggagttcactcatgatttggctctctgtttgtctgttattggtatataggaatgcttgtgatttttgcacattgattttgtatcctgagactttgctgaagttgcttatcagcttaaggagattttgggctgagacagtggggttttctaaatatacaaccatgtcatctgcaaacagggacaatttgacttcttcttttcctaattgaatacctttatttctttctcttgcctgattgccctagccagaacttccaacactatgttgaataggagtggtgagagagtgcatccttgtcttctgccagttttcaaaggaatgcttccagtttttgcccattcattatgatattggctgtgggtttgtcataaatagctcttactattttgagatacgttccatcaatacctaatttattgagagtttttagcatgaagggttgttgagttttgtcgaaggccttttctgcatcttttgagataatcgtgttttttgtcattggttctgtttatgtaatggattacgtttattgatttgcatatgttgaaccagccttgcatctcagggatgaagccaacttggtcgtggtggataagctttttgatgtgctactggattcggtttgccagtattttattgaggatttttgcattgatgttcatcaaggatattggtctaaaattctcttttttgttgcgtctctgccaggctttggtatccggatgatgttgaccgcataagatgagttagggaggattccctctttttctattgattggcatagtttcagaaggattggtaccagctcctctttgtacgtctggtagaattcagctgtgaattcatctggtcctggactttttttggttggtaagctattaattattgcctcaatttcagagcctgttattggtctattcagacattcaaattcttcctggtttagtcttgggagagtgtgtgtgtccaggaatttatccatttcttctagattttctagttaatttgcatagaggtttttatagtattctctgatagtagtttgtatttctgtgggatcggtggtgatatccccttgatcatttcttcttgcgtctatttgattcttctctctcttcttattagtcttgctagcggtctatcagttttgttgatcttttcacaaaactagctcctggattcattgatttttttgaaggggtttttttgtgtgtctctctctctttcagttctgctctgatcttagttatttcttgccttttgttagcttttgaattggtttgctcttgcttctctagttcttttttttttttttttttttttttttttgagactgagtctggctctgtcacccaggctggagtgcaatggcgcgatctcagctcattgcaagctccgcctcccgggttcacgccattctcctgcctcagcctcccaagtagctgggactacaggcgcccaccaccatgcccggctaattttttgtatttttagtagagatggggtttcaccgtgttagccgggatggtctcgatctcctgaccttgtgatctgcccaccttggcctcccaaagtgctgggattacaggcatgagccacggtgcccagctagttcttttaattgtgatgttagggtgtcgattttagatctttcctgctttctcttgtgggcatttagtgctataaatttccctctacacactgctttaaatgtgtcccagagattccggtacgttgtgtctttgttctcattggtttcaaagaacatttttatttctgccttcatttagttatttacccagtagtcattcaggagcaagttgttcagtttccatgtacttatgtggtattgagtgagtttcttaatcctgagttctagtttgattgcactgtggtctgagagacagtttgttgtgatttctgttcttttacatttgctgaggagtgctttacttccaagtatgtggtcagttttagaataagtgtgatgtagtgctgagaagaatgtatattctgttgatttggggtggagagtcctgtagatgtctcttaggtctgcttgttgcagagtcaaattcaggtcctgggtatccttgttaaccttctgtctcgttgatctgtcaaatattgacaatggggtgttaaagtctcccattattattgtgtgggagtctaagtttctctgtgggtctctaaggacttcatttatgaatctgggtgctcctgtattgggtgcatatatatttaggatagttagctcttcttgttgcattgatccctttaccattatgtaatggccttttttgtctcttttgatctttgttggtttaaaatctgatttatcagagactaggattgcaacccctgcttttttttgctttctgtttgcttggtagatcttcctccatccctttattttgagcctgtatgcgtctttgcatatgagatgggtctcctgaatacagcacactgatgggtcttgactctttatccaacttgccagtctgtgtcttttaattggggtatttagcccatttacatttaaggttaatattgttatgtgtgaatttgaccctgtcattatgatgtttgctggttattttgcctgttaattgatgcagtttcttcttagcatcgatggtctttacaatttggcatgtttttgcagtggctggtaccagttgtttctttccacgtttagtgcttccttcaggagctcttgtaagacaggcctggtggtgacaaaatctgtcagcatttgcttatctgtaaaggattttatttctccttcacttatgaagtttagtttggctggatatgaaattctgggttgaaaattcttttctttaagaatgttgaatattggcccccactctcttctgtcttgtagcgtttcagctgagagatccgctgttccctttgtgggtaactggacctttctctctggctgcccttaacactttttgcttcatttcaaccttggtgaatctgacaattatgtgtcttggggttgctcttctcgaggagtatctttgtggcgttctctgtatttcctgaatttgaatgttggcctgccttgctaggttggggaagttctcctggataatatcctgaagcatattttccaacttggttccattctccccatcactttcaggtacaccaatcacacgtagatttggtcttttgacatagtcccatatttcttggaggctttgtttgtttcttacttttttatctctaaccttgtcttctcgctttacttcattaatttgatcttcaatcactgataccctttcttccacttgattgaatcggctcttgaagcttgagcatgtgtcacgaagttctcgtgccatggttttcagctccatcatgtcacttaaggtcttctctacactgtttattctagttagccatttgtctaatcttttttcaaggtttttagcttccttgcgatgagtttgaacatcctccttcagctcgtagaagtttgttgttaccgaccttctgaagcctacttctgtcaactcgtcaaagtcattctccgtcccactttgttccgttgctggtgaggagctgtgaccctttggaggagaagaggtgctctcatttttagaattttcagcttttctgctctggtttctccccatctttgtggttttatctatctttggtctttgatgttggtgacctgtagatgtggttttggtgtagatgacctttttgctgatgttgatgctattcctttctgtttgttagttttccttctaacagtcaggtccctcagcttcaggtctgttggagtttgctggagttccactccagaccctgtttgcctgggtatcaccagcggaggctacagaacagcaaatattgcagaacagcaaatattgctgcgtgatacttcctctggaagcttcgtcccagaggggcagctgcatatatgaggtatctgttggaccctactgggaggtgtctcccagttaggctacacgggggtcagggacccacttgaagaggcagtctgtctgttctcagatctcaaacgctgtgttgggagaaccactgctctcttcagagctgtcagacagggatgtttaagtctgcagaagttgtctgctgccttttcttcagctgtgccctgcccacagaggtggagtctagaggcagtaggcgttgttgagctgaggtgggctccgcccagttcgagcttcctggctgctttgtttacctactcaagcctcagcaatggcggatacccctcccccagccaggctgccgcctcgcagatgcatctcagactgctgtgctagcagtaagcaaggctccgtgggcgtgggagctgccgagccaggcacgggagagaatcaccttgtctgccggttgctaagaccttcgtaaaagcatagtatttgggcagggagtgtcccgcttttccaggtagtctgtcacggcttcccttggctaggaaagggaaatcccccaacaccttgcgcttcccgggtgagtcaacgccccgccctgcttcagctcgccctccgtgggctgttcccactgtccaaccagtccgaatgagatgaaccaggtacctcagttggaaatgcagaaatcatccaccttctgcattggtcatgctgggagctgcagactggagctgttcctgttcggccatcttggcaactcccattgcccttttttcatcctcaaatgaagctatttcctttctgtatctattgtggtgttcctaatatgtagcatagtacagaatcagcaattgccactatttcagcagcacattttgaagcttttccaacatattttattaccccatgtgcttatctcatggaaacaaaagtaaagtaggaccttttcaatgggagaattaaataacttttaagggtaatagaatggaaacctatacaagtaaaatttttctttgaaaactaggttcttaagatatgaccagacaagagatgaagagttaaaatgtccttttctgttttatcaggctaattttaaaaatgtttgttgaaaggagtaaagtaaaacctgttccaagttgagattggaaagtaggtttgcttaacgtatgagactttagcagtacatcaagaatcacatatttgacctgaactgaatctacccatgtcattgtgctatttacttgaaaacgaatgttgagattatcttgccctgaacaattttgtagttatacacgcacaaccagaacatacagttgcttttacaatagggacagattctctatttagagtttgataaaagagaaccaaatactctattttaaaaatgtatagcctttcccttgaataatcctttatgtagctcagcagctaagtagaaatgatgggacagaatggatgaactgcgaggtgagaccagcccctactaggagcgtataagcaagatgaggagggagtggagtggataagaaacgcagaggaagacaatagttaagactgcattctccacacacacatagtgttggtgctccgctgctcccccacccttatctgcttaatttataagttctgcttggcttcatcatgctgacacgtgccaggtgcctgtcagtgctgagttatgttgggcagctcactgtttcactgttttagctattccctggtgccctaggcatcattttcctctttgcatcttgaacatctgctctggagtgttattggattatgtgaaagaatgatggaaagatcagtgaattggggaagtcaggagatgtcactgatttctaagtagttttgtgactttgggcatgcagctttttgctcttagttatccccaaaatcaaatgaaggatgtagactagatgatctctaagcgcttctagctgacatttgcttgaccccatgactttagggggccttgttcttggaggacacctattatgatttctaatataatgtagtattagctttgtctatttcatggggctgttttgagtttcagctaggataaaagatgtgaagatgctttggaaactattaagaatcatataaaacaaaaatgatacgagtagtttaaaagattctttcctccaaagataccatatagtgataaaaattaaagtaattccatttaaatgaatgtgaggccaattacagaggccataagaacagacatgcagttatacttaccatagagaaatatgccatttaaaagcacacagatcaaggaatgattcaataaacattgattgattggttaggcagctaggctttggggatgaggtattctacttttcttcctgatcccccttgtgcttgtcaagtttgaaagaaacaggcagtggatcatgttcttttctctgtcactatcacccatccactccacgaaagttagaatagaacattaaaacctgtacagaagggaatgggtcatcttgacccaatagcagagtatgagaacatgaggccgccttgcatactggcttgtcagacttggcctcgccagcactaggtagcagtgaaggcagctgccgtatgcctttgtctttgtggtcctcttctcttcctccacccccattctgttctttcatgtccttcttgtgaccttttactattctttcttccttaccttactagagtagaaaagaggagcgcatacaaaaggtggggaaaaggaagaagagaaaggaaaataaagattaaaaactttacaatgaggtagtggggaaggttgggctcctctctttctctttctccttctcagtatgacggacttgataattttactttgtacctcatctttaagtttgacttcattcttttctttagttacctttagtccccgatcagtgacatatgcagaaaattataaacaggccgcatgataggaaccagtatcctgcctctcagcagacttgtatcatctaggactggcagtagttttagaaaggacagctgaaccagcctgacatgacacataagttagagtgacaacacatgttttgcagtttatagagttcaattaatagatttgattgccatggaaagagggaaggaaaagaattgcatgactcgtgtactgagtatgagagagcttattcatacaggttggaaaagcaaaattaaaaaatcagaaacaggcccaccagcctagatatgtccaaaactagtactttggtaacctattatgacttccagcagattaagtttcaaactgtggaaagggcttcggaataagggaaggcttagcatcccactaataaggcttattaagtttagataaaacagatgtttttcaatggtagcagctctgagtcaccaagatcaaaatggagaaagaagagaacaaaaacaagctaacactttcattaaaaaggtactatttttcttaggcattttcagaacctgctcacatttatacttaatactttcagttaaatcctatgaacggaagcattaattggggaaaaattccttaatactgattaaatgtatatacatttatgttgatttgctgacattctgaaagtggtactatgaaaagagaatgggatttagaggcaggcggtcctaatttcatatgtcagctctcttacctgtttttgtttctttgtttttgtttttgttttgagatggagtctcactttgttgcctgggctggagtgcagtggcgcaatctcaactcactgcaacctccacctcctgggttcaagtgattctcctacctcagcctcctgagtagctgggattacaggcatccaccaccatgcccggctaattttttttgtatttttagtagagatggggttttaccatgttggtcaggctggtcttgaactcctgacctcgtgatccgcctgccttggcctcccaaagtgctgggattacaggcatgagccactgcgcccgaccagctctcttacctgtttttagaaccattggcaagttacttaatctcactgatcatcactgaacctcagcttcttcctctacaaaatggagttgttttgaggactaaacaacttaatgcatgtatagtaccttactcacagtaggtacttagcagatattggctttctgagattttaagctgcttttgctcatagtgccatgtctaaatatcttaggaccagtcttctagagcttgatgaggagctttaggccatccaaagagggatgcacctgaaggattcattgtggggtgagataaaaatattagaaagtctatttatatcattttagataaaatataagaaagtatttaaactccactaatgtttaacatgtggattgaccctgatgctctcctttggtccatgttggagagtcactgtcatatactctaaatgagggatcccgagaaaagtgtgagatttcttgatttggtgagagttcatggtggcatgcacattcttttgctcactttaggcatattgtaacatatttcagtttacatgtacctagttaagtagatttctagttcttagtacaggttgagcatcccaaatccagaaatctgaattgctccaaaatccaaaacttttgagtaccaatgtaacgcttaaaggaaatacttcagatctcagaattttggatttgggatgttcaaccagtataatgcagatattcccaaatcacaaaaaaatcccaagtttgaaacacttctagactccagcattttgaataagggatattccaacctatataatcttcatcctgtggtttctttgcaggaatcttcttaagctgtttgactattgtgtgtaggtcagttaaagctagataaactaacccacgcagaatggacaagtggcttaggaagattcctgcaaggaaaaaaatgggctgatgataacagtgataatgcaagggcaagaaaatggtgaactagctgacacttctatgagtttcctcttaatttagccaagtcatgaagtgaaaacaaaaataatctaatcaaatctgacaagatgtcagccccaaaacaagaaaggatcaagagcattatttaatttatactcactgtctttaataacaaagcctactctaagtatcatgctttgatatattagcctgtcatagtagtacaagtatatactttataaatatacatattgaggatgtgtgctcaaactttttttagtgataagaatactcaatcaaaactgtttggatcctggtgatgacagacgacattgtcagccaatccccatgtggtagtgaggacatgtcctgcagttctgaagggattctatggattttttttaatttaaaaaacgaaaaactaattttaaaaaaaaacagcttggagactgctattttaaatgaggaaagcagttgctgcctatggaatctctcatctctcattctgtatctgctgcttagaaatcatttttcttgtttttgttttgttttgttttgttttttacctaaggattttgctatagtatgaatagtaggatagagagtaatatatctaaatccatcaaacatgatttagggaactttatttctgataaacatttcttctacagaagtaaaagaacaattcctgcccaaaagatttaaaaactgtagttcaagaaaactaagaaactgtttcaaagcagcatatgaatccctgcctgcagtataatggaaactcttgatgaagatgtaccttacttgatgtagatttgtttctgaaaaatatatatatatcttttttttatttctgtaaaactccctgtaactctgagtcagttggtaaccagtaaaccagtagcatattgtaaaacagatcttttcaaaaagagcgctaacctgctctgattattcctctcagcagtcctatagcatgattttaacacgtattttatacatatccatatattatttagtaatctattcttatattctccatggctctttgcataataaaaagcaaatagtgggtgtttaatacttattttgaaaatgaaagaaaatgaaatgaaaacaccagaacctggaaaggtagtcattatcccccgagatggccacatttaattcctagagaagataacttgtttagttcttcccacagcacagcttagtcctgtggctccctttctttcaccagagccataatatggggcagccctgtggacagacggatgatcaatcagagttctttgacagccactacttattgagtaggttagtaaaggcacttgtgcagttattattattttatttgttacagttgctccattaggtgggtactgttatgatctccatttcataaatgaggaaatgaaggctggcatagattaagagacttgcccaaatgtcacacaactaatgtatagtggagccaggatccaaatgcaagtatatctgactccagaacccaagctgttggccattgtaatatgttatgttctagagaactgtgaaatagtgctcattaattaacgattacttcaattttgcattttaggagctatatttattggcataagtcacagagaactgttgttataccttggagacacacttttgatgggtctggggaagtaatactaatttgggattgtagaccaggtttctaaattccaattcagttcaagaggtggttcattcagttttatagtatatcctaacttaagagaacacacggatgagatccctggaaattttgccagtctgtgtgttacacagtctcttgaaggtagagacaatctcatatcttcacatttccaagcttataattgtcagtggtcatatcgtaatcttttccaaacccacacatttttttcttgccaaggcctcgagagcactgttgttatggtgtacagtaacaaatgacccagttatattgagttttaaagatgaaccagattcataaagagaaaattaaattatattcattttactttggcagattttcatcagaaaaacataatttaaacaaaaatagtttctagtagttcatttctaaaaacaagatagagtaaatctagaaactctgcagagaaagcattatgtagacattttgtagagggaaataagaaatactttctgtatatacaaacatttagccatctgtttctttatgtatcttttattttccagttttagctctgctccactaaatcaaattcagacccaattctcttaatttagaggggaggaatttgtggcctaggaggcagattctgatgatacttgctggtcctcacagctggcagctcacagggaattttcccttcctggtgggcagctatggctatctcatagagagtagaggcttttaagaatgcaagatcagagcatttcaggaactttaatcagagggcagtaagtgataacactctaaagcctaagtgaatctcataggatagaagcccgataatatatatcaaaacctactgaacctgttatcctttatctccctctcctctctcttacttttccattctccctttcttgctttctccttgtttctttgcatatgtctctatttgagccctttctaagtgtcccccttttttgtactttctttgactcctacttcttttttcagcttcttgcttttctcttcctttctctttttacatattcctttttcctttttctttcttttttttttttccagaattggataatatggtttttttttttaatttaagttttagggtacatgtgcacattgtgcaggttagttacatatgtatacatgtgccatgctggtgcactgcacccactaactcgtcatctagcattaggtatatctcccagtgctatccctcccccctcccccgaccccacaacagtccccagagtgtgatattccccttcctgtgtccatgtgatctcattgttcaattcccacctatgagtgagaatatgtggtgtttggttttttgttcttgcgatagtttactgagaatgatgttttccaatttcatccatgtccctacaaaggacatgaactcatcattttttatggctgcatagtattccatggtgtatatgtgccacattttcttaatccagtctatcattgttggacatttgggttggttccaagtctttgctattgtgaataatgccgcaataaacatacgtgtgcatgtgtctttatagcagcatgatttatagtcctttgggtatatacccagtaatgggatggctgggtcaaatggtatttccagttctagatccccgaggaatcgccacaccgacttccacaatggttgaactagtttacagtcccaccaacagtgtaaaagggttcctatttctccacatcctctccagcacctgttgtttcctgactttttaatgattgccattctaactggtgtgagatggtatctcattgtggttttgatttgcatttctctgatggccagtgatgatgagcattttttcatgttttttggctgcataaatgtcttcttttgagaagtgtctgttcatatcctttgcccactttttgatggggttgtttttttctttctttctctcctatcttctcttccttttgttccatcccttagttctttcctctattccccatgaattacccatcatatcatattaagcatatatattaaaattaataaatgttaatggtcattgagcagcaagaaggttttattattactgtaaaaggaaaaacatctcccagttaagtaacactgtacatatagcttacaattgaaacttttcttttgagtaacagccctcaccaaaataaggcacctttcctccttccttaaccataattgtgtcttttgttcttcctctctacccttaggtttgatgaataggcacatttttacattttgttttgtgtccattacttcgtgaattttagaaagctaaaattgctacttagtgagacagagcggtagataatttttcagatgtgggtttaggattctagtattctgagtttctggggttcaaacatgccatgtatgcattctattccagaagctctagcagggaatgacagaatatggaatttcctggtggttgaaacccctcatgaaaaaactgcttttagttttagactaaaacatagttgaattgcttctctttgcctgtccaaacagggatttttaatttgggttttaattacttccttgtcctgaataatagttatatgtaatatgaagcccctctcagtttgataactttccagcagttaaccgattaaggtcaacaatattttagaaagtgaatgaacaagtgagcaaatgactagacagagtcccttaaattatttctgttacatgctctatcgtttacgatgagccttgtaatatctaaggttttgcctcttttcagcgacttttttttctttttagcatagtttccaggcactgtcacaaactctttggttctttcatagctaaactcttaatatcttttcttaaaatgttcatttttattaaagtactatataacattatatattaactttgacaaatgttaacgttccttctcaattaggtgaggtgtattcttgagaaggtgccaatttgaattgaatatatttgaatttgatatgtgaactaaactgtaattgtttaaagcttacccatccatcatatgggtgatggagcagctgactgattttacatgtaagtgttttgttttgtttttctagcaatatttaaacattagaaaatgatttcctattctaacaaagagaaattcatatgaatttacttacaggacccccttgtcagttccttagactgcctagaatttaaattggcagatactactttggtataaaatgctttctatggacagtattaatattttaaaatgttttactcctgcagatttccagtagacaggaagtctagctctgtttaccctttggctactaatgagtgctgctgaatgattatttatcatctttaggtagaggtaccacaggtatgagatcagaattgccaagtaaggcaagcatttaattttaaaatttgaaaacaaatccatgcaaaggtgacaactaaagtatagatactcgaaagaattttggacttgagtcagaaaatctcagttgtatccctacccttgtcattaacttagctgagtcaccttgagtaagtcactgcccaactccagattacagtattctctctaaaagcacaatttcaacattgcatattctaaagagagcttggttaaggaaagcttggttgaggaaagctgaatcttgttgtttatcagctatccacaccagcctggcagctctgaggtcagtctccagctgtattttcatctttttgtaatctcttaaatccttgcaggctttcattgctagttcatttccctagaaatttacatttagagacattgaggacttcctacctttgtaatttttctgtgttcatgaatttaatgaaaaattacttagagctggctaaaaaatgcaagaatcaaaagtcttgtttaaatgtctctgtaaaatcagactattcccatcatgactaacaacctttactatttcagagttttgaaatcagtatgtttgaatcttgacatggtgaggcaccattgtcattttatcccattcattgttctagcattttcctactaactccttgttctaaacattcttctttttttttaagcctagaatgagtgaacaaacaacaaggctccatgtcatgagaaaagcactgtagcctgatcttcacttatgttttaggtatttgaaaattacattgatttcaaatagtttgaactgcattgagctaaaacttatcttttattggtctgctaggaaatgaactaaacaaaataacttgcctcaaagtattgagaaattaactgtatagcgacttcagcatgtgtatttttaaaatgaaaaagctagagctaggtacaaaatgtgcttcattaaaggaggtctagcactatattcaaaaggtcaaacaacaacaaatattggtgtggatgtggagaaactggaactcatacattgctgctgggaaagtagaatcgtgcagccattgtgagaaatagttcattggttcctcaaaaagttaaaggtagaattacctttatgatccagcagttccactcctagctatctatccaagagaaatgaaaacatacatccacattaaaacttatacatcaattccctagcagcactatttataatagccaaaaagtgggaacagcccaaatgtccatcaaccaatgaataggtaacaaaatttggtgtatccatacaatgaaatattattaggcaatgaaaagaatgaagtactgatacatgctacaacatggatgaaatctcaaaaatatgctaagtgaaagaagccagacgctaaaggcaatatattgtatgatttcatttatacagaatgtccagaataggcaaatccatagaaacaaagtagattaatggtttccaggagctgggagtggtgccaatatgcagtgactgctattgggtacgtagtttcttttaaggatgatgaaaatgttctaatattgcataatggtgatggttgcacaactgtgaatatactaaaagccattgaattatatactttaaaagggtgaattttgtggtatgtgaattatatctcaataaaagtgttatggattaaaaacattagtgactgtattactataactatttgaaattataaaagtatatttaaattacattttatgccaggactaggggcgggggggaatggggagttagtatttaatgggtgcagagtttcagtttggaaagatgaaaaagttctggagatggaagatagtgatagatacccaacaaatatatttaattttacagaactatatacttaacaatggctaaaatagtaattttatgttatgtatattttaccacagtaaaaaaatccataaccccctaagattatattttatattattctaatgaatgatgtgtcttttactctttttcttcttttaacagtaaaactgaaaatgtgattggccttttgttttttatgcatataattcttctggtctgtattttagaacttctttcctgtgtggcgttgggggatgcgggtggttacacacacacgtctttatcttggctttgaatgagaacttggaagtattttttaaaacttttatttgtcagtaggaaaataaaagaagccaaaccataggaaatttacgtaattaaattataaaatagtgaaatgctgttctcagagtatgaattatcacagatttcctgattttcttggttaatcttggcatcttgaatgggaaaaacatatatacttttatacatatataacatctctgtatcttcctataagcattttcctttgtatagcaggataaaatgagcaccaaaatgtggtgcaaatataaaaacgcagtggatgagcttcaaaatgcaaacaaagggatgggaaaatgaaaaaaagaaaattcagcagtgagaaagtcactgaaaaaggaattaaattctttccaagtctatggaactatgttatgacccaagcagtttgtagagtctgagtttgtaacctctgaggataaatccatgaaaatatttctaagcctggctactatctaggacatttgaagatggatgttatgaataccagtagtgccattaatatagtaggcaatcagaggtatgtttgtttttcttaatcaggaagtggtttcttttaaaagtataaggaacacacactgtgtgtgtgtgtgtgtgtgtgtgtgtgtgtgtgtgtgtattttctattccgttgcaggaagaattatggtttttccacattttacagtggggttttctagagtttggcactatgatatcctacacttgattacaggatccaatcagagttgatgtactcagaaattcattgacatgattaatggtctcctaatcatacttttatttcctagattagccctatttcctgtagtttcacaatttttgagtcatatgttaaattatcctttattgggggcctgaaattcttatgagtatttttagtctataatttgcatgattatttcttttctttgttttttttttaattgaagaaaatgaaattttgatcttcctttgaattctttgagtgctgttctatggtgactggccttcctagtataatcttttttaaaacaatattgtatatatgtgtatgtttgtatacatatatatgtatacatacacacacacatatacacacacatatatatataattttactgccaccagcactagatccagaaatcttcctacaagtttccactagtctagtttttattcttctcaaaagcaaaataaaacattcttagattctacaagtagcagggaaagacatcaggaaatggctgtacaggaaatgtaattgatgattctctctttacaattgaagtggtcacaagattggctagcaaacacaatctattaaatgaaaaaaaaggtgacttctaaaatctttggggaatttgaatacatttgaagcttgttggtacctttgacatcttactgattctttttgaaactcttacctttttcaaacaattgtttgcatttgaaattgggaactttcatatccagtgattgctttaatatttgctttgtttttaacagtgcccttaaagatagccgttttcccccaatgacaagggatgagctgccacggcttttctgctcagtgtctctgctcactaactttgaagatgtctgtgattatttggactgggaggtaagattatagaaaaatttttaaagaaaaatgaaggtaactcttgaggagatgttaaaaattaggcccagaaaataactctttcagcccattctctattgtaatggaggtcgagagtaatatggatgaataaacctcacaactgaacgagatataagtaaatgagttttttaaaggacaaagtgccacgtgttgttataatccccaaactgaatttggttttcatttttctcctactacctcaccaaagcacctcataaaagctgttaataagtaataagaaggactgactggaatttatttctcctcttactttcattctggtgcactctggtataaccgccactaagtaactagttggtcagaggatacatctcagaaacaagaagaaatatttaggataatacaccatttgggggaatcagcttgtgataacaacaaggtattgattaactagagttaaataatgtgaattcattcttggctaccttagtttatacacttaaacactctaacaaataatactaaggttatttctagggtatctctgtgcattgctattgttagagtagcttatattgatcatatttttattcttctttagtacatggggttggctaacattgttagtgaagttcaaaggttctcaccatgatttgctttggtggctgggaggagatgttgagtgtaggtctattgggtctatgaaattttacacacaagcatgcccatattactgaatgcctgttttattccaggcaatgtgctccatgtataaaagtggtaagatttggttcccaccatgaagcatgtcataatttagtggcgagtaaatgtgtatagaaagtatgaagaaataagtgctatgagaatgaaacaatgggaactcagtgataaacataacattctctctcacacatacactcataaatggcattattgtatccttatgacagattttaattcttctgctgttttagaaggaccatcccccatagtaactgaactattctgccttggagacagatcactgtcttcacagtttattagacttgaatttaattttggctttgccctgattccttgtgagactttgaacaatttacttactccactgcaattcagttttccaatatacagaataagacatttataaggttcttcatttgaaaaaaaactctatgatataaattattgttgttataccagagctatttaaaaagttttagggggtggggtgaaaaaaaacttttctacagagagtacaatgctagagtcccctctgggttttgtgctaagattttctggagcattatcagaatatgaacacatcttaggatttttgcaaaggaagaaataaaataaatttatactgttgttcctaccaaagttggaatgtagaaaaccttttgtaaacttgaaatttctgatttattatttgctataagtttgttgttcttacttgatttttcttaaagaaaagtctacaaatattatggaaatattccttagtactttatttttaaacagccccaaatcatgttccctacttattaacatatattatagtctgggtggttcttttactgttttaaggctgctgtttcctcttccgcagccagatttacttttgctttctggattgcagggtgttgtgtatgtagtagtggggatgggagtgattatatgggaaaagcctgagatccaagggggatgaccaagctacaagaacacttctactcttgcagctactgagttggaagtacagttctggcatgtgtgtttctgtgtgtgtgcatgtgtgtgtgtcacaaacatgaacatactagtattacataaatgtgtgtgcatgtgttttgggggaaggaaaaaggggagaatacaacagctgttacataggcatggttaagcaccgagtacatcatcatcatctttagcccagttaaagcactatctacagctaaaattaaccttgatattattggactattatgtccaaaagatacatcagctttctgtttgttaggagagtgggatgtaaagcccttaagaagtagtactgtgtactccactatatactctttcaaggcatatttatcctctttggtcaccatctgccagcctgaatttccagaagattctatattgttcctacttggtattgtgtatttaatatattttagggggcttaaatattaatttctattaagtattagttccctattgaagcaaaaaatacactttttttttttttcgagacagagtctcgctcagtcgcccaggctggactgcagtggcgtgatctcagtacactgcaagctccgcctcctgggttcacgccattctcctgcctcagcctcctgagtagctgggactacaggcgcccaccactatgactggctaattttttgtatttttagtagagatggggtttcaccgtgttatccaggatggtctcgatctcctgacctcgtgatccacccacctcggcctcccaaagtgctgggattacaggcgtgagccaccgtgcctggcccccattttttttttttacttttaatatacaagtatttgaaagtgaattagttactgttagaatggctatgctaagaggaaaagcccatccttttcagttagttcatcattgtttcaggtatttggcagaagagaaatttgtatacaacgaataagggtggaaattatatttttaagtacaagaatgtgatttggtcttaaaaaaatatgtaccttactcagtgattgaaaatggagtaatagtattgtgggaatgatattctaagggttatccttaatgattctgaaaaagcattactaaacacagaatgccaaaatggaattaaaggcattaaaaaattatacgttgacacaatttcacttctaggtatatacccaaaagaattgaagtgttgaaacaaaaacttgtgcatgaatgttcataacagcactgttcacaatagccagaaggtggaaacatcccaaatgtttatcaacagatgaatggataaatagaatatgttatattcatacaattgaacattactcagccataaaaagaagtgaaatacatgctacaacatgaatgaaccatgaatacattatgctaagtgaaagaagtgaaacacagaaagccacattccgtatgactccatttatgtgagatatccagaatgagcaaatccatagagatagaaagcagattaatagttgctaggggctagggggaggggtaaatgggaagtgactacttaatggtacagggttgccatttggagtggtgagaaagttctggaaccagatagtggtggtggttgtacaatattgtgaatgtatttaataccactgaattgtacactttaaaattgttaaaatggcaaattttatgtgtattttactacaataaaaatggaaaataaactttatacatatattctgttcataatagcaattttaacttatcaaagaagaaaattttttaaattaaaaacatataatgagagaaatgtgagtcatttataattacaccattctgagaataactactgttaacattttggaatatttctttccattatcttttatatattatactaagactttttaaaattttttttccattctttatctgtctttgtatcaataaatctgaatatttggttacataacagatcatattgaatatgcaatcactatttaaaagattgtggggaagtctttatggtttatctttgtatataagtaaattatattttgaatttcctttttgagaagtcagtctatattatgaaagtatatgcttcacgagaattttcacactaataggtacaacttttcttccaagaaaaaatatcctattcaccataagtatgcaattttaacctgaaatgtgaagtcctgtgtatgtttatgccacaggggaaaacaaggagattattacagaattttaatacagaatgttaaagttgaagatagataatgagcatgttttatacaaacagaagcttctaacgtagcacttttctggtggaagtacagtttgagaattgacccccactggttaagtgtgttactgcagtggaattcctaattaaagggatgaaaatgcccagattaaagcaggaagagggcaaagtctagaagtcccaaagcatagaggtagatatcttcgctaccaagacagatatccctgtggtcatgaggatgaggaacgtgaccacgatcagtggtaatagccacccagttttcagatgatcaggaaacaaatgaattgccacgcgtctggctaccatcttactgtctttttcatgcaaggtttttaactcggtctatttgggaactttcttctgataacatgtctctaattttataatggaagttagtaggaaagtaggatttactttagaccttgttttaggagctagagtgcttctgtttgataatgtgagggatgtttgacaaatggttttacaaatggctgtaactaatttcaagtcaatattgaattgacagactaatcaataatgcttccatatgttctatttcctcagaatagtaattataacatttaaaataagtgtttatgggtagcctctgaaggaatctgggcagtcattaaaaataacagccatccacaaaaggcagtaaggacaaattagagcagtggccccacccttccaagaataactgatcattgcccacatcatgatgtacttattgtcctagtaggtatgagaaggatgaagagtgaataatttgaggaaaaatttcattagctgataaattggaatgtctacctgcaaggctaaaatggttgttaaatgaggaaaattgctcccctagataaatctgacatgatatgctttgtgtttgaacacggaaactcatcaccattgttctgtgttcttcagttgacatcattttcttaattctgaatgacagggtgattgacagacatggtgctttgtaaagaaagaaaaactcatgcagcatgttggagcctgccaaaatgacatagcctggaacttgtagagttaaactgtttgggagccatgtttcctttttaaaaatctgaaaggatataaaaccagacattacaatggactggagcttgacttgaggggtgattctatgtgtgtcacctcataggtgctcattttcaggatgatataaatgaataaactttttgtttgtagaagaattcgtatagcaagtatgttaccagtgattttgtggaagctaatgtagcaatttgctgacagaagtcaaaatattttctaaattgtaatcaagcgtcttttacttctgtgctttagagacaagatcacttgaaggcatgaagtaaaaatattctctgtattctaaagtaactccttagatcagatttcaaaagattaatgacattttcacaaaccattagtcactttctcctatatctggctacctggatcactggtatctcactttttctatacagctgtcacctgggcaatacattgtggtcccaagacagactgttccattggagcacacaatacgtacatggaatcaacccatgctgggtggggctggccagcacagttattgtatgatgccaaaaatctgtccctggactataaagctatacctcaggcccctgatctcactctgtccctaaagtaccaaagcatctgtcattgtatttgagcctcgttggactcctggtactcagaaagctgtgtttcactttaaaagcaacctccaaggcacacctcttgagtgatcacagctcaattctgacgtgttcagttgcagttaataatagggtgcttttgtaacaaccttcgtgagagtaaacagatgagatgaataaattggctactgtcattatctcccacatattttagaagttaatgttcttttcaccctcactccccccttaaaggtttacattttttagctcctcttaatgtgccattgaaaacagagttcccattcatacacagatggtaagcatgactcatgaagtcacccagcgaaatgacttctggttgtatatgttatgtttcccctcttggttagtttttcccaactatgatatacatcatgttttttctctcttctaacttaaaaaatatgagcttcatatatccaggaaaatgcttttcacagtacatattttcccagggacgttgagtttttttataagatgtcactatcattaagattagtcctttcttgatgctctactttaaatgttttttttttttttaagtgccgtggagtgttgggaaaggaaggcttcaggcttcctggccatctagaaagagtttgctgtgcatcaacaagtcaatgtataagaagcctagtggggaagcaagctgtacaaagtaaagtaacttcttagaaggtgatttaatgcatacaaatttccattagctgttggttctcttagcaaaatgcgctgctgattagtcccttctcaggccgcctcaagttgtctccagttttactcgcagcatgtttattggttggaggaagttagcctgctgcttccccagaattccataaactccctgccccttccctagtacttttgttatagctattatttcatgtatgatttgcctgtgtgtgtgtgtgtgtgtgtgtccccagcatttaattaaaagaatgctgaattttgggaataaggagacctgggttctgttcctgactgccactgcccagctctgtgagctttctgggcctcagtttcttcaggaacctgaagaagttggactaagtgatacctaagatctctttggactctgacagaatatgattctgtgacatactcctttttaaaagatggcttctgtttcattgtccagagaatgaatcaccactagccatttagaagtcttaagaagaggtccctaactttcaaagtggccattgccaagttaaatgtaggcaacaaacgtgaaaaacagtccagtttttaagttgtaccttctagatttcctgttcacaaaaagaattcccttgaggaagaaaaatgctctaagccattaatgtctccatttaattactgtatcatcctgttttaagtcaacattatatatttaagtctaaattaggcaaatacattagggagcgattcactttatgaatacgtattttgctttgtagaagaactcactatagaatgttattgttttcctcttgactttaagattaattcatttatgtaaactcaacccacatgtaactttttaggaacaaatttcttttgtagactaagttaaactgtattgagtcagatactcaatgtacagttctaatgaatacaattttatttttcttaatttcttattaggcaaacagcattatttcatattaggcatgtttgctaggaggtgatttcttccccccgcccaccctgtccccactagcctttggaaagtaaactaagtcacatctctaggttttgagaaaattttataactttagttttcttgtctgtaaattcactcccttattcccttttttaagaaatggaaggaatgcatttttctaactttgatagaaagcacgctttttatttaaaggtcacctgtgctgcctgaacatttcttgggaagctttaggatgttaagtttttatgggatgctcattataattaatcattacagagaattgggggttttttccccttaattgcactctgagctgtcacttgttctctgcaaaatcttagagtaagatcaatttccttcattgcaaaagatatataaacatgtttggcttcagagtttttcaaagcacctcttcattagccatactttatttaaaattttactaaaatttcatggtgactattagagagatcaggtattttaaagctgtgtgtcagctattaaaataaatgttaccagatcgttgttcagtggcttttgtgaaataagttggcaggcttttgttcctgatagacaagtagtctgtctcctacataaatcaaaattggccctaattagtcctttggtaagctctgtaaaagccaagaattggttcatggagactgaactaatatctaagccaaaggtgactaatctgcagggattttaaagaagagcaacacatatgtattttggtcaaggggacctttttcataaagtaacaactgagaaaaaaagaaaaacttcagctgagacagatgatgaagcagaggttttatagtagagtacgttaaaaggttagtcatgctcaggtgatgactttgtaatcaattatcctttttgattcatgtttctggtattctgcttctaaacgcatctcaaaggatatttgaaaataaagacaggtataggaactggtcagataatgtataaaaacagcctaaaatatagtctgtggtggtatctcagttggttcaggagaaaaataatttttacgtcactaagataagagttatctctagtcggatggtactaggattacaggccatctttattttctcctttatgctttcctaaaaggatgctttatttgtttgtttgtttgtttgttttttagagacagagtcttgctctgttgtcgaggctggtctcagactcctggcttcaagtgatcctcctgcctcagcctcccaagtagctgggacaacaggctcgagccactctgcctggctctaaagggaatttttttgtaagacatatgtcctccttttataaaccagaaaaaaagatgcatgtttacagtttctaaggtttacaagagtaaataatactcagcaaaaacaaaagctgaatcgcagcaacattgttataaaaatttacaatttggccagattatgaagggatcatgttagatagatatgtaccttcagaactccagaattgcttttcaaattggtggtcaggttgaagtgatgcagagtaacaactgtgaggatttgatgggcagatcgagataatatgtcatctaaatttttttttttggtagtatcagatttggggaaagtggttcattaggatctgtacaaatccttatcagcttctatgattaaattcttaacttttctagctcaaagaattatccaagagaaacttggagtaggcctaagttcgaagtatttttctcttttatgttgaatttgctttcactaggaaaaggaagagtttctgttttcaaaaggctaagctggagtagtagggcagaaggaactgtggggcaataagttcaagagtggaccatgctgcaccatgagttttgtgctgttaggagatatagcacatagttttttcctcctaagaatgtcagaaacaccagactctgggtcagacccatggactgtccaatacagtgtttgtttctggctgtggtacccagggttgttttgtgagagagcatgcattccttctgtgataccagcctctaaaggttagggggtgtgccaaacatcctgagctcctctcattaggaacagtgtcctttcattcacttcaattggactggcatattgagcgtggcaggtcagtcttatgtgaatggccagtaactggatgctttgttaattgcaaagcatattttgccaaatgatttcatccaaaaagacatgtcaaacaactttcgattctttgacctcctgatatttcttatgctattcagatgaactcactgaaaatgagtagagtaagccatggccatattattacagggaaacccagcatttggttctgaaaatggggaagaatgggactgaccatggtatttgctaaaacaggatgccacccaaggtagtagagtgattctgttggccaggatgtaattgggaagatttagctttgagggtcaggactatggagataattgtggacccaaactgtcagaagtttacatggaggctactcaacttagccagagcacattttatactcatttatgcttttagccagatgactctttttcatgttttagcatattcagattgttggcttgctgacaaggctcacaagtaaaagtgagactcttttgtagtgctgcttgtggatcacaaggctaacacttgccttattagacagactagggtatattaagctttgactgtgcaattacaaggaatataatatgggagaaggtacttttaaaaaatgctcttgtgttgagggtcactgcattagaggataatagttttaaatgaagccacatttctaacacgggactagataacaaggataaatgaaatctgcagacagtctcaaagcttaattttagccattatttataatctcttctcctaccaaaccttttactgtgtagcaaaattgattaatttgtgtgtacctcttctttctgtgaccacgtgctatctgatagaggagtgaaaaaatagagaaatggacaagagacgaaagaggatggggctgaggccaggtggagctggggatgcataatccctaaactggataatcaaccccagaataatcaagatatattttagggtcttaacattaatcttgatatttaatcattctgaacaatgttaaaaacaaaagattgtataatagcattaataaaaatcacttgctatggaatggttcagaataaatatggctttctttttagcatgaaatatgaatccgttgaactggtcttaatgttctatcagcacacacagatacagctctgcttaattccatatcctcttatctataagtcctacatttaatttactaccattggggttgatttttagctttgcttagcaaaagtagtcttgattaaaagaatattatcgcaactgatggacctcgaaagcatttttttcatagaccatctagtaattttgaaaatgacctgcagacccataaggctagatttgcaagtttccagtttgtacccacctggctgtacttcaaacagtggcaggattagttaggggtatgtttagtgacatagtattcccacatgctgccccctcatccatacgtagaaagttaccgtggtagtgttttaaagatctgcttcggggaatcccagttccctggttcgctgatcttttatctagtttataattgcaactatagcctttgtctcttgggatgttgctgggccagaggattctccaatatgtataagggaagattcaattatgcatgagggttacattttggagttgtagctgtgacagatgcctccctgaaacaatatggaattagttttggtgctcatttcattgcaaagccagtgatttccacaggttggccagaattggtcattctccacagcaggccatgttctccttctcctgttttgattgttcagtatgactatttagtggcttgtggttctaggagtaaagaaaatgctgttgctcaagaggtaacagaaagaaagctactatgattttgttaagaacattattaccattctcctaattctactagctgaaaaaaatgagtcactctggtttgggctttgtagctttgtgggagtatttttgacctatgaaaaaagttcataaaaagaattcactttaaaaccactatacttacagttcaatttacaggggctttcaattgttcagagtcataggaacccagaaaagaattaaaagttgtaaatgtggtactaaatcaaaattggagaatttggggtttttttcttatcaaatttgatggtaggaccttctcaaaatgcagagtaaataaagcagtcttattcgtgagtaatttttgttttggccaatatgtcctttgtatccatacacacacagctttattgtgataccattcacataccatacaatcagtcttaacttcttttaattattaaattactagacattaaaaatctgatatttttgttcaagaacacaggatgtactcctataaagaaaggacttaagtgtctaaattaaccccatttgcctaaatcacttttaaaaatcttagtatgtagccacagtttgtcagaactagaatgcttattagaggttatctagttcaattagaataaaaattacctggggagctgttctttttccaaaacgtatttgttgaaattctgataaactttgcagccccgctccccaccccttgccagttaaatatcattaattttgtctgacactctcatctcacagatagggagacattcttcctatcacaattttgactagacaccttaataaacaccaaaattcttttcaattttaacatgacgggtttttgataaatagagttgaagattcaaaattcacttcagtggatgatggagtataaattacttatgctgtgtatcttttaaaaaacaaattatgaggaatctgatattgtcaaaggaaaaaaaaattcaaagctactgatcaggaagtcagtatacaggaaattttgcaaatttgtcattgtctcatcaggcactggagagattagtagatgtcctttatcctggaaatgcctgatagctaagcgctcatatttcttctcagctatatacgtagttatttcccacacagtatgggaggcaagtattgtgttagtttttaaacagctaccctggtcgcatttttagcagaaagagattcgtaagagtactgatattaaatagatagaagaaatagccagagatatgctttaataaaaataaaaaaccataaattcctcagaagatctgacaggctctaatggatagatgtgtgaagacctggggaaagatgaaatggattttcccagaggactttttattcctgaaaaaattggaaaatttgagactgggggtagaagaagcaaaagaagttttcattgaccccctttcctcttctagacctttacatccatacacatggaaagtataaaggtttatgactttactcacctgctctgaaaagaagcctccatcttgggtaataatgtttacctggtcttacatctccattccagtaccttgcacaacctgaccctccacttgggaaccattgatctgaggcaaccacagatccaagagaacagaatggtgtcattatgcttttgaaatttcgtttttattatcaatgttcacaaagaagttaagaacttttaattttgatctttagctctgtatactattctatgtgagatatgaggggaaaggacagatttctttcaatcatatgctaatcaaaggaaaagcacattattaaaaaaaaattagcaagaaattgctcacagttacttagaagactacctttttaagggcatcaccacaagcttgttttacattaaaaagttacagtggtctctgggctagtatataaagagactgcaataatgcactacagtgaagtgatttgaaatctttattcttaaatttagtagagctgtgtgaagacaatggtgtagatggacagtgaaggtctgctactaccccactctaagtcataatgcatttttaaagaaatgctgtctacactgggtgatgatgtaggatctggttgttttcattattaattttcaatcttacctgactgtgtttgcttgcctacgtataatttaatgttttaaacggagtagacagtttgggaggggatcagcaccaaaaattttggaacttaatcagaagtggtgagtgtacctgcaaaacaggatggttgtttgctatctctttgaagtcagtcacctttgtctctagttctttattggcatgagctacaatttgggagtggggcaggatttttgccatcaaccgtcttattctacagacagcttcagaatagttgttccagttttccaaacatagtatcatagcctagtgcatgttgggcacatgcaaatcaatattttccctctccgtggccatcataatggccttcaaatccaaagtcaaagctttggaaagagaaaacttatacgtccttctaaaaacaaagggaaaggaagaactgcattctcttgaaagttaaattataaccttttctttctgattctatgaagaagactgtactaataaaactgccaatttctttcaggtgggtgtacatggcattagaatagaattcatcaatgaaaaaggatcaaaacgcaccgccacctacctaccggaggttgcaaaggagcaaggtcattgttgtactttatttcatatgatctggtgaagaatttaaacaaatatacaaactgaaatgcgttatctgaccttgcagttatgtctaataattgaagtgtcaaattataagaagtgactcttccatcactgccactgcaatgtctgtatcaagtcggtgaagtactcacagaagttgaatccctgcattgaagtttgatggcataaacccataagtgtatattttttaaaaagcagaatttatattagttggttttcattttaggcaacaatttgctaccgatttgaaatgcatttttcccatattccattgtggcataaacaagccttttgtttgacaatcagccacatagttctttgtcattttaagtatcaaatgtttcattcttaggtggttgccattactcatcctgctgatactaagattctaggtttcccactaagatcagaggattgcgaaaacatgaagtgttagtgttttatatgcttggtctacacttcctaatcagaattttcctgtttcacacatagagcatagacctgtatgaaccaacattgtaacacaaagtaacttttcactctgtagtattttatcctttcttagcaactactaaattctggtttcatgttggtcgaaatgaatcttttatcttggggagcttttcttctcatcagaaagcatttgtaatttggttttcccgtgtttgtcttataaatgtgagatacataatagcaaaattaatgccattaaatccccagatcagaaagtcttcaaggcagttacttgaagatttatttgggttgctttagaaaatgtcttaatctcctagtatcattaactttgtaaagcatacataaaagatagagggcctcagatactagtataccatccatgtcagaactaatcaaaatacccttgaatactgcacacaaacttgaatgattacagaattacagaagataccataaggaacaacaattactgtgaggtggtgtgggagtcctaaatattgacttggcaaaatggcatataggcttttcactcccttttaaagatgtcactgttagaggaaagtacaacagatatggtttgttacagtcatgactgagcaatttctgccagccccttagaccccttgacttcgaatgcgaagataaaggagccagtgttgtttggcattgtggatagctagaatttaaggagtgtggtgatgaccctgcttttgtaaaggatgaaatcttagcttttctgtgtgattgtttttaggaccaaaagatttgatggcatttggtgacagtgatagctgacctctacaaagtcattttgtatttaatgaaaggtgtttgttacatgtgcttgactgatattttatctggtcatctctctacaggatgggaccatatacagaccatagactccttattgaggaaaggaggatacaaagctccgattactaatgaattcaggaaaaccataaaactgaccaggtacagaagacattttctagcacaaggctaacctgtacattttgatgtgtatgcctataaccctttgatttctttggtctctctaactacacttcttttttctgaaacagagtggaaatgaatggcagggtcatactgagggtggatacaatggaactctgcttcgtagtaaagcctgtgtgatgtatgagcctatctttcccatctttagctctgtgtgattactctggcttttgtacgagcaagcccttggagattttagactactttattggagaaagtacttgaattagcaattggctagcttttgacattactgagcagaaccccaggattctgataaacagtcctcaaattcgaatttaatctcagaattttggcagtgatagaagtctaccaagaaaacttgttagcttgctgaaaaacacaattgagctaaactcaaatgctaaataaatttcagcatgaaaaaatagggatgcttatttaaaaaggaaaataccgtacattttaggaaaatgggctgctggttccatttatttcaattccataaaactacattgaatgcttatagtctaaaaatggcctattctcagctctgaggagttacaaattcagaaatacctccatctctgctctccctgagttcacagtggaggagaatagaaggggcatggacaaaattattaatctaaggcagaatatgatggataatatgagatccattcccataaagtagggaaagaggaattctaagagggtgggagggggataacagatagtttcaaagaggtcagctgggggctgggtttgaagaatggatagaatatttgacaggtaaaaagggatttttttttgacaggaggaaagtgattcccttaaggaagaccttgtgagtcaagggtggtgaagtacaaagcaagttctgagaatatgaaatagtctgattgggctggtcttttagtgtaatagagaagctgatcattagaggaaaatatggcccagaaggtaggttgggcagaccattgagggtcctgagttccagagtaattagtttggacctggttctataggcaattggtagctattgaaggattttaatcagatgggcttggggaggtataagaatggaattggaaacaggaaaatgagccaggaagcgttggtattatctaagaatctgtggcagcagtccaaaagaggtgcaacaggggccttaactagagctgtggcagtgagatgggaagaaaggttgggatcgatatgaaaataatgtggaagaaatgaaaggactgggtcatcatttagaaataaagaagaaagtcaaggcgttaatctagataaaagggaccaaggtaatccctttaatcaaagtagggaccacaagaggagtgtgttaagtttatgcatcgattttggatttgaggtgcttcttaggatatctatatagaaatatctagtaggtcaatgaaaatgtatgagctcatggctagatatgattgaaattgtaaggatagggttcactgtggggggacagtatagagtcaaaataactgaatacagaaacataacaaaattctacaaggcagggataggagcattcagagacaaggagcaatctgagaggcaggggagaaccaggggcatgtggaggtatagaatccttagcaccagagagcttaagggcatgatgggcaaatggaaagatcaagctgagtcaggggaagccttctgatggctatttccatggaagggtggcagcagaagccaaggagcactgagctgagtagtagtgtgagatggggattgaaggcagaaaatacacacaactatttgagaaatgtggcaatgaaaagaaagccagacatggggaaaagtgagagttcaggataccagaattaagaaaagttgtttttgttgttgttacttaatggtaagacctaagtagatgtgtggacagagaaaggaacagtaaaagagggagaggtggaagatttctgaagaaaaataatcaactgaatcgaatgagatgcatactcctgttagaaaactggggctgaggggacaataaaatttttaaaagaacaatttaaacaaggagtagtagagtgcaaagagcactggactcagacttttgatttccaagttctgatcttagctttgctacttactatctctgtgaccttgggcagtcactgcttctctctgggaccccgtttcctgatctataaaattatctttaaggtccttcctagcagtgacaatggcatgtcacctacttctcaatgttaacttttctcttccctgactttctttcaggtatcgtagtgaaaagatgaccctgagctatgctgaataccttgctcatcgccagcatcatcatttccaaaatggcattgggcatccccttccgccatacaaccattattcctgacactgagccgcacaaccagtcactgggcctctctgcagacctcttcccaggagaccctacaccttcttggtctagctatctcttttactgtaccattttatgatgatagtttccgttgccatggtgaagcttcgacatcgtcaactaagatcatcatggtaacgggtagaaaaatggcatttgttaagatcctgttttattattttagatcgttgattttttttttgcagcatatataattttgggtttttttttccttataatattatgtagaattttgctttgctgtctcagtcaggtttctgtttttctgtcctccttgcctttcttcccgttttgcttcctgttttccttcttccttcccgttttccttcttccttccctgcctcccttcctttgactgtggatggaagaaagtgtgcagtttttagggattttacttaggttcgtctttagttttcctcagtaagatagttgttttttgatacctgagtttgggattaattcatatcaaattcaggtatttgtatattactcttgatttttgtctgaaattcactttgctatgacagcctagtagttgggtcttcactccttaagtatatgtttttcccatggtgaaaatacatgaactttagttctagtagtgagcattcaaaggtccgtgatagggcttgtcacagagagagagaaatcatttatccctattgtgctggttatcatagaagagactgcctcaccactttatagaaccaatttgcaaactaaaacactgtttggagaaggtacaaactacctttcaaaaaggctacaggaaacattttatgagcagcaaatattaggaagagagcagatacagaatttagtgcctttgagaagaatataattaagtggaattaagaggggttagaaaaaaggcaatttagaaaaatattcttgtaaaactttattgtttctatatgtgaaacagaagattagacaaattccttactcttaagtatttttttaagctgaaaaaaaattattttgagcaaataaccaataagagacatttgtctattttatattaatttaaatttgttagctctaggtttcaataagtcatgattggctagaatccattttagctaccatctaaagatatggtaaagataatttagtaaaacaaaagttcatatttgccatgatttcagatatgtttgtcatggggacaatattagagttttagagatactataaaatagcttgaatttctttctgcactacatacttttgatagaaacacatttactacattgataagatgttatgtcacacctgtgaaaatggagttggcattcagatatgctatagttagagcccagctcatctgcaagtatagtcttcccatgatgcatacaaagataacttactgatgtcgataggaggtccatacatatatccccaggaaaaatgacagattattctggaggaagatgaccttcattttatggttatgtgtgtgtgtctgtgtgtctttggaaaaatatatataattttttcaaataggaagccaacatatcaagtgatgaattaaagtatgctgcagaatatatattctaaaactacaaaaaagtcactgaatatcaaaatgatacagcttatacatatagttactgtgacaagtgacagactgctagttcagaattcaaaaatcctttcctagtttgtgagataatgggctaaattccttctgcctgccactggggcaaagcaaattgctttagtttttgatgagagttcttagaagtttgttggtattccttcatccacagcatccattgttgaaataaccattttcagttgtgatgccttaactaagaagccaattgttagcctgaaatgcaatcttggtagccagtttcaatgaagctagagattagtcagaaaaagttagctgttgggctttagaaagggattttgagtcctgtcatttctacttgggagcattttggagcagattagtctttcagtataaaaacaagtggctacctgatggaaacttttcttacccttatagggaaactgagcacaagctgaatgatattgtctgctgcaaaaaaaaacaaacaaaaaaaaaacaaaacaaaaaacaaaaaaaaggaaaaaaaggtaaataaaacaagcaaactgaagagagacaaaatagaccaatattatcgtgaaatccatcttatccatcatctcatcggttcaacaggctcctcgtcctgggtgagcttatggttagaagtttttttagcaaagatttattacatacatagatgtgtgtgtgtacatatacttacacatacatacatacatatatgtgtgtttatttaacggtgctaatcaatcttgagcaggtcacgtgactggtcatgcggactctaaaatcatatcagattttttaaaatccttgatatatgcagatgttatacagattttcttagcagtgtaataacgttaaactgaagaaataaccatcctgcaggcttcaaaggacgaggtcagcaatatttcccaacatggcttgggggaaaaggatagttttgtctccttttgtattcaagtaatgcaaagtgcatttttgtctctaagtagcttttgactaaaagactttgtagtgtaaagggtgttatacaaactgtaatggtgtgcttcaaacaaatgctagaccctttcacctttgtcgtatatacaaagctgttaattatgtggtatgaattaactttgaacatgttgaaatatgtagcatgtctttaactcagacgaagattctgattgcacaggttgtgttctagccagttgtgatttatttgttcagaaacacaaatgtgaattgcactcttatcatcagaatattgtatgagttcagtgatctttaaacagctcagaagtaatacttgaacttcatttgagtagcacaaagtttacatagccccttttaaatgttaattcgttccatttaagttttccattttcagatgcaactgggtatttttcctcttggaaatagtacgtactttgctttggtatgtagcaaaaggcttccatttctggaagggttttcttgttcttaaacaaggtcagccaggtaccagattctaaaagaacaaattgtcccccacccctcaagtggccttctgactgcacgagaatgtgctactaccctctgtagtctcccctaacacgagaggtcagtgaaattgatggaggaagtgcaaggcttgcttcccctcacccttaaagcttaaagcagttgtaagattttcagtccagcacatacagtcccagtgcccagcacaccggaagtttgtatactggcctcttatcttgtcttcaaatgtgcaggaaatttgaaactgtcatctggaataggttccatctcttatgtgtgttagatcaaaccaaagaagcccccagccatgcccaaatgctgcttcaaaagcctgccttccagtccttacaaaaaccttgcaggattaaatgtgttaacttttttatttttgtacagtttctaagtgatttttgctagtgatgttaaaatgaattaagtttatttgaggggtgtgagcacctcctccatttaaataaactggtgactttccttttattttttaaaagtggaaacccgttgtgtgcctctcgatttaagggtttctgatgacattattcttaagaccagcattgatcctttatatacaaatatatgttttccttgttttttattgctatttcagaagaaaatgaaccttttattttgctctacccagtaactgcgctggtacatagacgcactgagcaaacaaacttttgtaaccacctctgactacttttgtatatcaaagttgattacttttgaaatatttggatctagtttctaagttattttagtgttttatatgttccccaaaattactttgaatctgtcaccagcataatgagttcttggtgatacaatggtgagacttgtaatgagcaaaaagctacctggagtagctcctcttttccttctttcttagtaacctgttttttgattaccgtaagacatcacagattacctgaaaccccttccagtataactaggccctccttccttccacatttaattgcttaatagtttgaagaaactattggaaatgggcattttatatgacatgtatggctttacaatattaaatatgagcaaaaagaaaaaatatgagaaggtttatgtgggtctgtaaggtatggctgtggaaagatattgtagtagttttgacactattgttattacctttaaaatcatttacccaataaaatgttaaaaccgagttatcattttatgtttcttttttaagtttaacctctctcatcataggatcttggtctcgtcggtacttcttactaaaaggttaacagttgaaggctctgaaggaatatagttaggaacagatactgatttattgccaaactagcacttgggaaaccttacctgcttgtagccactccctgccatatgatttgccaatgtcatccttttgtctatctctgaatcctggcttgctgatatagattagcctttatttggacaccctaacctggccacattgatcctttaaggatccttcagatcctttgccacagaactcaggcaaatatcagacttgaattctggcgggagcttagctgtgcttaggtccgctccaaatcagtcagtggttattgggcatttcctctttgtgagctggtgaggggcagtagcagtgctattcagttaaatcatctgatatggggaccccttctcctaccatcaaggcttgcccattttctgagtataggacagagtctgaaaatgctcaagatgtggtcacccagagcttgtacgtactcatacacacactaggcataccacacgcttacacttattaccagctattttttccagttccagattggtacccccaacttgggcttgggggaaacacctggattgtagggtagggcaactggtggtattgactttcaagggccagataagagcctatgtcaagaaaggaatctcttggggtgctgcctctgcctactgttgccttatccctttctctatggaaaggctaccaaggacattgtacttgtgtatggaaatacctctggctctttctaaaacatttgctgtctcacgcacatttcaagattagctgctagttgaatatatccaggacaatttctgttacattgccccaaagccctggtaaccatgtaaattttatgacacgtgcttatgtcaatcacagtggctaaaaagtgttcttagatcctagaggactattgtggttttaaccagtgctccataaaggcagccatctgctcaggttttacctattttcatcattcatgtttaatgggacataagatttttcaatgatttcgaccatattaataggttcaggtagaatgaagtagtttaatgagcccacagcattcttttttacagcattagtggttaactctggtctggacaaatttcaacttcagtaatcacactccacctacctaaattcttcccagagtttcagcatttccactttagatttcatgcccctctggaccctgtgtaaatagctttactgcttccgagggcaagtatgggcgtgtaggatgaagcagtgcccctctgttgctgggaaatactaccctatctaaggggtcctatcagtgtgaggtaaggagaagtctgcggtggagaagtcacaccgggattcagagctgccagccaggacagccagtgaatgactgcccattcagagaatggcttctcccacttcctgcagcttcaaccacataagccaagataagtatgggtttgggttgggtaagctctcatagcttcccatctgtatgctcaagcttttcacctacaggaggaagaaatgaatgggaggatgcaagtgaggaaagccctggatatactatttttggctactgcattaaaaggcctgccttgacacctgtagccccatgggacaatctcgtgttcaaacctcaaacttgttggaagaactctttcaagaattggagggaatcacattaggtctcaagcactgttctgaagccaatctacatcctcaccccaagcgcttggttacaaccttgtttagaaatgaccccttaataaaaattgctgtgtatataatgggatattattcagccataaataagattgaaatcctgtcatttgcagcaacgtggatcagcttggaggacattatgttaaataagccagacacaggaaggtaaataccgcatgttctcactcatgtgcgagctaaagaagttgatctcatagaagtggagagtagaatagtggttactagaagctgggaagggttgggagagtgaaaagggagaggttggttaaagtagggatccccaacccccgggccgtggaccagaactggtccgtggcctgttaggaacggggttgcacagcaggaagtgagcagtgggcaagcaagcattaccgcctgagctccacctcgtgtcagatcagtggtgggactagattctcataggagcatgaaccctattgtgaactgcacatgtgagggatctaggttgtgtgctgcttatgagaatctactgccacccaccccatccgtggaaaaactgtcttccatgaaaccggtccctggtgccaaaaaggttggggaccactgggttaaaggatagaaaaatacaactagactggaggaataagttctggtgttctatagcactgtagggtgtctatagttatgaatttaagatatatctttgtataactagaagacaggattttgaatgttcccaacataaagaaatgataaatgtctgcagtgacacatatgctaattaccctaatttgaccactatacattgtatgtattgaaacatcactgtgtcgctcataaatatgtacaattttgtatcaattaaaaaattaaaaattacctcttaatgtattatgtttggaaggtactgactatatatatctcaaattgtttaaatggacccacccagagagccggtggagggtgcagctatacgtaaaccaacactgacctgcacttacagctttccatcatgacagatgattacttaatttgacagaggtgagatgtagagtatgctctctgtctgcagcacacagctgggcagtggctgaattacatgcctccgtgctcaccaactgccatggcatctttgagctcatgctcccattctaaaaggacacatccaagtcacaaggggcgggtaatttgttccccctttagtctccctccatggtgggagaagctctttgttttttactcagaatcttagttggcacctcgttatgttaaaaatcagattgaaagaactatttcatcgctattaagcacaaatgtatacaagctacttattaaggagaacgaggttgttttgataactataaaatgttgcaactgggttgaatgaatagtctcagcggtctatttctatgttttagctctacaacaacaagaaggtcctgatttgcacggagatcagattaattttatgaaagtgtgtacatataggtctaaagtgtaaaaacccagcacagtccacagctatctgaagcttacaagaagttcgggcaggagaagcataaaactcctgaggtttgaagacaagtaagtaacctgatggcttctgctaacccactggtggtcttcagttgccattctgtatataactaacttaccaggtgttgttaagtgttttttgtttctgtttttattatcacagtttcaaaatattatgtatttcaacacacacgtattttttgaattaaatgttcatagagggccgggcacagtggctcacgcctataatcccagcactttgggaggcccaggcaggcaaatcacccgaggtctggagttcgagaccaacgtggccaacatggcgaaaccctgtctctactaaaaatacaaaaattagtcaggcatggtggcgcacgcctataatcccagcgactcaggaggccaaggcaggagaatcgcttgaacccaggaggcagaggttgcagtgagccgagattgcgctactacactccagcctgggcaacagagcaagactccatcatctcaaaaaaaaaaaaaaaaaaagtttatggaaacttggggctgttccgacagaaccccaggatcccacaggacaatcaaaaccactgctggagcctcaacatgcccagttattttgagagcttttgggaagccatcatttgatgaaatgacagcttttttttttttttttggccttttcctcccaaatgtcaggctcaacatgatccatcaatatttattgagtgcctgtccctccagaggcatggcaccttgcttggttacagaatgaatatagtataattttgtaagataaattaacaaacagtccactctgggctaagagttgtaaggagcatatgagtttggtctagttgggtaaagtccttcagactggggcccaggtaacattagggttttatagggtttcactaaatagcttccacctcagtggcattagaacatagttgtaactgcccctgttgagaaattatatttctttgcactccaatatgtcagcaccagaagccaccccatactggacatgatcataatttcttgagtggaggagactttctgttcccataatgtggctctcttgctccttagcaggaatatgcaaggtggctggaagagaagtgatgtgcttgtataagaaataggtttggacacacagaatggcattgggtggctgcgagttgtgttctttactgtgaagctgccctctcagaggcattgggcccttcctatgatgaggcgataagaagagacagagagaggctaggactctaagaggctatcttgaggcctgaagaggagaagacagtttatagtatgtttactggttgaaaaattaccccacagagaaaaaaatccattcatgaggcagaaggaaagaatagtaagagtaaactacatggaaaggaaaatcggagtaactttcagaatcactagctatgcataaaggacaggaaggcagtattaaatgtgggctcttgtaaagcaggaagcgcaacttgtatacaatagaatgtttaaatcacattttaactgacaggaagctgctgagagtttccaaacatcaggcagatattgaaactaagagctgctatagtcactttccatctaaatggtattttggaatgacccaaggttaccatatgggtcaacatgtataagtgggtttctgtgtatcagcataggagatgggggctggccaaacggctggatggaacaatcatattccccactcccacatatcctagcagaatggaaagggtgtcttggactggacagagtgggaaacccccatcattttgagggacagtgctggtgtgagtaatgcaaacatttccctaagctttctctacttcagacatccaaatgaatttcaggaactctgcatgaagacattgccaccctgctggcatatgcctcagcaatggtctctttcccagaattgtggtcggggcagatgtgggtagccatagtgacctgtgtacatgaagtcatgctccttggtgaattggttcttgtttatctggcctagcatatcttgtggtctgtggtactcatgaatgatggggcttaaaagggaaacatggggttaatccagttgttggatccaaataggatgggattgttcctgttgggtagatgggtctaactggccctgcagccttggagaaggtcaaatagacattgctaataaatagtcagcagtaggctgggaaagtgcaggtaacatcctttgctctagggaatgttacacagtgggccctgcaagcagggtgcacaaagcacttgaaagtgaaaaagaaacacctttattttcaacctccctccattttttggacatttttataggaaaattcatataacatacaattaaccattttaaaatgcacacttcggtagttagtgaattcacaatgttgtgcaacccctggctctctctagctttaaaactttttcatcactccataaaaacaccccacacccattaagagaagtcactcgccaagtcccacccccaacccctaagtaacctctaatcttccttcca

SEQ ID NO: 703 - DNA, 1364 bp, Homo sapiens
gcgcgcggggcagccgcgtggctaggcagacggggccgggagcggcgcgcgcgcgccccgccagcctctggcgcgcccccggcggcctgagccgcagcgtgctcgcccccgccgccagctcgcctcacttatgggtcggaaacgctgcgtgggggagactgttccaagatggcggcgggttgctgcggggtgaagaagcagaaactgtccagttcgcccccctctggctcgggtggcggtggtggcgcctcctcctcctcccactgcagcggagagagccagtgccgagctggggagctgggactaggaggcgccggtacgcggctcaacgggctgggaggtctaaccggaggaggtagcggcagcggctgtaccctctctcccccccagggctgcggcggcggcggcggggggatcgccctgtcgccacctccgagctgcggagtggggaccctactttctaccccggccgccgccacctcttcctcaccctcctcatcgtccgccgcctcgtcctcatcgccgggctcccggaagatggtggtgtcagcagagatgtgctgcttttgcttcgatgtgctctactgtcacctgtatggataccagcagccccggaccccccgattcaccaacgagccctacccactgtttgtaacatggaagattggtcgagacaaaagattacgtggatgcataggtactttttctgccatgaatttgcattcaggactcagggagtacacacttaccagtgcccttaaagatagccgttttcccccaatgacaagggatgagctgccacggcttttctgctcagtgtctctgctcactaactttgaagatgtctgtgattatttggactgggaggtgggtgtacatggcattagaatagaattcatcaatgaaaaaggatcaaaacgcaccgccacctacctaccggaggttgcaaaggagcaaggatgggaccatatacagaccatagactccttattgaggaaaggaggatacaaagctccgattactaatgaattcaggaaaaccataaaactgaccaggtatcgtagtgaaaagatgaccctgagctatgctgaataccttgctcatcgccagcatcatcatttccaaaatggcattgggcatccccttccgccatacaaccattattcctgacactgagccgcacaaccagtcactgggcctctctgcagacctcttcccaggagaccctacaccttcttggtctagctatctcttttactgtaccattttatgatgatagtttccgttgccatggtgaagcttcgacatcgtcaactaagatcatcatggtaacgggtagaaaaatggcatttgttaagatcctg

SEQ ID NO: 704 - protein, 333 aa, Homo sapiens
MAAGCCGVKKQKLSSSPPSGSGGGGGASSSSHCSGESQCRAGELGLGGAGTRLNGLGGLTGGGSGSGCTLSPPQGCGGGGGGIALSPPPSCGVGTLLSTPAAATSSSPSSSSAASSSSPGSRKMVVSAEMCCFCFDVLYCHLYGYQQPRTPRFTNEPYPLFVTWKIGRDKRLRGCIGTFSAMNLHSGLREYTLTSALKDSRFPPMTRDELPRLFCSVSLLTNFEDVCDYLDWEVGVHGIRIEFINEKGSKRTATYLPEVAKEQGWDHIQTIDSLLRKGGYKAPITNEFRKTIKLTRYRSEKMTLSYAEYLAHRQHHHFQNGIGHPLPPYNHYS

SEQ ID NO: 705 - DNA, 245170 bp, Mus musculus
  misc_feature (1)...(245170): n = A, C, G or T/U
tggagggggaaggggatcgtgagtcccactcggggctgagaaggctgaaggctgagaaactattgacaccactccttactcaggagctatttacaagttgatggcttctggggaggaagggtcagttttttttaagaatttgtggttcctgataggtcagtgctccagtggatggccccacacctatgagtatttggactcaggattatttgagagagagagagagagagagagagagagagagagagaaagaaacacaattgaaaagggtgtgagtagggagtggacataggagaagttggtggaagagtggacgtgaatatggacaaatacattgtatgcttaattaaatactatatttttaaaaaatgaagaatcacccttgggtctggagagatggcttggcagttaagagcactggctgctcttccagaagacaccagcaaccatatggtgtctcacagtctgtaactccacttctggaggatccaaagccctcttctgacctctacaagcaccagaaagcattactctttataattgcataagttgatcgtttgtagttcattgataaagttatannnnnnnnnnnnnnnnnnnngccacccacgccccagctctctttctttttttctaaaatgtaattctattttaagtgtgtcttgtctgtatatatgtaagtataccacatgcatgcagagatcagaagaaggcatcagatcctggcactggagttatagatgttgtgagctgccatgtccaacataaatcctctggaagaggaaccagtgctcgtaatcattgagccatcgctgcagcccctaagttgcttttggcagagtattctagtacagcaacaggaacgaaacaaacacatagaggaactctgtgtttaagagtctgaggaatggctagattgctttccaaaggggttgttttctttcatatccccagcagtagtatatatgaactccaatttttctgcatcattgctaatacttattgtcagtggattatggtatgtatttgatcagctctcatatgcttgtctaaatacacaacttaagcaaatagttaatagtaatattttattaatattttttattatttgtttttattttttatttatatgagtacattatagctgtcttcagacacacaagaagaaggcatcggatcctattatatatggttgtgagccaccatgtggttgctgggaattgaactcaggacctttggaagaacaatcagtgctcttaactactgagccatctctccagcccattaatagtaatttttgagggtctggaaagatagtttaatagttaaaaacggatgctctttcagaggaccagagtttagttcccagcattcacattgagagactcacaaccacttgtaactccagcttcagaggtccataaccctcttctggcacccttggacagatgtgaacatacacagagccatgtaaatatattatatgtattaatataatatattaatataaaaattaaatataaatgatctcatctgggttccaagggcatcacaaatgactgtggtgcacagacatacctaaagacaaaagatccatacacatgaaagcaaaataaataagcaaagagcagtctgtgaagaggtaacaggcttgagaaagcttttataacagagttcttctaaaggatcaaaatctgtagagccattgctggatagtctctagctccagaaatactgattttaaaaataatttctgttggcttaaataaaacagctggtttgggtcaaacttaagaatgagtttcatggactcagaaatagttccacttttttttttttgtcacacaagtcttcaaatgtaatccttattgcatgttaaggcctccaccccctttaacaaagcaagtttaatactctggttccaaaatggaaataattatggaggtgaccaagtctcttagtctttgaatccagcacaactattttcatagttacagaactggcatgtctaatagtttggaaactgtttgcaaacacatagtccctaagagattctaaagcttaaaaaaaaaaaaaaaagagaacagcttcttaggctgtgctcttgtgcctctttgcacatcagttagtgggtggagtctcctgaagataatataaggcatgagagataaacatccactttaaaatcaacatgcacttctgtttctccaagtcccaaaggaaatcaggcattatcagtcagatgtgctaaactttcttttgcactcacattctaacacaatgaaaaaaattgtctagttgccagatatttcattagtttctaagacaaaagcactctttcttcatactgttattgtgtctaccacttctgggtattattaaagtgcacagtcatgttgggagccaggtacagtggcacacacctctaatctctgcacttgagagaccgaggcaggggaccagtctgagcttgagaccagcctacgctacatcatgaaactatgtcttaaacagacaaggaaataaaatacctcaacaataaaaaaagctaaagctaaagcgatacaggagtctcagtaagggctcacatattagaatggaaactcagtaagggctcacatattggaatgagcaaatgagactgcaagagcagctgcagtcttatgtagtgcaggctatcctccaagtcactatgtagtggagcatgaccttggtattcctgatcctcctgcctctacctctcaagtgctagggttgcaaaaagtattttttataagtatggaaaattttagatataacctttccaccattttttttttttggagagagggtctcagtctgcagtctaggatatccttctgtgtcaatgtcttaagtgcttgaattccaggtgtggatcacttggcacatatgaaaacctttgagagactcgtgtagtgcgtggcctttcctctattcattattcacctaaaaacaattgtccatatctttaggttttatttcaagctgttgcttcccaactttttcttttgtattttatgcttgagtattttagtgaaaatttgggacaccgtctcacctcacctgcgggtaatatggaatgcagctgtaaatgtctctggatgtttgtctcataagccctaagctatcattggacttacaaagtaaattacattgaggtgaacgtcttcactacttagtaagttcaggaacagtctggtacacagcataccatgtcccagcaaacaagcaaaactaccctttgagatcatggtatcttggatccacatttaagttttccttgtgagtagcagactatatttttattattaatttttttgacagagggtctcacagtgtagtatttgctggtctagaactccctatgtagaccaggctggcctcagactcatagaggtcttctggctgctagcttctgagtactagcattaaaagcatggctcatcatgcctggcttgaattttttttttttattatgtgaaattttagaaatccacaaaatacttagactaacaaaatgatcccccttttacctattacctcccttagcattaccaacccacacccactgctttaacctgggtgtggcagctcacatttgtcatcttgccatttggttggctaagaggagaatcgtaataacttgaaggccagcctgggttacaaagtgagactgtgtgtctcgaaacaaacagatcttcctacttccacctcccacggtcaaagtttgccgtcatgctcacagataagtgagtgaatagaattttaacctagtttaagcctgtttctgtgtgtaaacagagagggaagtacctgctgggtgttttaggaagtaaacaggaagataatgctacactgtcataacttctatcatgtgaagagtatctacctcagtaaatattggaagtggctttctgtggattttgtgctacagaacattaaattcgaataactttttctttcaagacagggtttcagtatatgtaacctaagctgtcctggaaacaaccctacaactgtttcatggataatcccacatgctcacctgataacccccttattgatctttcaggctagcattatatccactcatggaaatcagtcatttcctgtgggcttttttttctgcacaggttgttaattttaagggtataacctacaagtggtttgttaaaaggtaagtacgtaatgagaatagctatgggccattagcagactgctcaccagtggtcctgtcctagtatagggaatcttggcagtgaaccaatggtgttaactataggtctgaaattttttcatggtaattagggaagaaactggttagttagtacccaaccagttgttttgattcctggctacacacttgactacatttcccaaaatccttttgctatgggtatataccttgtttttagccaatggaaagtagggaggagtgatctaggcctcttctgggctaaccagtaactccactgtgcaacatcttccatgtcttctctttttactgttagtagatgcaaggggtctagcataggtacttgaggtcttaggaaatggaggttacagtagtgttcttgaatgagctttacaaaactatgccttctacagtgtcgtgttgggctgtgatgagattaaaaaattgggtttgactgtcccacctggggatccatctcatatacaattatcaaacccagacactattgtggatgccaacaagtgcttgctgacaggagccgggtatagctgtctcctgagaggctctgccagagtctgacaaatacagaagtggatgctcacagccatccattggacaaagcacaaagtccccaatggaggagctagagaaaggacccaaggaactgaaggggtttgcagccccataggaggaacaacagagaaaaaaatgtggccaggggaacagaattccctctcatactgatagacttacctgaactcagtattagcaagaagaaaaagttaaaatgaaataagtgattatttggtgtcaaaattgagcactccattaatttccgcccattattaaagtttttttctttagaaaagatattactactactactattactacttctgttgttgttgctgctgctgctgctgctgttgctgaatagccctggctggcctagcacacctcatgtagatccaacaattcacaaggtctgcctgctttggccaagtgctggggttgtaggcttgaaccactctgattgacttagtaagaacacttaatgtggcacgttccctctgtcgttttctaggttacatattactgctgccagaccccttccgaatgttccccttcatcttggctggtcaggatctcccctgcagcctggaggcttgcagcagaagctgctcacctgtctagtgcagttggcttttttcttcactcaggctgccgaggagtctctggtgtgcttatctttgccagggtcatcctctctccccacccccactgtcccatccatttacccttcccagatccatttagtctcagcagacaccagtnnnnnnnnnnnnnnnnnnnnttgttgagtcttcttgggttagcactggctcattgactggtttctaatttccaaactcccacagtacttagcccggggtacacaacttagcacttaattatacattgtctcatttagttttctttgttgtgctaatccttgacttttctagtgaggttgttgattccttgaaagctacatatcgtgtattttttttttaaattctttgaagtattccagcacacacagggtaagcaccccttgccttatcaataaatattgattattttatttatagattgacaggcatagatgtgagacttcctccagatcaacattttaataatccacattgtaatatctgctgcttgataaatatttgtcagctttattgaaccggcttgagtaatgaaggaagcgagctccaaatgtggtacccagttggacaactcatacctgtcaaatgaggattaaaatgccttcttgttggtcctagtgactgtattatttctctgttgctgttctaaagtcaccatgatcaaaaacaacctaccaaagaaagagttgatcttggcttatggttctagagggatacacatatccatgatgtcggggagacatgaaggcaaatggtagacctggtagaaggagcagagagctcacaacttcaaccacaaccgtgaagagagtggactggaaatggtgtgaggctcataattctcaaagtctgcccccagtgatgcacctcctccagcaaggccatttatcacctatacctctccaaacagtgcaaccagcaggaaaccaagtgttcaaatatgtgagtctgtgggaggcctttctcctttggaccatgacagggacatgcacctgtaattctagcatttgggaagtagaggcaggaggatcacagacttgagggcagcctggtatacaaaatgaggtcttttctttcaagaaagtgtctttctgactggatgaggtgttgcaggcctgtaaccacagtacagagcaggtggaggcaggaagatcaggagttcaaggccagcctgtgctacaagagaccttgtcactatctatctatctatctatctatctatctatctatctatctatctatctatctatcatcttcctaagctaccttagactagtgtgtacaacaataccatgtaaagctttttatatcagtggctatgatatcctatatttgttcttgcaggagtgcttgggggaagtgaggcttgttgcctatcatatagagcagactactctgtcatgtggctactcttcaggagagcagagacagattggaaaagtaggaagagaataacctatctcatggcttctatgttcctgaaaaggcatgacagtcatggaaagtgtgatgagattttgaagtagaaattttctagagccagacagactctgctatttctctacttcatcctttgtgtattgctgcggtcgtctctgtcagcagttctgaagcaaaatgtggaatgaggaatgaaagctttgaaaagagaaattttctgcatttgtaagcaaacctaggttcacctcctgttgagtgcaaagctaagacaggcaagggcagggcagggaatatgagtgctgaaatgttaataactttactgggtaagatgagttatgtccgaaacagtaccttagtgaacaaaggaagcatggggattttattccaggagtggacacacatacatatatgaaaaccctttatgggcaggcacatttctgagcatgctcagtttaaggtgctagttcaaggagaagacacacatttctggttgtacttagcttatggtcatttagccagtgttcagaaagctacaaaaaacaggcaactcttttggacttgatcagtttgcattataaagataacaagaatgcctctggctttgttcaacgttcttgctaaagtcttatgaaattttacaagcagaaaaaaaaaaccagacagtgcatcggagcttgtctacacgttcacgtgcacttagctgctaacatgcttgggctgaatctttactttttcttctctggtactggaggacagacttgtgtttggcacatgctgagcaaatgctgtgctactgagtcatacctccaccatgaatcgtctatattttatttctccagagtccaaaagggaagtataactctggctataattgaggttgacacgtttcttttttcttttgtacatctctttcttcccttttccttgtctgcttttccatcttttgacttcttcattcttttctcttccttccattggtccttattttagttgactataatatcaaagtgtgcttgttatccttgatagtatttttgacttgttttcggcttttgcttttttgtgttgttactgttcttgcaatgggtcttctctggagtggtctctgtctctggagtggcaggattacaggtatttgctacatctgactgcttcacgcttttaataaaaaactgtttgggatggaatatatatatattcttaatacacacatattcttttatccctcttttatcactatgtagccctggctggcatgagactcagtagcccaggctggtctcaaactcacagagatcctttggcctctgcatcgtgagttctgggtttacaaaggtatgtgacaccaggtctaggtctaacaggtcctttaattagtgtttaatcacaaagaggtttcccctttttggttagtgttttggcatgaggcatgcatgtacaatggttacatttgtgcaactcttctcaagaacaatggcacttaagatttttcttttggaacccagtgtggtggcacatgtcttttatcccagcactcgggaggcagaaacaggcagatctccatgagtttgaggtcagcatggtttgaggccacagagagttctaggacagccagggctatgtagagagaccctgccctaaaaaataaaaaacagatttttcttttggaaaaaatgcaaatatacaagacttataactgacattttcaacactgttgtggggcagacgtttttcttctagtatattatttgtggatcccccccccttttttttgcaggctagcttgtaattcacagtgtagctagagtagattcaaaattttggtcattcccctgccccagcctcctagtgttaaggttacaaacaagaaccaccacacttttggctagagcaatagccatcagggaagaagcccatttgaacacacacacacacacacacacacacacacacacacacacacacacacacacgcacacgcacacgcacacgcacactgggttttaaagttctgagttccagtgttgacttttttggtaggaacttggacaaataaattttggacaaaatgtaaaaaactgttgttttcctgccaaaagaagtgttttctgagccagatgtcttaagaaaagaccttgtctaaaaaaaaaaaaataagaaaataaaaaaatccttccagaaagtgaggactctgtgttacagaggtcagtactttcaggacttaagaagcataaattttccagatagtgtctctcaccaactgtttcccagatttcagtcaagcagtggagcataatggacctcatatctgaaaaacaaacaaacaaacaaaaccccaaaacgcctcttcccacttctttctcaaggaccttctgaagtaccttcttcaagaaataccttctggcacttctcagtaaggttcaaatccagatcccagccatacctgagaaagtggccaaaccccatcatctctggggtgctgctgggaccccattcacatctttgtttttgtttgtttggttgtttttttttttttttttttttagcttttcaggacataggaggaagggaaatccaactttttgtgactggtcctttttctaattggacaccacatccctatgggactcctaatgagacaacatctcagttttccccatcccctgaaaaactctttttcttgtgtgtgtgtccagatgttcccttcttagccagggtggagagcccaagatgcccctcaggaacacggtgggctaggtgggcgttggcagcagctctctctgcctggcctcccttgcagagcaggtgaaaggcttgggagggcggcagccagagttgcgttccttacctggcgaaggggcggagcggggcgggctttcggggaggggcccaggtgggatttcgggctgtgattggtcagcgccgcgcctgtctccatgtgccgcgcagaggaggcacaacattcaagcccggagggggcggggccggcgctctcttggaggaagcggcggcgctgcagctgcggggcgtgggggcggcggcttcggaggccgaggcggcggtggtggccctggcggcagcaccagcacctcggccagggaaggcggtcggttcggacgctacagaaggccctatggaagtggcagcgggcggaggctgcggcgccgggccgcctttgctgctgagcgatagcgagcagcagtgctactctgagctcttcgcgcgctgtgcgggcgctgcaagcgggggccccggacctggtccccccgaggctaccagggtcgcccccggcactgccactgcggccgctggtccagtagctgatctgtttcgagcgtcgcagctgccaccagagacattgcaccaggtatgtctctgcgctcttttatccctctctggtctgtgggggcagtgtctatgggaagaatggggcaacaacgactattcccagggactattcccggagatctggagggcggtggccaggcccgcaaaaaaaaaaaaaaaaaaaaaaaaaaaaaaaggggggtgctctcttgccgaggatggcggcgacgcccttgtccccagggacaccagcctcctctgcagctcatctgctcctagcctagtgcttggctgtgctcttcgtctcttgagaaagtctgacacccctatcatatctgggggttctacaatctcccagacccaaagtttgccctgttccgaaagtgatgtttgttttggctgctgtttgctttaacctctgttccttgctcctgcccctccctttgttgactacactctcggggtgccttgttgggatttgaacttgaagggtgtgtacatgtgtgtctgtaggctctgggcctacagctacatgttgtcctttatacttgtgatatgtacatatctgctacatagatttgttcactaatgtatttctgattattagtatagaactggaaaaccttaaagcccaattgtagaacagggactcagggctacaagataggaacattgatcaagttcaaagtaagttccccatttgggtccaggggtggattcagaagtctacagctgtagtttgtcatcttattgtcacttgactttgacgtggagttacgaaacagacggtgtcatagcttctgtctgtctgccccgtacctggaaaggagggaggagtgattcactgcaggtgctgttttgtgctttcctcgaggcttggagaaattgcttgggaagccctttgtctgtcggttgatgttaccagcagtaaatggggatcatattgttaatatcaagccctaaatgtgaacctatacttaaaaagcaatagtgtgaaagttattagcaacaatggaatatttacagtggtgagcaaatgctttaaaatgtagttcctaggaagtactgacggttttatggttcacttatcatatctttctctgcctttgtgaggcccgctttctttctttctttctttctttctttctttctttctttctttctttccttctttctggcactcaagactgttttatactgctggggtatacatagatgctcctatgtttatgagcataattttagccacttggttcacctttcgaattgaggatttctgaacatgattagtattcatagaatttagcatggctgtttgttcctgtagaattctgtgataagaagatagttctgccacagttgctaagcagttgagttgcacggggtgataaggaagttggtgttctgaaagaaactattacaaggacctcagaatactgctgagcataataaatttactaaagtgtccgaggcaatgcaccaaatagttgtgctgtacatctggccgggattaatttgtggacagtaatacatcaagtgtgataaaagaaaagggtgtatgaaaattggttgaggttttcccaggaattggagaggggatctttctagtgtgataactgatgctttcttgaagaacatataatttaaaaagaaccaaaggtactcagcccagagaaataaaacacagcccttttaacataacaagttagaatggcccattactcttggtacaggtaacaattaacatttaaagtcaccctgaactgggaagggtagtcaaaactgggatctagtggctatctaacttttatctaccactttggtgatgtgtgtgtgccctgtctgacttcatttgttttaattcattagtatactagcgattttaaaacaaatgtagaaaacttccccctttcccttctaaaccgaaacctgtaagttcagatgtaagtggcccaacaggtataactgctcaaatcatggagacagtaaccagacctggtagtttctatggttaatggccagattttcctcttaataagcatacgattaagatgactgtaatgtagggctggggatttagcacagttggtagagtgcttgcctagcatgcatgaaagactggattcagtccccatcactgcacaaaatcggacatggtggcacatacctataatctcagcactctggaggtagaggcaacaaggtcacaagttcaaggtcacgctcagcaacatagctaatttgaggtcagtctgggtaaatgagactttgtcttaaaatgatgattattatctaataactcacagagatccaatgataggccatccttagacatcaagataggttataaatattgtttaacatgtactatcaggagaaacctttaaatcgggaagaatcccagttagtaacatctgattgtcagataatagattaaggcaaagaagcacgtcctggctgtgagaagtaggtttattttattttattttagatttatttattattttatacatataagagtttttcctgtgtatgcctggtatgcaccaaggtcagagaaagggcatcagattcctgggatctgcagttaccaacagttgtgagctgccatgtgagtgctgggaattgaactctggttctctgcaggggcagcaagtgctcttaaatgctgagccgactctttagctccataggaagattttaacatctctggacacaggcttatctttgagaagtcattaaaaatttcaatttaggttccctcgtggctcaagctggcctcaaactctctatgtagcaaaagttgaccttgaactcctgccactatctcccaagtgctacttatttgaaaattaaaaatatgttcaaaataaaactgcttaatcattaaggagatccacaggtaaaaggaaatcaacaaaatccttatcaggaaaactttttcctgttatgagattattagccagaactatttatttaaattttaaatagtttttcctttggagataatataatttctccttttttctcttttacattatttccccttccttttcccactttcaaaccctcacatatattattccttgctctcacttaaatttatggcctcttttgaaattcattgttgttacatgtatattcacatatatgtatatacatatatcttcctaaatctaaccctctcggtctgtataatgttacttgtatgtatatgttttcagggctgaccatttggtattggatattggatatagttgatatgctcttctctggggaatgctgtttctcccactctcagaatctcttagttgctgttgttctttgtatagagtttaggcaccccaggcagtcctaggcgagacaatctcacagcaaactccctgaccctctggctcttacagtcttcctactccctcttnnnnnnnnnnnnnnnnnnnnctggctcttacagtcttcctactccctcttctataatgatctccaagtgctaggcatgagggtgtgttgtagaaatgaatggtggttttgttttgttttgtttttttgagacaaggtcttatgtagcccgggccagtctcaaactccccaagtagatgaagaccactttaaactcccccagtcctccctctacttcccaggtcctggggatacaacctgccaagtttatctttctaaaagtgaatagataccagcagatacagtaagtaccacattcaagacactgtctacttaaaaggatgtttgaagtatggtgcagtgggaggcatgcctaaaatcccagttctagggaagctgaggcaggaggatagcaagtttgaagcctatttgatctgcatagtgagacaatacttcagcatacacgacttttaaagattattttctacttttgttatatatatatataaatgtcactaaaacaaaacatttttacacgttattttagtttaaaataagacattgtattctacatcaccttctacaacttgtttttcctctcattgttatattttttttggaatttgtccttgttgacatatgtcccgtcagtttgtttgcttccttttgaaaactttattacccacgctgacagtgagtcatcatgatattgtggaaatctttatgccaaaggaaagtaggtgaccttcttgatttatggacaatgtaacatgactaaggattgttccaaacacatgaacatcaaaaatacctcattctattcacatacaatgcacactgtcattagtgagtgtttttcagtggtcttttaatcttatttatttatttatttatttatttattttttggttttttgagacaggtttttttttttttaaagatttatttattacatgtacttacacaccagaagagggcgtcagatcttgttacagatagttgtgagccaccatgtggttgctgggatttgaactctggaccttcggaagagcagtcgggtggtcttacccactgagccatctcaccagccccgtcttttaatcttactaagtttttctgctagagaatattctattagcttttgtaatcaaatccacacagataagaccttatatatttaatacagtatacaaatgttaaagaaaaaaaccaaatttaacatttctaaatcagtatggctgttagtttctgtgcaatgccaactcaacattgcaaactggggtagttttttccaaagttgataacacagtttccaaaaattcaaattcatgcatgcacagacacatacacatacattactgaatccatttaatggtgctcttatgtacatgtgtttagggttgaccagttgggatctcttctnnnnnnnnnnnnnnnnnnnnnnnnnnnnnnnnnnnnnnnnnnnnnnnnnnnnnnnnnnnnnnnnnnnnnnnnnnnnnnnnnnnnnnnnnnnnnnnnnnnnnnnnnnnnnnnnnnnnnnnnnnnnnnnnnnnnnnnnnnnnnnnnnnnnnnnnnnnnnnnnnnnnnnnnnnnnnnnnnnnnnnnnnnnnnnnnnnnnnnnnnnnnnnnnnnnnnnnnnnnnnnnnnnnnnnnnnnnnnnnnnnnnnnnnnnnnnnnnnnnnnnnnnnnnnnnnnnnnnnnnnnnnnnnnnnnnnnnnnnnnnnnnnnnnnnnnnnnnnnnnnnnnnnnnnnnnnnnnnnnnnnnnnnnnnnnnnnnnnnnnnnnnnnnnnnnnnnnnnnnnnnnnactggttttcactttgttctcacagcagccattacttgcctgtagctctttatctagaggtggggctttgtggaatttctgccatccacattggaatgtcaattgttgtcattatgcagatcttgtttatgtaaccaaaattttgagatttcatgggtgtagtttccttctcgtatagaagaggcagtctgttagcaggtgttctgatcctctggctcgttctgtctgtctgtctgtctgtttgtttgtctgttcgtctgttcttcctcaattttccttgagctttaggtgtaggagttgtgttatagttacaccaaatggagctggcaccttgtggtcatttactttctgcattttgaccagttgtggctttctgtcttcttcaagaagttgctttgatgaggtgtgagaattccacatatctgtaggcataagggtaagtatttagaataagctagaaattctattggtttaggaaactggtagtagtaggttgtcctgtagaatgtgtggcctctctagccatggatagttgttatatagtagcagaccagttctagacaagaaatcctttctattgagcattccttaagtccagttagacagctgctaccaacaagataaagttctgttattggaccattggtgaaatcttgtgggtcaggttattgttgtagttcagagactttacagctggctaggactattgatttttttcctcccttggcagcttacctagcaccttctgagtctatgaaagctagtcctgcctttggaggggaggcgttctgctcagctccagctcaggtattcagccatgggcaacagcagcagtagattatattgtttagggagtctcgagcattatcactccatgtagctcagctccacctcaatgctctctctctctctctgtctctttctgtcattgtctgtttctttgtctgtgtgtttctgtgtatctgtatatacacatatttatataaggtatatatttaagtgagatcataaaatgtttcctgatggcttttaaaaatatccttagtgttatttatctcccctgccccctttccctctgtattactctcctccctccctccctccctccctaaagactccctccatttctctctttctcctttcatagcaactgtgttctatatagagcttcttcctgcattgcctttctattttcttggctcagatctaaaggtttggaggtaagatccacatataagagagaatacacagtagttgtctttctgggtttgggttacttcacttagtatacagtactttccagttttatccacttatctgaacttttttatttttttttaactgccgaatagaattccattgtgtatgccacctttttaaaaccacagaatcttgctgtttgtggtggtgcatactggtaggcaaatgctgaaaaggattagaggcaggaggagtttcaggccagcctaggttacattcttttcctttttgttctttgtttcttttttgctgcacaacnnnnnnnnnnnnnnnnnnnnnnnnnnnnnnnnnnnnnnnnnnnnnnnnnnnnnnnnnnnnnnnnnnnnnnnnnnnnnnnnnnnnnnnnnnnnnnnnnnnnnnnnnnnnnnnnnnnnnnnnnnnnnnnnnnnnnnnnnnnnnnnnnnnnnnnnnnnnnnnnnnnnnnnnnnnnnnnnnnnnnnnnnnnnnnnnnnnnnnnnnnnnnnnnnnnnnnnnnnnnnnnnnnnnnnnnnnnnnnnnnnnnnnnnnnnnnnnnnnnnnnnnnnnnnnnnnnnnnnnnnnnnnnnnnnnnnnnnnnnnnnnnnnnnnnnnnnnnnnnnnnnnnnnnnnnnnnnnnnnnnnnnnnnnnnnnnnnnnnnnnnnnnnnnnnnnnnnnnnnnnnnnnnnnnnnnnnnnnnnnnnnnnnnnnnnnnnnnnnnnnnnnnnnnnnnnnnnnnnnnnnnnnnnnnnnnnnnnnnnnnnnnngaagatgtggtatatatgcacaatggaattgtattttatgtagctataatgagaagtgaaattgtgacatttgcgggaaaatgaacggaactggaaatcagcacggaaagagaaatatgccagacggggaaagaaaatatgtctttttttttcttgcagaatctagatttttttttttttggtgtgtgtgtgagagaggggaggggttgagatatgaaactagaaaaatcatgcaagggaaggaagggatatttagggattgggaaggggtaaactagagtaatggaatacatataatctgtgggggaataagggaccgatacgtgggcagtgggcagtagcaatagagaggacattggagaaaggggatgaaatagatatggatctatgaaaaggaaacagtgaagcccatcaccttatggtaacttaaaaaattaataaaaagacaataagagagaatacttggagaaagcaatagggggattgaaaagtaaccaactgaagtccagaaataaaagacagacagctttgaaaactgtcctagttttatgctcctaatttgggactggcctgctttaaggccataggaaactggttttgaggtaatcttgggttattttgctaattatttgaaacctctataaggtggtttggttcctttctagctcctaccccccaaatcctagttttctatactcaagtaccttattgtttgtctttattgaattctgttcttgcacatccccttgactgaggcttcctgcagctgggatctctagactttggacagcccctggcacattggaacagttggctctccctctgttggtaactgcagaatccatctgtttctctcgattgagttgccacaaacttaacaccttaagatagcacccatttagtctccccgagtttctgtgagataggagttccttaggggtttcttaaagcttcagtcagtcaagatgtcagctgggctacattgcttctggagctgaggaacttcacattccaaccttcagtggctgttagtagagtagaatacagttgcttgtgctttgaaagtttatttatttcagttcttgttaggtaagcccccaccactgagccacctcccaagtctgcttgtgattttaggactaagaccctgagctactcaaaagcactgacatggtcctctttttttttttttttttttttcaatttgcagcacagctgtttgcttcttcaaagctagcaggggattgtctctctccagccagctaggataaatgatgtcctgtcacctttgatgtaatctgctggctagaagcaggccacaggtcctgtcagtatttggggagaatgctaacaataggaagtgagaattgttgcaaggggagggataccttaaggtctttgtattatgcttgctttctacgttttgtctgaagatgaacactattcttgtgattagttttttattaagaaacagcattttttgagtcagggtttcccagtgtagcctaggctgacctttgaagcttaggctctattcacatttatagtctttcccccttagtttccnnnnnnnnnnnnnnnnnnnnnnnnnnnnnnnnnnnnnnnnnnnnnnnnnnnnnnnnnnnnnnnnnnnnnnnnnnnnnnnnnnnnnnnnnnnnnnnnnnnnnnnnnnnnnnnnnnnnnnnnnnnnnnnnnnnnnnnnnnnnnnnnnnnnnnnnnnnnnnnnnnnnnnnnnnnnnnnnnnnnnnnnnnnnnnnnnnnnnnnnnnnnnnnnnnnnnnnnnnnnnnnnnnnnnnnnnnnnnnnnnnnnnnnnnnnnnnnnnnnnnnnnnnnnnnnnnnnnnnnnnnnnnnnnnnnnnnnnnnnnnnnnnnnnnnnnnnnnnnnnnnnnnnnnnnnnnnnnnnnnnnnnnnnnnnnnnnnnnnnnnnnnnnnnnnnnnnnnnnnnnnnnnnnnnnnnnnnnnnnnnnnnnnnnnnnnnnnnnccacccagaaaactctgccaggtatgcctttaattcaagtacggaggaggtagaagcaggtggatctctgggttagtgtctaagccagtctatgtactgaactccaggacaatcaggactacacagagaaaccctgtctcacaaagaaaggaaagaaggtgggttggttgatttctccactctctgacaagatctagtgtaactcaggctgttcatgtactccttttcctgagagctccactggttttcatgtataactttttttttttattccaagtagaactggtaagtccattttcctagatattttccactttactctttaggtaatttgttttccctcttaattcaaaggaggtaggaaaagaagtagaaaaacatatgttgctacagagaatgttactcagtggttgagtaattccctaatgtgtgagaggcaggtctgacctctgtaaaaagttacaaagccaggattttgtcagtttggatgttgaaaataatacatattttgagacacagtcttgctatgttgtcttgactggctgtgtgtatccctggccagcctggtactgtctaactttttattagcttccccagctgaagtcgagcatttcactatgtatatggccaacatgtcacaataacatcaccatctttacagaaataggatgtttagctatgtttggtggctcacatattttacaagcacttagaaggctgaggcagggaattgccatgagtttgagaactgcttgggcgacacagttagaccttgtctcacaaaaacaaaaagattttttaaaaaagattatacatttattagagatttatcagtgatggattactgtagattagacattggctgttattattcattgtggtaaaatgtttctactatatttttggtttttattgttttgatggcttatatttcagtatagttttatagtcttatgtgttttatgcatttgtactggctagttttgtgtcaacttgacacagctggagttatcacagagaaaggatcttcagttgaggaaatgcctccatgagatccaactgtaaggtattttctcaattagtgatcaagggggaaaggccccttgtgggtggaaccatctctgggctggtagtcttgggttctataagagtgcaggctgagcaagccaggtgaggcaagccagtacagaatatccctccatggcctctgcatcagctcctgctttctgacctgcttgagttccagtcctgacttcctttggcgatgaacagcagcatggaagtgtaagctgaataaaccctttcctccccaacttgcttcttggtcatgatgtttgtgcaggaatagaaaccctgactaagacagcatttaaaacattatttttaaaagtcattcacataccacaatatgaaagtatctggggcaaacgttacacaaaaatactgcctttaaatacattttgtgtgtgttgcaaaaatagttaaaaggccttgctctgaagagttcatggtattaggagtagaaatagctgttcttcctatctcatcgttgtcccagttgggagtgagtttctgtaaggatgctgtggtcctcctgcttccaggttctcttccaggaagcccagagtgaattggatgctcagcttcttcctcaaatacctgacagccgctgcagtcccatctctgagttgtgctggaaaaaaagagttagggcggattgcgagagccactctggagcaagtgccagctgcttgctgggcctattttctgctcagtctatatgagagcccttagctctaacagacttgaaaggtttgagaaattcagctatcctctctatcagtggttcttacctttccttatgaccccaaccataaaattatttttgttgctactctataactgtaattttgttacttctatgaatcataatgtaaatatatgatatacagtgtatctgatatgggacccccaaaaggggtcacaacgcacaggttgagaactgctgttctgcatctgtaggtaattcaggaccaggagatgctcttaaccttgagctagtaggagaggcttgtttggacttaatccattttagagagaaatagtttggtttcgtttccttggggtttcacctgtatgggtttctgagtaactgaaggaagccaataaatgccagctattaaaatttgtttattaactgaggcctggcagcgcagatataatcttgttacttggggcgttgaggcaggaggatggtagtccccatttgttaggttatcctgaacaacttagggaaactgtctcaaatgttaaaagtaatattttaaaagattggggatatagcttaatgatagagggtttgtctactatgtgtgagggcttggattcagtcccctacattgcaaaaaatttatttaaagggatctttttgaaataatgtttgtcccagatactttcaaaaggacatgtttaacacaataatctctttgtctcttcttagttcagagtcagctttgtgaaaaacagatgtcagtagactaacagctttttgtctcagaggcatttggtatgctgtatcttttgagtttaccgttggaattatatagttttttcctctttaaaattatattttcgtgtgtgtatttgtgtgtgtgtatttgtgtgtgtgtgtatctctgtgtgtgtatctgtgtttttttgtgtgtatttgtgtatgtgtatttgtgtgtgtgtgtatnnnnnnnnnnnnnnnnnnnntcactctgtagaccaggctgaccttgactcagaaattgcctgtccctgcctcccagtgctgggattaaaggcgtgtgccaccactgcctggcactttcatagttttaatattgagagatagcagtaagaattatctatgtaaattttattgtgcggatgtcttagcatcttaaattattctttgttccaagaccaaagtttgaaaaacctcaactctacagacacttttggtctgagaagttgtgagaggttgagcagctgtcctgtgcatgtagaatgtctgacatctgtgatttcttcccacttgatgtgctatttctggtaatgtcttggaggaggcattattgcttttatattcattcggtagatgttggaagtcttggttaaaggtatgattacatgtgtgttgtgtcagtaaagggcatggcttatctcccttttcctcccttttcctcccttttttccttcattttttaaaaatagatacagcatctcattgtaactccaactgtctagtaactcccctgtatccactaggctggccttgaactcccagcagtccctctgtttcagcttcccagagtgttgggattataggcaggaaccaccatgtacttctgggccaaaactaaaaccaaacaaggaacatgtattttgtttggctctttgcctgagacctatgccactagatagattcagctggacttttcctcaccctgcagtttaagctggccttgaacttgctgtctcagctttctgagtagctggaattacaggcaagtaccatgatgcccagctccagtcctttatactctcttctgaaaatagaagtaaaatgagtatgctcaacttcattttcttaggtcagcattgctctgataccaacatcaggtgcaggaaccataagaaaacgaaaggccaatttcgctgatgaacaccaacacagaaatcttcaataaaaccctgtccagcagaatccaatgacatattcaaaggatcataaaccatgaacaggtggggtttatcttgaaattcaggcttgctttaaatacacaaaacaatgtgattcactatatgaacagagtgaagggtaaaagggtaaatggccattttaatagatgtttaacaagcacttgacaaagttccacatcctttcctgataaaaattcttaacaaaataagtattgaaagaaaacatttaacataatgaaggacatttatggaaaaagctccacagctaatctcaaaatcagtggtgacaactgaaagttttttttttttaagatcctatacaaagtgaggctacccactctcatcacttttattcaaaaacagtatgaaagttactagcaagaatagtcaggcaagacaggggtgatagttaagtctgtaatcccagttcttggaaggcggaagcttcaattacatagtaagttagaggctagcctatgaagaccccatatataacccattatatagccccataatggggtatataaaaccccatttaaaaaaggagaggaccagggagatgccccagtagttaagagcactagctgtttttccagagaatccaggttcaattcctagcacctacatgtggctcacaaccatctgtaactcccaggggatccaacactctcttctggtctccttggctattgcacacatagacatacacacaggcaaaatggacatacacatgaaataaaagttaaaaaagagcactagggcaagaaagagatataaatgacatctaaatccgagaggaagaggaaaaattgttccagtttgcagctggcatgattctgcagaaggaaacatgaaagtttgatagaactaataaatgcatctgatacagttggcacacaccagaccaacacacaaagtcagctgcactgtgggcaagcagtgctggaggtcaatgccagagccttatgaatgctaggtaagtgctccctctgtcactatgcttttatctccacttcttttttgagacagggtctctctctgtgtagccatcactggcttgcatctcactgtgtataccaggatgggccaaattcacagagatcggtacgcgtctccttccaggtgctaggaataaaggtgtgtgccaccgtgtctgatttatacacagttctgcttatggtagtcttaaaagaatcagagacgaatttaaccagggaagtgagagacccatatgctgaaaacaataaatgttgatgaaaaaattaagaagaaatataagtagaaagatactctgtgcttgtaagttggatgaattacgatgttaaaatgtctacattagctgggcctgtaagccaagaggtggaggcagaagaatgaggagttcaagggcattcttagttatataattacttcagggctagcctgagccacacgagagcccaaataaaatgttcacattatctaatatgatttatatatttaatgtaatcctataaaatttcaaagacttgttcacaaaagtagaaaaaaatctttagaatttgtgttctatttatgaagatccagactagccaacacagtcttcaaaaaggaaagaaaagttggaggtaccacccttctttatttcaaattattatagaaggcagcaggcaatcaaaatgccataaaacagacttatacatcatttgagcaaactagccatcccagaaatgaattcaagagtatctagttaattagagtttgatgaggccaccaaggagataaaatagacagggatatttatcgctaatttatgaggaaaactggatatttacatgtattataaagaagaaaggcagacctttattttataagatatataaaaatgtacttaaaaatgtttttgcttcatattcaaaaaggcagccaaagtggagaaaagtcccaaatacaaaacctaggactgtaaatcttatagaagaaaacgtaggagaaaggatgtttgatgttggctttgactatttgcttttgagactggagtcttactgcataacccagtctgcctcaaactttaaactctttgttcctgtctctggagtactaaaattatagatgtgcattaccacatctggctctattcctttttataaaaaatatttttctttttgtagtagtagggattgaaacaagggcttctcatatactagataaggtttcaaccaccagtgatccttttgaatatcatgcgtaaacatacacaaaagaagcaaaaacaacaagttgttggggctggagagatggttctatggttaagagcacttggtgctcctccagactacctgggtttagtttccagcacccacatggcagctcacaatcacttatagctctggttcttggggatctatctgatgacctcttctggtgtaccaggcatgaatgtggtacatatacatacttgcaggttaaacattgtatagatatgaaataaaatacatctttaaaaaaacagtaagttaagcctgatggtggtggcgcatgcctttaatctcagcacttgggaggcagaggcaggtgagtctctgagtttgagtccagcctgatctacagagcgagtttcaggatagccagggctaaacaagagaaaccttgtcttgaacaaagcaaacaaaacaaaacaaacaaaccaaaaccagtatgtttttcttatcagcctgaaggacttctgtaccaccgaacaagaaaatagacagcccatgaagctaggtgtatggtggtgcaagcctttaatcctgtcacttgggaggcagaggcaggtggatctctgtgagtttgaatttgagatcagcctggtttatatagtgcattctagaacagccagagctacataatagagggaccctatctaaaaaacaaccccccaaaccacaaacagtagcaagaacaacagcaacaaaagagaaaaaagaaataaagaaagaaagaaagaaggaaagaaggaaagaaagaaaaagataaagatagcttatggattgggatgatgtatttatgaaccatgtgtatgataagttcatataaaaacaaggactaatataacttaccaccaggaaaacaagccagttagacaaatagacaaaggtcttgagtaaacattttcccacagagaacacacaaatggccaacagggatgtggaaaagcattcagattcagtaaccattagcaaaacaaaaatcaaaaccaccatgagaaattacctcacaactgttctgaagggtaattatcaaaaagaggagtgatgacatattggccaggatgtggggaaaagggaaccatagtagactgttgctgggagagtagattagtatagctggcatggcaaagaatatggaggttcctaaagaagacaaaagagcccctcagagactagtctgcgcaggtgagagtgcggactacagaagctacacaacttctgggacaggcagaagcaacacagcttctgggacagatctggtttcgggctccagacatctgggcacctttcctgctagaggagaggtgtcctcccaggatggttctgcctgagcacctgggggagccatcttgggtaccggatccctcagagactggtctccgcaggtgagagtgtgggctacagaagctacacagcttctgggacaggcagaagctacacaacttctgggacaggccctgtttcgggccttcatcttcagccaggaggcaggtccgaatgccagatatctgtgcaccttccctgcaagaggagagcttgcctgcagagagtgcagaaagagaacttcagaccaatttcccttatgaatatcgatgcaaaaatactcaataaaatcctcacaaaccgaatccaagaacacatcaaaacaatcttccatcatgaccaagtaggcttcatcccagggatgcagggatagtttaatatacagaaatccatcaacataatccattatataaacaaactcaaagacaaaaaccacatgatcatctcgtaagatgctagaaagcattgacaaaatccaacacnnnnnnnnnnnnnnnnnnnnnnnnnnnnnnnnnnnnnnnnnnnnnnnnnnnnnnnnnnnnnnnnnnnnnnnnnnnnnnnnnnnnnnnnnnnnnnnnnnnnnnnnnnnnnnnnnnnnnnnnnnnnnnnnnnnnnnnnnnnnnnnnnnnnnnnnnnnnnnnnnnnnnnnnnnnnnnnnnnnnnnnnnnnnnnnnnnnnnnnnnnnnnnnnnnnnnnnnnnnnnnnnnnnnnnnnnnnnnnnnnnnnnnnnnnnnnnnnnnnnnnnnnnnnnnnnnnnnnnnnnnnnnnnnnnnnnnnnnnnnnnnnnnnnnnnnnnnnnnnnnnnnnnnnnnnnnnnnnnnnnnnnnnnnnnnnnnnnnnnnnnnnnnnnnnnnnnnnnnnnnnnnnnnnnnnnnnnnnnnnnnnnnnnnnnnnnnnnnnnnnnnnnnnnnnnnnnnnnnnnnnnnnnnnnnnnnnnnnnnnnnnnnnnnnnnnnnnnnnnnnnnnnnnnnnnnnnnnnnnnnnnnnnnnnnnnnnnnnnnnnnnnnnnnnnnnnnnnnnnnnnnnnnnnnnnnnnnnnnnnnnnnnnnnnnnnnnnnnnnnnnnnnnnnnnnnnnnnnnnnnnnnnnnnnnnnnnnnnnnnnnnnnnnnnnnnnnnnnnnnnnnnnnnnnnnnnnnnnnnnnnnnnnnnnnnnnnnnnnnnnnnnnnnnnnnnnnnnnnnnnnnnnnnnnnnnnnnnnnnnnnnnnnnnnnnnnnnnnnnnnnnnnnnnnnnnnnnnnnnnnnnnnnnnnnnnnnnnnnnnnnnnnnnnnnnnnnnnnnnnnnnnnnnnnnnnnnnnnnnnnnnnnnnnnnnnnnnnnnnnnnnnnnnnnnnnnnnnnnnnnnnnnnnnnnnnnnnnnnnnnnnnnnnnnnnnnnnnnnnnnnnnnnnnnnnnnnnnnnnnnnnnnnnnnnnnnnnnnnnnnnnnnnnnnnnnnnnnnnnnnnnnnnnnnnnnnnnnnnnnnnnnnnnnnnnnnnnnnnnnnnnnnnnnnnnnnnnnnnnnnnnnnnnnnnnnnnnnnnnnnnnnnnnnnnnnnnnnnnnnnnnnnnnnnnnnnnnnnnnnnnnnnnnnnnnnnnnnnnnnnnnnnnnnnnnnnnnnnnnnnnnnnnnnnnnnnnnnnnnnnnnnnnnnnnnnnnnnnnnnnnnnnnnnnnnnnnnnnnnnnnnnnnnnnnnnnnnnnnnnnnnnnnnnnnnnnnnnnnnnnnnnnnnnnnnnnnnnnnnnnnnnnnnnnnnnnnnnnnnnnnnnnnnnnnnnnnnnnnnnnnnnnnnnnnnnnnnnnnnnnnnnnnnnnnnnnnnnnnnnnnnnnnnnnnnnnnnnnnnnnnnnnnnnnnnnnnnnnnnnnnnnnnnnnnnnnnnnnnnnnnnnnnnnnnnnnnnnnnnnnnnnnnnnnnnnnnnnnnnnnnnnnnnnnnnnnnnnnnnnnnnnnnnnnnnnnnnnnnnnnnnnnnnnnnnnnnnnnnnnnnnnnnnnnnnnnnnnnnnnnnnnnnnnnnnnnnnnnnnnnnnnnnnnnnnnnnnnnnnnnnnnnnnnnnnnnnnnnnnnnnnnnnnnnnnnnnnnnnnnnnnnnnnnnnnnnnnnnnnnnnnnnnnnnnnnnnnnnnnnnnnnnnnnnnnnnnnnnnnnnnnnnnnnnnnnnnnnnnnnnnnnnnnnnnnnnnnnnnnnnnnnnnnnnnnnnnnnnnnnnnnnnnnnnnnnnnnnnnnnnnnnnnnnnnnnnnnnnnnnnnnnnnnnnnnnnnnnnnnnnnnnnnnnnnnnnnnnnnnnnnnnnnnnnnnnnnnnnnnnnnnnnnnnnnnnnnnnnnnnnnnnnnnnnnnnnnnnnnnnnnnnnnnnnnnnnnnnnnnnnnnnnnnnnnnnnnnnnnnnnnnnnnnnnnnnnnnnnnnnnnnnnnnnnnnnnnnnnnnnnnnnnnnnnnnnnnnnnnnnnnnnnnnnnnnnnnnnnnnnnnnnnnnnnnnnnnnnnnnnnnnnnnnnnnnnnnnnnnnnnnnnnnnnnnnnnnnnnnnnnnnnnnnnnnnnnnnnnnnnnnnnnnnnnnnnnnnnnnnnnnnnnnnnnnnnnnnnnnnnnnnnnnnnnnnnnnnnnnnnnnnnnnnnnnnnnnnnnnnnnnnnnnnnnnnnnnnnnnnnnnnnnnnnnnnnnnnnnnnnnnnnnnnnnnnnnnnnnnnnnnnnnnnnnnnnnnnnnnnnnnnnnnnnnnnnnnnnnnnnnnnnnnnnnnnnnnnnnnnnnnnnnnnnnnnnnnnnnnnnnnnnnnnnnnnnnnnnnnnnnnnnnnnnnnnnnnnnnnnnnnnnnnnnnnnnnnnnnnnnnnnnnnnnnnnnnnnnnnnnnnnnnnnnnnnnnnnnnncagggaaatgcaaatcaaaacaaccttgagattccacctcataccagtcagaatgcctaatatcaaaaattcaggtgacagcagatgctggcaaggatgtggagaaagaggaacactcctccattgttggtgggagtgcaggcttgtacaaccactctggaagtcagtctggcggttcctcagaaaattggacataatactaccggaagatccagcaatacctctcctgggcatatacccagaagaagtttcaactggtaataagaacacatgttccactatgttcatagtagccttatttataatagccagaagctggaaagaacccagatgtccctcaacagaagaatggatacagaaaatgtggtacatttacacaatggtgtactattgagctattaaaaacaatggatatatgaaaatcttggacaaatggatgtatctggaggatatcatccttagtgaggtaacccaatcacaaaagaagtcattagatatgcactcactgataagtggatattagcccggaaaatagaacacccaagatacaatttgcaaaacacaagaaaatcaagaagagggaagaccaatgggtggatacttcattcctccttagaatagggaacaaaatatccatgaaaggagttacagagacaaagtttggagctaagacgaaagaatggactatccagagaaaaccccatctggggatacatcccataatcagccaccaaacctagacactattgcatatgtcagaaagattttgctgaagggaccctgttatagctgtcttgtgtgagactatgccggggcctagcaaatacagaagtggatgctcatagtcagctataggatggaacacagggcccccaatggaggagctagagaaagcacccaaggagctgaaggggtctgcaaccctataggtggaacaatatgaactaaccagtacccccagagctcgtgtctctannnnnnnnnnnnnnnnnnnngatagcatttgaaatgtatataaagaaaatatctaataaaaaaaaaagaagacaaaagaaagggaagaagtaaatgttccgtgcagttttttcctaatagctaaaatgactgaagtgtctgtcagttgagtagatgaaaaaattatggcatacatgtacatatgtacacagcagactatcatttagtctttcaaaaagatgttactggtgtcagttctggtgaataagaaaggcattatgctaagtgaaatgaaatggtctagacacagacagaaagctagatctcatttatgtgtggaatctgaaagtttgagtacatagaaacagactagaactgtggctagcagggccagcggaatgtaggaaccagggaagaatggaggtcaaagggcacaaacttgcatttaatgtgttgtatattgaaaatttactaggagggtagattttaggcattcccactatatgcatttgtatacacacacacacacacacacacacacacacacacaaacatgccaacacacacaatggtaacaatggaaagtgatggaaatgttaagttatttgactctagttatgcatgccaaaacatcatctcttttttcattggatattttatttatttacatttcaaatgttgtcccctttcctgattcccccctcagaacctccctatcccattccctgtccctctgcttctataagggtgcttctccactcattcactcactcctgcctccctgccctcacattcctctacactgggcatcgagcctttacaggaccaagggcctctcctcccattgtgatgcccaacaaggccatcctctgctacatatgcagctggagccatgagtctctccatgtgtactccttggttggtggcaaaacatcatctcttatacctttaatttatacaataatacacctgtaagtgtacatgtatgtactgaggatttctttgtatcttccttaagcccaccaaggccccaatctgatatctagggaaacgcaaagaggtagctttgttctcttttgcatttttcacagattaacatatctgctggaaaactcgttgccacggcaacaagttttttttctctctctctatccctctctctgtactgtactgcataaaaatagccctttgttggagaatgatggtactgacaggttgcttggtgaatgtatagcagggtgctttgtcaggagcagtctcccaaattccattgtttaaagttgcaaaatcaaaatgaatattggtttttttcacctcaaaaatgtaactttatctagcaaatgcaggtattggtgcactggcactctgttgaattattaattgcaagcctttccttgcaagtcaggtcaacatgatcatcaaagctaccctatggtgatgagtcacagctttccccttctttagttggtgatgcaggtgtggaacacaaggttggtgtagaggtgcagtaggggcagttttctcacccaagaacccagcttcttaggttgtaggttgcagccctgtatgcaggttgtgtaactgaatgtgcagtaaccaaaaattaattcagaatcaaatgtgtaactggtcctaggtgttcttggcagcacaccccctcccccacgctgtattgcatgcctctactgctctctggttctgaacaccactgtgcaccttgtactctgcagcccagcacacagcaccagtgaaggctccctgaggcaccttgtctcagaccgagactcttgtgtgttatgaattgtagtgtcccctaccccaccttaagtacaaagtgctttgtgcttgtagaaacagtagtgaaatgtaaatatcaagctaatatagctttgggttatattattatattattgggttagaaaggtcacaagtgaaatgaatgtttgattatagaaatttaattgccacctcgaatttcataaaacaaaagtcatctaatgaattttgggttgtgatttcaacaatttctgaaattcctttagcatacctttcccattttatactacatatttatctgaagcagcagtttcagaactgacagtgatcatctgtgtgaagtgttaagggcacctaagtcttgcagtatccttccagaatttaatttttatgtaaaaaacaaacaagtacacccattgcactcgtttgcaattttgctttagtcttgaacaaatggtaaaattataaatacactaaataattattttaaatgaaatttacttacgatttattatcagtgaatatttgagttgtagtacgatttagtatacctgtatacttggggttatatttaaatttcttggacaaaaagattacaaatgacaaaagttttaagaagccctgctctaagaactcaggttctctgcctaagcactttgtacttctactcaaggattaggaagcagtcaggtggaacagatgagctctgagatgttatcaagcaatgacttctttggcttcttaaacgcaacagctttttcggaaaggttagctctccctgatggttttagtattggcttcacagatgtagccaaggatggaatctgattctactcttcatttttcttaaaaaaaaattccttaggcaaattcttagagtagcaccacataaaaattttgctattttcttatctttcagaaatttgtcttatatggaaacaacagcttctcggtgctgaaataaaatgtactgtagctttgagaattttagagaccatcttgagaaaatgccaaagatgggaggtttgcaactaaaagcaacagcttttgttcttatatgcactaaatgactacagagatggaattactacctttgccttttctgttagagtcaaaacacataatgccttcttgttaagaatatagaaattgggtggaggtggggctggagagatggctacagcttatcttaaatattcttgtcttcagttttctttctgtacccatattagcctttaaatcataaatatccacaacccttcccagtgaggctgagagtaatacattttatcatcttactagttagtgggtttcctttgctgggacagtaattgtaatctctccagcactttttgtttctaaccatatttctttctacttttgggctttcagccaacatataaacatataaccattgaccgtttaataatctgaatgaagacacctggaatgagatgaatctttacacacatgattacaatgacataatctccacttatcagattgaactttgcttgacataatcaagttcagaacgtatttgcaattaaatattttttttctaatttttccacttaaaacataacagtgctactgaattgtagcccacatcccttaaaacttgtacatttagtatgcaagtcaatgattttactatagccatagagttgtatacctataacaactacttaattctagaatatccccattacttccaaaagaatccccatgtgccctagtggtgacctccaatcctatctatggatactagacagccacagaggctctatttgtgtagatgtatatgcctattctggacatctcctagaaatgaacctataaagttgagcacaatggtgaactcctatgatttcaccatgtgggagactgaggcaggagaatttctgcaagttttgggttaatctggatgacctagtgatttcacatctttctgggaatagagagcaagagtatgttttaagaaaatcaagaaacaaaaataaatgctgagctggagagatgacttaccagttaagagcactgactgctcttccagaggtcctgagttcaagtcccagcaaccacatggtggctcacaaccatctgtaatgagatctggcgccctcttctggtgtgtctgaagacagctacagtgtacttacatataataataaataaatctttaacccccaccaaatcccaacaaacaaacaaacaaacaaaagaaatgcagtcatattatatatagttacttgtcactaactccatgtagcatgctttccagttcatctatgttgtagcatgtattagtacttcttatggcccaataatatgccattgtatagacatattacattttacttcttggctcattaattgatagacatctgattagtcttacctttatgctgctgtgaacatttgtgtttgagtgtttgtgtggacacattgtttcgaaattatatgtgggagtagagttgtatcacattctaactgggtggctacatgcttttgaggaacttctagactcctttgcaaaacagctgtagtgtcttaattcttatcaccaatgtgaggcttctcatttcttcatatccttgttaacagttgttattgtctattgctttgaatttagctagcctagtgggtgtgtagtggtagcccattgtgccttatcattttggaacaaggtatgtagagcaggctagcctcaaacatgcagcagtattcttgcttctgcttttttagtgttgggattatgaacgcgtactcccatgacggcctcatactgttgttttgttttcttttgttttgtttttcgagacagggtttctctgtatagtcctggttgtcctggaactcactctgtagaccaggctggccttgaatttagaaatcctcctgcctctgcctcccaagtgctgggattaaaggcgtgtgccaccactgcccagctctcatactgtagttttaattggtagttcctagatgacttttactattgaacttcttccattgccctcccacttatttgttttgagagagctttattgtgtggcctatattggtctagagctcactatgtagcttggctgtccttgaatttgtagtaatcctcctgcctcagcctactgggtcctgggattacaggtatatatcaccatatctagctttgaggatctcatcatatacttattggatacttgtatatttccaggttgttttttttttatttttgagatagtgtcttatgtcttccaggctggcctctaatgctatctatagtagaagatgatctcaaatttgtgaccctcttccccatacctcccaggtactgggattgtggcggtgaaccaccacacctaatttatttggttctgaggatcaaacccagtgctttgtgtgtgctaggaaagcactaactgagccactgagtgagtgaaatcccagccttgtacatgtctttttttatagatatatgcatatgctttcttgtccatttgaacagttgtattgcttttcttcatagcttgaattgtaagggttgtaaaatatgttctaggtgtagatatgccatcagataagtgatttacaaaaaaagttctcccattctttagtttgagtttttctttctttctggtgttctttgaaacaagaaagttttaattgtgatgagggcttaaattcttttgtcatttgtatttttgatgcctttctttaaaaatagttaaactcttaaagaatttaaattatattgattgatttgagtgctgggaaggtcacacatgtgccatagcattcatgcagatataaagggacagtttcaggggttgtttctctctctcatctgggtcctggggctcaaactcaggttggtaggcttggtggcaagcacctttccccactgagccaactcactggcctttggtatcatgtttaagaaaccattgcctcaactttatatgccccagtacaggggaatgccagggccaagaagcgggagtgggtgggtaggggagcagggtggagggagggtatagggaactttcgggatagcatttgaaatgtatataaagaaaatatctaattaaaaaaaaagaaaagaaaccattgcctcatccaagatcacaaagatttacatatttttcctatgagtttgtagttatagttcacatgttgaagtttttttttaaaaatccattttgaattaatttgactatgttctgtgaagtaatggtttaaatttattcttttgtacatgggcctgtagttttcttagcaccatttgttgaaagactgttttttgtttatttgttttgctttttatgattcttgacctcatagatcccaggctggacttgaacttgcttggtagctaaggatgaccttaaacttctgattctcttgcttctatccccctggtgctgggacttgagactgtaatacctctcttgtcctatcagattcttttggaaccctgtctgcaatcgattgactgtaaatgtaagagtatatgtttgaactgtagaactgtaagttctatcttattgagatatagagatatatttttatcatcatttgaataccatagtgtcttgatttgttttatctattttgagggagggagagagagagagagagagagagagagagagagagagagagagagagagagaatatgaatgagaatgagtgtgtccctatgtagtcctggcctatctacaactccctgtttagaacaggctaggcttgaactcatagaggtccactgaatgaggcatggaagacagaactgcaaaatacaggaattgaccattgtgcacccaaaaggtgactggatgtctgattctaaacatgaagccttcttaggcaatcttgaacacttaattttgctgtttgccttttaatgtttgaacaataagtgaaagtctaagtctaaagtagctctgtcagtaagaggaagagtggggcagtgtttccagagtgctacctaaagtactggtgtcataggcttctctttctgcctccagctctagctatacctcagataggtctggatactgccccccaccaagactgtgttgtaggaattagccttcttcctgtcatcattgtctgtcagtgtttcagccgtatactttactctccatttcctttctcttatgcttctaattttaagccttttttatttaaagagccctgtattactatttctggtggagttctgagtgagaccagagatgcacctgcatgttcacccactcagactatccacccagtcactaaagagatgagtttacagaaaatgacatagaaaagttgcaaaagtagtttaatccacactttgcttcattaatgttaattttctatacaaacataaacaccattatcagtagcgaaagagttgagggcctcgagagatgtctcaggtgttaagagtccaaagagctcaagaagttagactccagagaaccaaataatcttattaaaaatggggtacatagctaaacaaagaattctcaactgaggagtattggatggctgagaagccctaaagaaatgctcaacatccttaatcatcagggaaatgcaaaccaaaacaaccctgagattccaccacacaccagtcagaatggctaagatcaaaaattcaggtgacagcagatgctggcgaggatgtggagaaagaggaacactcctccattgctggtaagattgaaagttggtacaactattctgtaaatcagtctggtggttcctcagaaaattggacatagtattacctgaagacctagctataccactcctgggcatatacccaaaagatgttccaacatgtaataaggacacatgctccactatattcatagcagccttatttataatagccagaagctgaaacaacccagatgtccctcaacagaggaatggatacagaaaatgtggtacatttacacaatggagtactactcagctattaaaaacattgacttcatgaaattcttaggcaaatggatggaactagaaatatcatctgggggagggatgagaggataggggattttcagaggggaaactaggaaaggggataacatttgaaatgtaagtaaagaaaatatctaataaaaaaagaaaaaaatcatcctgagtgaggtaacacagtcacaaaagaacacacatggtgtgcagtcactgataagtggatattagccccaaagctcagaatacccaagatacaattcacagaccatatgaagctcaagaaaaatgaagactaaagtgtggaggcttcagtccttcttagaagggggaacaaaataatcatgggagatagagggtaggaggaacttgggaggaagaaaggagggagaggggtaaaagggggcaggatcaggtatgggagcagatggggatgatatacagagggtcaggatattgaacagatgtgtgtagcaatgggggatgggaaactgggggtaggaaccaggaagtcccagatgccaggaaagcaagaggctcccaggacccaacaggactgagattagctgaaatgcccaacaaaggggagggagaacctgaagagaccatttacagaggttaggcaaggaccccggttggggggtggggccacccactcatctccaaattcttttttttttttaatctgggtgatattttatttatttatttatttattttaatttgatggatcatgggaaaatgtcatgaatagcaagaatgaggaggtcagtatataaaaggagaggaagagtagaatttggacagagattgtatgcagatgccctggtcccatttctgggcacattccatatttcttttgctgttctaaagttgtctaataagtgaactgagaaagggaccaatgccagggacaccttttcacatcccagagcagaatgggactagagaaagcctctgctttccaggaagggtgtcagagtcactaagaacgtttatgctacctaagacttctcctctgactgtcttaccattgtgtaattcacactgacacctacccccatggtttcatctccaaattcttaacctggaagggctcctttctaaaggaaatacaggggactaagtgtggagcaaagaatgaaggaaatgccacccagagactgccccacccggggatccatcccatatactgtgtggatgccaagaagtgcttgctgacaggagcctcatataactgtctcctgaaaggctttgccagaacccgacaaatacagaggcagatgctcacagctaaccattggactaaccacagggaccccaatgaaggagctagagaaaggacctaaggagctgaaggggtttgcagccccataggaggaaaaacaatatgaactagccagtacccccagactcccagggactaaaccaccaaccaaagagtacacatggagggacccatggctcctgccacatatgcagcagaggatggccttgtcagacatcaatgagaggagaggcccttggtcctgagaaaccttgatgccccagagtaggggaatacgagggcggggaggcaggagtaggtgggtgggggcataccctcatagaagcaggaggaggaggaatgggatagggggtttctggaggggcaaccagggaagtggataacatttgaaatgtaaataaataaaatatccaataaaaaaaaggagtggttacttctcttgcagaggccccagatttgaatcccagcactattggcccataaccacctataattaaagtttcagggagctctaatgccctcttgcctccacagacacctgcacatacatgatgcacagaagctcacacatgcacatgtacatacacacaagtaaatacaaattatctaaaagaatgggagattgagcttatcatagtcacttttctgctgatgttacaaagcatcatgaccaaggcatcttatacaagaaaatgtttcattgcttacaattttggagagtgagtccatgacagtggggagtatggtagggcacacaggcattggagcaatggccgagagtttacatgttaaggcaacaacccaggaggcagacagagagctaactggaatggcgtgggcttttgaaaccaaagctaacaactcccagtagcacacctacggcaataaggccacacctcctaatctgtaaaatataatcccaccaactgcaaatggaacattcaaacatatgagtctttggggtcattttcattcagacaacctgcttggaatctcagtatccagaaaatagagatgggtagatcactacaagtttgaggccatcctgcatatagaaaccctgacaccttgtctcaaaaaacaaaacaaaaacaaaaaacaaaaaaaaagccccacattaaccacgcttgaagaaaaataaaagaacagttgggctgatatcagttcattactactaatttgcattagaactccatcagttttttgtttgtttgtttgtttgtttgtttgagacagggtttctctgtgtagccctggctgtcctggaactaattctgtagaccaggctggccttgaactcagaaattcactacctctgcctcccgagtgctgggattaaaggcgtgtgccaccatgcccagctccatcagtttttttttttctctctcttttcttttttggaatcaggtgctttctatatatccctggctgtcctgtgacccattgtttagaccaatcagagatatgcttggctcttcttcacatactcagattaaagtcatgtgtcaccatatctgactgtcagttttactactggtggtccatttctgatgtagaatcttatctggaattccttattgcatttacttttaatttgtctttagttttgtccagtctgtaacagtttcttaatcttatatttcatgatacttttgaaaaacatgagttgtttatttcatagannnnnnnnnnnnnnnnnnnnnnnnnnnnnnnnnnnnnnnnnnnnnnnnnnnnnnnnnnnnnnnnnnnnnnnnnnnnnnnnnnnnnnnnnnnnnnnnnnnnnnnnnnnnnnnnnnnnnnnnnnnnnnnnnnnnctctctcccactttctccctctctctcccactttctccctctctctcccactttctcccactctctccccctctttctttttgacatagtctgattcgtgtagctaggttggccttaaactcaccatgtagctgaagttgacattgaacccttgaactctttatcctcctgtccctgtctcctgggtgctggacttagagttataagccactgtgtctggctttgtttgatgttttcttatggttcaaataaaattgtgcgttttggggcaagaatggtaaaaaaatgattatgcatatttttagtatcttatcagggatatgattttggtaggtcttggtaggacatataccttgattttgtgtttaaattggaatctgcaatttctttactgtcaaattgctacttctccctttatagttaaagtatcttgggagagatgctttaagacaatgcacatattccatttttccttgaaaatttgctcattcatttatgggtcagtcaatctcattttttagagtatttgtgacaaatatgtgactaagatgaatagactgtgccctaaatgaagataaattatgttgaaatcctattgtattagtatgactctagctagtgtgttctccaatttccagggctcaacacagacatcttttttttcccccaatatgaaatttctggttatgtaggtggttgtgtgacatgtagtgactaaaggtttcgggctaacattttacactgaagtaatttcaaagtgtaggatctagcagtaccaacgagtcttgtaggtccattgacctaggtttacttaacatttcttacagtggctctgtttctctctaccccctctttccctcccactttctttatatatctgcattgtccaactgttgctctctacaaactcatttgagattaagttgcacttatcaaactttcctgtactttaatatgtaaatttaacaatatgttcacctgttcaattctagtatatacattaggtagttttagagttgcaaacccagactttttcaagaaatatgtccattaactacattatagcatttacatgcagctctttttgtttttaatattttatcatatccagttaagatatgattttcacagttttccactgaagctttaagtttgaaacctgtatatgtatgtactattacttgaatataggaaatatgggctggaaatatgtgatatagcttcgtggtagtgtacttgcccagtatgtgtaagaccctaggttcaatccccagactacaaaaaaagcaaaataaagcccaaaagaggaaatttaatattaatgcaaccttctagtctctgatttagatttcagattccttagttatccctaaaacattctttgttggagtagttcctctctattgtacactgtagccaacatggtgtatggaattgatttgtcatagctctttcatttcctttgatctggaatagttcctgttagccttcatctgttctgttcttttcttctttactgacacagggtttcactgtgtagtcctggaacttgctttatagactaggctgacctctaacttgtggcaattctcctgcatttacttctgaagtgctgagatttcaggcatgtaccgccatgtctagcctttccttttctttgatcacattgacattattttgtagaaagtgccaagtttgggtttgcttgattttttttctggataagtgatttacctgtccatactgtatcttcttgtaattttgatcattcggtcaaagtgttatttaggcctgtagtaattttaaatatgatacactagagtgatcaatgtcatggaacatcttacattaatgttgtagattgaaaatttatgactgaaaagttttcaaaaactgttcatatctaaaactgagactggtggtgccaacctgtcacccccaactactagggggtttgaggcaaagggattaaaaattcagagcttctttggactacagattgaattcaaagctagctcagaaagtttagggagctactgtttcaaaattttaaataagcataaaataaaggctaggactaaataaagctcatttacacgcagctctttttgtgcagtgtttgtgtagtatgcacgtggccctgcatttactgtttagtatggcagatagacagattggatagaactaatatgaactgagttattcactataaaatgtgaatgaataatttagccattcatgagtatctaaccttccttccttcccctctcttcttattttctttgtttctatggattttttttttactttatctattgcctttctcttttttctttctttgaatctttttttttcttttctgagatagggtctctccatgtaactctgacaggcctggaacttgccacgtagacagtctggccttgtgctcacagagatccacctgcgtatgtctgcctcctgagttctggcttttctctaaatctctttctccctcactttctctctctcttcctttgtgcttatttaaaataatatagttcaggttggtcttgaactttctacgtagctgtggctgccctctgtcgcctcctgtgctgtgattaagccaagtgtcaccacacccggttctgttttagttcttatgcaggcacttgtctttttaatttttttaaattactagatctttttgtgcctcatatcttaactaaatattttaagttcatcctcttattatagtaaagtatacattgaattactatcttaatcattttgagcctacagttcaatgctaaacatactaaaaaattatcacacaagcgtcactagcatctgtttgcaccagggttttcacatctgtgatggttagtgttgtcaacttgacagagtcgagagtcacctacaaggcaagcctctggacatacccaggaggaattatctatagtaaaggtaacctctgagaaggtaagggattatcttggttatgttaattaatgtggaaatgcctactttaattatgggcaggtccattccctgggcaggatacaatagagagggaaagtggagcactagcaggcctggtcactgctttctgactgtggactgatgtgaccagctgctcaaagtacctacaactttcctgtcatgatggactgtggactggctggttttgtgtgtcaacttgacacagctggagttatcacagagaaaggagcctcggttgaggaaatgcctccatgagatccaactgtaaggcatttcctcaattagtgatcaagggggaaaggccccttgtgggtgggaccatctctgggctggtagtcttggttctataagagagcaggctgagcaagccagggaaggcaagccagtaaggaacatccctccatggcctctgcatcagctcctgcttcctgacctgcttgagttccagtcctgacttcctttgtgatgaacagcaatgtggaagtgtaagcatccacaacttgtttcttggtcatgatgttttgtgcaggaatagaaaccctaagacagaccgtatccttgaactgtgagccagaataaggcccctcttttttcttgaactgtttttgttgtagacggtctcctactgtagctggcactcctgggaccattatgttgtccagattgatgttagacttataaagatactcttgcctcagcctcccaagtgctaggattgtacacgtgtctttaaaatatatattctggaaatttttccattctgagtttgtggaactaaagtgaaaccgattcccagttgagcattgaaagatattttttcttttgtggtgttgggattgaacttaggttcttacacatgttagacaagtacacgactacagagctatttccctagtcttctttttactttaaattggagatggactctcagtaagtttcctaggctgacattgagtttactctgtagcccagttaggccttgaacttgcaatccccctgcctcagcctccagtgttgtccttagaagctggaattataggcctgtacaacagtctccagtggagggttaggatgctaactcacttttctgggaatgagcaggagtttcatctaggcagcacccagggtacagggtaataggccctgctattcctgttagcaggagttgattagaagtaaagctctctacttgttgaaaccaactcctgcctgaaaactccgaggtactcagccagcgggaaggctggctttctttgcactgttttacttctccacttcccctctttcttttttctccttcctcttcccttccctcccactttcttttcttttctttccttacccctacttttcttttagagatagaattttaatgtgtatcccaggctggccttgaactcaacagtgtacccgaggctagctaagctacactgtgatcctcctgcctcagcctctctcacaggctaggattattgattggcatgtgcccccaaacctgtcttgattcccattcactttcaactcttgtctgaagacttaggctcccttgttattagttctgtggttgtatcaaaacatggtaactatttgttttgggtacctaaaagcccatcttagtgtcttgtagtgggcattctcacagttgtgttggtcatggattgggggacacacattcctggttgtttattactgctccatagggcattggtggttgaaaactggagattctctttccaggatggcctatcactattctgtggttctcagtgactgtgcttagcctctctgtgctgggtcatgtccatctctagggcttttcatatggctcacaccttggatactcataccattgtggtccctggatagttctacttctcaaagggcagtgtatataatgaagctctttatttgaaattcaagtcagaggagctagagaaagtacccaaggagctaaagggatctgcaaccctataggtggaacaacattatgaactaaccagtaccccggagctcttgactctagctgcatatgtatcaaaagatggcctagtcggccatcactggaaagagaggcgcattgtacacacaaactttatatgccccagtacaggggaatgccagggccaaaaaaaaaaaaaaatgggaatgggtgggtagggaagtgggggggagggtatgggggacttttgggatagcattggaaatgtaattgaggaaaataagtaataaaaaaaaagaatttaattgtatagccatgctacctgtaaatggtgctttgaaatttttcccttaggaatatatgttctcggctagtatttgaacattttataattaaaaaagacagaaaatggatgttgagggaaagctattattgtcagccagacaaccagttaataaataataagaataatttaatgatacattaaacctgactgcctcctctaaaaaaaaaattcaagtcagtatcagtaaaactatttaatattgccattttattttttcaaaattatattgttttaataaaattttatttttacttaatgtttttattaattccttcagaatttcatagcgtattttgatcaaattcacctccagctccttcccataattcctcctagatctgcctctacaactactctcaaccccatcaacttcccatcttcttattacatttttttcagaatttcatagagtttattctgataacattcaaccccctaactcctccaagatccaccctacctccctacacacccatcttcatgttttctccattttccagccaattgagtctaattcatgttatctaaatactcttgggcgtgaagctgccttgaagtatcagcaacctagtaggtgtcacacccttaaggaaaactgaccctttttctcccagcacctaccaagtgctactagctctctagctagggctgggaagtccttcccgctccccacccatggctccatgctggactgttgactggcttgagcttgtgcatgctgttacaatctttgtgacttcatatgtgcaactaccctgtgtatccagaaggcagtcctttcttttagtcctctaccagttttaattcttagaactttcctgcccccttccttaaacattcctgagtcttggggtgagtgaatatgatataaaaatcctatatagggttgggtactctgcagtgcagcctcttattctttgcatattgaccagttgtgggtctttgttttagttgccatctactgtgataagaatcctctgtgatgaaagttaagagatgaactaatctgggctggagagatggctcagtggttaagagtgcagactgctcttccaaaggtcccgagttcaaatcccagcaaccacatggtggctcacaaccatccataatgagatctgacgccctcttctggtgtgtctgaagacagctacagtgtacttacatataacaataaataaatctttgggctggagtgagtggggcccagggccggagcaagcagaggtactgagttcaatttccagcaaccacatgatggctcacaactatctatacatctacagtgtactcatatacataaaataaatccttaaaaaaggagatgcactaatctatgaatatagtaatacgtcattttagaagttgttttaatactatgtttatttagcagactaatactgtgtttcccttagggctaatcataggttcttggttctgataatggtgttagatatgggttccatctcatacagcagactttaaattcaatcaaaaagtggttggttactcccataatattcatgctgccattgtaccagtgagcaaagcttgccaagacagtaattgttgtagctcatagttttctagccgggtaggattgatggttatttttctcctctggtagcatgtagcatgcatagaccttccagcattatgaaagctagccagtataaagcttctaggtcagtagcagcctaatttctctgtgttttatgactcagcatgtggtatattcagcaaagggtttgctatcacgttctggagggtaaccaagattctcactagccaacaagtaaaaaagaggtagcctattcctgatattggaggtttaatttgctggcatgtggtgtctagtaggctattgttaccctgttatagggcaatcctatttaaattattttaaaaacatatgtatatatttcaaagaccttctaatgtagaaggttttcatatgacttcttcagaaggcttttagtttgagtcatctctctccatatttccttttctaccctgtcatcccatcctcaatcctatttaaccttctctgttttgttgtttcctctttgttctttatattactgtattgcatagtccctcttttgacagctctctccccttgtccccttactagtttttaacatctatggatatttcccaagtttgcttcattaagaaaaatagtccattaattccaatttgtgttgcctatatgctcattggtgtctccacttgagtatacttgatctatgtactggctagttttgtgtcaacttgacacagatggagttaccacagagaaaggagcttcagttgaggaaatgcctccatgagatccaactgtaaggcattttctcaattagtgatcaagggggaaaggccccttgtgggtgggaccatctctgggctggtagtcttgggttctataagagagcaggctgagcaagccaggtgaggcaagccagtaaagaacatccctccatggcctctgcatcagctcctgcttcctgacctgcttgagttccagtcctgacttccttggtgatgaacagcagtatggaagtgtaagccgaataaaccctttcctccccaacttgcttcttggtcatgatgtttgtgcaggaatagaaaccctgactaagacaaattggtaccagcagagtggggtattcctgtgacaacctgaccatgttttggggaggactgtggaaggactttggaactttgggcttgaagatccatccgttgttaagagctctgtcggatgtcgtgtaggagcttggaagataatgttgagaacagtgcagaagatagaggtctggtttgtgaaatttcagagggaaaataatgactcttttcagggccattgctgttttgattgtgaagattctgtagttctggttagctggggctgaagagtcagctgtgattaacaagataccagaactaccaaagcaaaaactttgcattactgggactattgatgctggttagctggagctaagaaattagctgtgattaagaagagaccagcatcgtttaggtgacatcttctgggaagtgttttctgaaagcacaaagaggctgtgttccagagatagccaaggttgtactcctgctgcagcgggacttggtaatatgtaagggtcacccaggtggtactggttttgaaggcatgaaggggtcacgcaaagcagctgaggctcggcactgtgagaggccatggaaggccattggtgaaagtgcagcctcagttgcaattgaaggcccaggactgaaggggtcatgcagtgttttggagatgccagtaccatgagatgaccaccaagagcagcagcagcagtggggtacaggcatctggagcctagaggatgatgcgtgtgctacaaagggcatggctggagaagtgacccaagcccttggaggagcccagaagatcgtgagttggatcccagacattggagagttggagattgacttttgcttttgattgtgactgtgccctgatattttccctcttgaaggaagaaactgttttagtggagcccacagttaagagacttttaattgtaaaaagactttggatttaaaaaaagatggatattttaaagagattgaaattttaagaatatggaaatgctgtgggacttttaaagttatttagatcttggggatgaataagattgtaagggttgagtcttactagtgatgtttttgtgtgtcaagttgacaaggggtcaattgtactggctagttttgtgtcaacttgacacagctggagttatcacagagaaaggagtttcagttgaggaaatgcctccatgagatccaactgtaaggcattttctcaattagtgatcaagggggaaaggccccttatggatgggaccatctctgggctggtagtcttgggttctataagagagcaggctgagcaagccaggggaagcaagccagtaaagaacatccctccatggcctctgcatcagctcctgcttcctgacctgcttgagttccagtcctgacttcctttggtgatgaacagcagtatggaagtgtaagccgaataaaccctttcctccccaacttgcttcttggtcatgatgtttgtgcaggaatagaaaccctgactaagacaacctatcaggatctacacattatagaaatttacgactctcccagaaataatcatattgtctatacttcttcagttaggggttggaacttgtaagcccttcctattccacgctagcctatcgattgactggcttgatctcgtataggacttgtgtaggcagccgcaagtgctgtgagtctgtgagtgcaggggtcttttcatgagtagaatacatcgtttcacctcttgcttccccagtccctggcttttatagtcgttcacttcctttctgtctcagtggttcctgagccctgtgtgcgcgtgcacacatatgcatgtgacagagatctcccatctggggcagagcactcctcagatacttgtcattttcctttgtcctaaactagtcaggataaaaacctaaaggaaagaagaggactttgccttctctgcttactgtgtggatgatgggttgttcgaatagcatgggatcagtttttggacttgatttggattactgagtgccatccttcagagacaatttcctaatgctttctcactcatctggcatgagcacaaaccttttactcaataaaaacaagataataataacaagctggaacatcttcataataaatacatttgtacagcttttcaaatcctaggttattgaaattctgtcagccttggctgattgccatgttccttctgcccttgtgttttctttctttcttcctttttttccttgagctattcctgctgacgtcagaaggatgcttggagctctaacaggaggagtggcattgctgagtacaaagtggtaagggtaagattatgctaatcctcctgaggcttcagtagaagagtgccatgccatcttagtgtatgttttacaggtaaggcaaaagtataaaaacataaagataaaatggtctcttaaaggtcagaatatgattctatccaccttcttcaccatagtaacaattaataattcaaaacacatgttcctaggataagagcaaaatagtagcactggatcttttataactctgtgcttattacttgtagtggaggttttaaaaaaataattagttatagtccagtcaggctacagttttagggatagcccccactccagttgttggggtacccacatggagactgatctgcacgtttgctacatatatgctgagggcctaggtccagcccgtttatgctctttggctggtggctcagtctctgagagttcccaggggtccaggttagttgattaagttggtcttcctggcgagtttctatccctttcagggccttcaatccttcccccacctctttcataaaggtcctgacctctgtctagtgtttggctgtgactgtctgcatctgtttcagtcagctactgggtagagcctctcaggtgacagttatgctagattcctgtctgcaagcataatggaatatcactaatagtgtcagggtttggtgcttgtccatgggatgggtctcaagttgagctagtcattggttggccattcctttagtttctgctccatctttgcccctgcatttcttttaggcagacagattttgggttgaaggttttgtgggtggattggtgtccttatctctccactgggggtcctgcctggctactggaggtggcctcttcctgttccatgtccctgctattagggatcttgagtaaggtcacccgaattgactcctggaagccgtggagggtttttcaaataggaaaagtgatacagattctaattagaaatcttgaggcatttgatgtttgagacaaaattatcaggaaaggtgagaaacaaatggtttctagcttccagctccttcttttctataggtaaatcaataaatacttttgatgtagtgaaaaaagaaatttttgataggtgttgcccaacttcagagtgccatttacacaacagacaaacctctgaattttcaaagtgtttaatcacatcccagatcagggttttgagtgcctggaagtaattccctagaattattttggatggtcagattagaaggtttctgccatgatatatattatattacctcgtgcttcaaaattctttatatggtgtcaaatatgtgggaggatttaaataaattctcttcagtacttcatgggatgagatgatccaatgggaactgaatgttttcaattaggacgtttccatggttaccattaagcatgccaaaattcatagccacaggagatttttatatctttcaatattgattaagaaatctgagaacaatttcaagaaatgtgggatgtaggtggaggctaaattctgaggatagtataaaatttgcttttctcctctggttaaaggatagttcaaaatattctaggcagtcagccaaagtcagtaacaggatttttaccaggagatagtccagaagaaaaggtaacataacttatatctttcatctaggtcttgtttctttagttattaacatttagttaatgttatttatcacttacttattaacataagctttcttatgtgtggggatgagacattggtggtataaaaatcctttgtacatatgtcatttgcagaaaacacattttagatagtgttagcagatatctttacatttatatctgtcttggaaagatttatgacttagattactttgaaaaaaaaagaaaatagttctttacctcaatttttatctctctgaggatttatgggatgtaattcaagtggaccctgaccttgaataggaaaaaaacccatatcgttttgattaaccatggctgttcagtattttaattagtcagtgagtgttgccaagaaatgatagcccacagccctagttgtgtcttagtaaatatggtgatttgaataaaaatggcccccataggctcatagaattgacactgttaagagttgtggccttctattggatggaacacagggcccccagtggaggagctagagaaagtacccaaggagctgaagggaactgcaaccctataggtggaacaacaatatgaactaaccagtacccccggaatgcgtgtctctagctgcatatgtatcagaagatggcctagtcggccatcattgggaagagaggcccctgggtcttgcaaactttatatgcctcagtacaggggaacgccagggccaagaagtgggagtaggtgggtaggggatcagggtgtgtgggggagggggggagggtatgggggacttttgggatagcatttgaaatgtaaataaagaaaatatctaataaaaactgttttaaaaaaacaatgtgggctggtgagatggctcagtgggtaagagcactgactgctcttccaaaggtcctgagttcaaatcccagcaaccacatggtggctcacaaccatccataatgagaactgacgccctcttttggcgcgtctgaaaacagctacatcagctctgctgagcaagcggagttgaccagagcaagtggggccgattggagtgagcagaggtcttaaaaattcaattcccaacaaccacatgaaggctcacaaccatctctacagctacagtgcacccatatacgtaaaaaaaaaaaatagtttgaaaaaaaaaaacaatgtttgggggctggtgagatggctcagcggttaagagcactgactgctcttccaaaggtcctgagttcaaatcccagcaaccacatagtggctcacaaccatctattatggaatctgacgccctcttctggtgtgtctgaagacagctacagtgtatttacatataataaataaacaggtttaaaaaaaacaatgtttgattcaaaatttgaacaacaacaacaaaaaagagttgtggccttgttggagtaggcgcagccttgttgaaggaagtggttatagggggtggactttgaggtgtcagatgctcaagccaggtccatttttcacttacttcctgctacctgctgatcaggatgtagaactctctgctaactttccagcatcatgtctggctgcatgctgccacatttcctaccataatgacaatggactaaacttgtaaactgtaagccagccccagctttcctttataagagttgctgtggtcatggtgtcccttcacagcaatgcaaaccctaattgagacagtaaaccgcagatgttttcataacttctgcagataaggttttgagacaagagttgctctgtaacataacctagcttggattttgcatgcccctttcagcttcccgagtgtgctttataggcatggatcaccatgccctggtctgctgcagataccttcaagtagtagttttgctgattgttgattttgaattttggcagttactagaattattggaaactcctttttatttttatttatttattttttatgagatgcggtctcatacctttggctggcttgggacatgtggtgatcctcttgtctctgcctcccagagtttttattttaaatatcataataaagaacacattgctatatcatcatttagtattttgtaatatttcaatgagtatttcaatataattggcttcctttaagatcccattttttgtattttgaaacaacatgtagaaaatttttgtgtgtagtgtgtgtgtgcgtatgtacatgtaggccagaggtcaattatgattattacccctcaggaaccacgcacttgcatttttgagatgcttttacattgtagagccagtctttagcttagcttggtgggaagtgacctgaggtttctgcatgaaacccggagtagtcacagaagggactgcgaatgcagaagacaggcaaacagagagaggcagagaggcagaaatgaagtgttgcacttgtctttcccccaacacattgctctctacaaagtggcgagtgaattggctgtaatgtgacagtatctttttgttttttgagacagattttattttctgtgtagctctggctgtcctggaactcactctgtagaccacactgactgtgaactcagagatcagatccacctggcctctgcccctctgcccctctgcccctctgcccctctgcccctctgcccctctgcccctctgcctctgcctctctgcccctctgcctctctgcctctgccttgagtgctgggattaaaggcacgagccaccacctgttcagcacagaagtttcttatgtctgtggaacacaaacaagtgttgaagtggagcgtgtgttggggtagatcagggttgcactcttggtttaaaaggtgcggtgaccagggcctagcaaacacagaagtggatgctcacagtcagctaatggatggatcacagggctcccaatggaggagctagagaaagtacccaaggagctaaagagatctgcaaccctataggtggaacaacattatgaactaaccagtaccccggagctcttgactctagctgcatatgtatcaaaagatggcctagtcggccatcactgcaaagagaggcccattggacttgcaaactttatatgccccagtacaggggaacgccagggccaaaaaaatgggaatgggtgggtagggaagtggtggggggagggtatgggggactgttgggatagcattggaaatgtaattgaggaaaatacgtaataaaaaattttaaaaaaaggtgtggtgagttttatcagtcttctgtgaatatccttgatgtttaaaatattcatgcctctggatatttcaagggttgataaactgcattgctccttaaaaatcactggtcccttcttctgtttgctttgcctgtggcttcacttagtatgtggcctgcaaaggctagaggtgttttgtctttttccaggaagaagccttccttcttcagtgctgggtatggtgctttggcctcatgtgtggtagataaatgctctaactctgagctgctttctcagccctaggcaacagcttgaagatctagcaaggggtttgatttatttcttttcctttatatcatgacaactggtgatgttatagactcagctctatcagtttagatatcagaatgatagtgaggttggtcagaatcctaccaagttttgtagtatgagcaagtacatgatgttattttaagtttttaagatttgttgaatatagggagctccaagaaactgagtcacccactaagaacatacatggaccagtccaaggcccctggcacatatatagcagaggtctgcctggtctggcctcagtaggcaaagacacacttaatccttgagagacttgtggtcctagggaagggggaggcctgatgggaaggagcatcgaggaggagggttaggatgaggactgagagaggtggcaatgactggaatgcaaataaataaaaaacaatttggtgactatttgatgttttaacatagtagtcctcagacagaggctatttagtcccaaacaccccgagacatctgagaatacctgctgatatcttttggttgtcacagttagggaagtgatactgatactggtacctagtgagcacaaggtccaggctagttagttcctgaaataaagaattattaactccaaatgtcagtagtgctaagattgagaaagcctacattagtgtaacctagttaataatgcaaggatattgaaaagattaaatggaataaattatataaagctctttggcacatgggatgaccttttgttttataactatgtgacagggtctggcaacagctctgggttcttcccttgcctttatggaaaattagtcttttttggacttccctaaggatcagtattatttaattgttcttgtgtttataaattgagactctgaaacaaaggaaaagtcttttattcatcttaaaaactgtgggaatttgctgggcatgatgatgcttgcctatatccaagcccgtagcaggagaatcaggaagtgagtttcaggccatcctgggctgtatagtaagttccaggatagcctggaaagaaaggagggaagaggggaagaagggtgtgtgtgcttgcacatggtgtggggggtgccgnnnnnnnnnnnnnnnnnnnnnnnnnnnnnnnnnnnnnnnnnnnnnnnnnnnnnnnnnnnnnnnnnnnnnnnnnnnnnnnnnnnnnnnnnnnnnnnnnnnnnnnnnnnnnnnnnnnnnnnnnnnnnnnnnnnnnnnnnnnnnnnnnnnnnnnnnnnnnnnnnnnnnnnnnnnnnnnnnnnnnnnnnnnnnnnnnnnnnnnnnnnnnnnnnnnnnnnnnnnnnnnnnnnnnnnnnnnnnnnnnnnnnnnnnnnnnnnnnnnnnnnnnnnnnnnnnnnnnnnnnnnnnnnnnnnnnnnnnnnnnnnnnnnnnnnnnnnnnnnnnnnnnnnnnnnnnnnnnnnnnnnnnnnnnnnnnnnnnnnnnnnnnnnnnnnnnnnnnnnnnnnnnnnnnnnnnnnnnnnnnnnnnnnnnnnnnnnnnnnnnnnnnnnnnnnnnnnnnnnnnnnnnnnnnnnnnnnnnnnnnnnnnnnnnnnnnnnnnnnnnnnnnnnnnnnnnnnnnnnnnnnnnnnnnnnnnnnnnnnnnnnnnnnnnnnnnnnnnnnnnnnnnnnnnnnnnnnnnnnnnnnnnnnnnnnnnnnnnnnnnnnnnnnnnnnnnnnnnnnnnnnnnnnnnnnnnnnnnnnnnnnnnnnnnnnnnnnnnnnnnnnnnnnnnnnnnnnnnnnnnnnnnnnnnnnnnnnnnnnnnnnnnnnnnnnnnnnnnnnnnnnnnnnnnnnnnnnnnnnnnnnnnnnnnnnnnnnnnnnnnnnnnnnnnnnnnnnnnnnnnnnnnnnnnnnnnnnnnnnnnnnnnnnnnnnnnnnnnnnnnnnnnnnnnnnnnnnnnnnnnnnnnnnnnnnnnnnnnnnnnnnnnnnnnnnnnnnnnnnnnnnnnnnnnnnnnnnnnnnnnnnnnnnnnnnnnnnnnnnnnnnnnnnnnnnnnnnnnnnnnnnnnnnnnnnnnnnnnnnnnnnnnnnnnnnnnnnnnnnnnnnnnnnnnnnnnnnnnnnnnnnnnnnnnnnnnnnnnnnnnnnnattgggaaaggatctttacctatcctaaatcagataggggactaatatcccaacatatataaagaactcaagaaggtggacttcagaaaatcgaataaccccattaaaaaatggggctcagaactgaacaaagaattctcacctgaggaataccgaatggcagagaagcacctgaaaaaatgttcaacatccttaatcatcagggaaatgcaaatcaaaacaaccctgagattccacctcacaccagtcagaatggctaagatcaaaaattcaggtgacagcagatgctggcgtggatgtggagaaagaggaacactcctccattgctggtcggattgcaagcttgtaacaaccactctggaagtcagtctggcggttcctcagaaaattggacatagtactaccggaggatccagcaatacctctcctgggcatatatccagaagatggcccaactggtaagaaggacacatgctccactatgttcatagcagccttatttataatagccagaagctggaaagaacccagatgcccctcaacagaggaatggatacagaaaatgttgtacatctacacaatggagtactactcagctattaaaaagaatgaatttatgaaattcctagccagatggatggacctggagtgcatcatcctgagtgaggtaacacattcacaaaggaactcacacaatatgtactcactgataagtggatattagccccaaacctaggattcccaagatataagatacaatttgctaaacacatgaaactcaagaagaatgaagactgaagtgtggacactatgcccctccttagaattgggaacaaaacacccatggaaggagttacagagacaaagtttggagctgagatgaaaggatagaccatgtagagactgccatatccagggatccaccccataatcagcatccaaacgctgacaccattgcataccctagcaagattttatcgaaaggacccagatgtagctgtctcttgtgagactatgcgggggcctagcaaacacagaagtggatgctcacagtcagctaatggatggatcacagggctcccaatggaggagctagagaaagtacccaaggagctaaaggggtctgcaaccctataggtggaacaacattatgaactaaccagtaccccggagctcttgactctagctgcatatgtatcaaaagatggcctagttggccatcactggaaagagaggcccattggacacgcaaactttatatgccccagtacaggggaatgccagggccaaaaagggggagtgggtgggtagggcagtgggggtgggtgggtatgggggacttttggtatagcattgggaatgtaaatgagctaaatacctaataaaaatggaaaaaaaagagacagataggaaaggaaaaaaaaaaacagttgcatgttgtcttagtaggaaggtagcttaaagcttacacgggtaaaaaatgagcagctggataggaggagataatctggaggttctggcttagggtcctctttgaggttgcagtcaagatgtattctagggctgcagctgtcggaaggccgattggaggttaaagattcatccacttctatgatgacccagtcaaacagtgcttggcaagaggctccgtttatcactatgtgggcctttccttatggctgctcgagcaccttcagttatgacgtgactggtgactgcccccagagtgagggatatgagagagacagtagggcagaattaacaattatcttttatgctctaacctcagaactctcatgttattgcttttgtnnnnnnnnnnnnnnnnnnnnnnnnnnnnnnnnnnnnnnnnnnnnnnnnnnnnnnnnnnnnnnnnnnnnnnnnnnnnnnnnnnnnnnnnnnnnnnnnnnnnnnnnnnnnnnnnnnnnnnnnnnnnnnnnnnnnnnnnnnnnnnnnnnnnnnnnnnnnnnnnnnnnnnnnnnnnnnnnnnnnnnnnnnnnnnnnnnnnnagattggctaggtgtattggtacatgcctttaaatctcagcactaggggggaggggagggttcgggggggggggagcagaagcaggcagatttctgtaagttgaggccagcctggtctacatagagttccaagatagcaagggaaacataggccctatctcaaacaattcagattatctaaaatatgagtgaaaatataaatttagttttgtaaatatgtagaaaatggggaaaataaaataattagtataaaagttaatggttaaaatacttcatttgtagggcttaaatatatttttgttttaagttgaaacatacttgcatagtgttatctcagtatacttacggtgtgtgagctgagatcatagttattgatgtgtctgtcatatttataatttgtgtcagaagcattccaaattctctctctagatattttgaaatggacatttaatcactgatagctaccattactatccttgatattgaacattggaagttatgacttctgtacagctgtatctccagacttatcaaccattcccaccctgttaccggagttgtctttcagtgaggtatgctggcatagccattgccgatgaagctgggtggtgtgtagtcctcactggctccaaactcatgccattccttctgcccatgctcccaagtgctgcgatttcagtcgtgcactaccacacccagttttatgtggtctggggattgaaccaaaggctttgtgcataccatgtactctgccaactgagttatagccctaaccatttttactgctgattggatgcacatgaatgccagacaaagtgtagatgcaaggctgggaggcatccgcttctagtcaacgtgtgctgtctattagtactattggctcttggaaaggactttgaacaattagccctgagattttccctgtatagcttggaaattaaattaggctttcttaaaaattgagaatgtcaactagtactttttcttacacacctgagctatacttttgcttactatgcttggctttgagcattcaggagttagagggctgtaacagggtgtctgaccatgcacccacaaaagaaaatggtttccaccctaggaatcagcacattacttctaagcactgttgaatgcactggcataagacttggcttccttcaagcgttttcttttttgcattcagttgattgcattcagttgaccgtgaccgattcaccccccccccccccgcccccggctctggctcactcactcactttcttgactcctgctgtcccagtgtcttgcttcatttacacagcgatagcttttcttgatttttatctcttagtttgaaaccctgtgtgacatatttcctttcttagacataggagagattaaaaaaaaaaacttcacaatttgaagaaaacttacaaaagcaataagcactgtgaaagagccagtttgggttttaatttttcctgtagctagaaaggtgccttcctgatgggaaggctttctcgtttcacagtgtccagtgtaggtggccagcgcaatcatggctgggcagggtgccagtacttcttttgtagagctgggtccaatgtgcttactatagttaataggttagagtaaaaacaagatatgacatagttgtctatgtaggttagtggtatgggaacagagttgatgcccaatatttgaaaattgggaagctagaggttttcataattttaagttacttattatcaatcttacaagtatttttggtcatcttaaatactcggccagttctatttcctaatatagaggttttatgggcagttgttttgaaaatgggctagggtgaggattaaaattaattataagcatccatttgaaaggctgaaaatgttctatcacagaaaatttcatgggatgtatatattgtctttctgccttggggagtagcattcctaagagctgacttttattttgggctttctgctgtgtgtcagctatggtggctcataagcatcttttgtatgtgtgtgtgtgtgtagataatgttatgttgggacctgggtggaatataaatcttttattggcctaaatctgactttaatcctttgcatggctctgagagaaaatcaatttcctctgctctgtcaagatttttcaggtcagcgctctttggaagtctcccaattctcttagattaaaatagattttgtttctgtgctacatactggtggtatcagtttgtacgatattgggatctaaaaagtgagaaaacagaggctgataaggtatccgagcattcttggatttcagctacctttttgacactcttcacctttgaggagccaaggagtgtgtgtgctttcaaaggcatcatttggggacaagttgttagtgacgcttggtaggtgaggctgagcacgttaatgagttctgctcgatgactcactcacttgctcactagaactgacctggtcactgtaattaacctgctcaccagaaatgaagggcttaggctctcactactatggccttctagaagtaagaggaccaaggtgaacttttatagtttcagctctgcaaatatcatctttcaggactccagccccccagttgcaagcaaaccagcatggcatggcctcactggcagtgaaaagcagagggtagatgcttttgaacccttgggtgttttgaagagggattgctttatcatagacatgtaattccttgctgtccagttgtgatagtaggtgagtgattctgttgtgatttgacttaaaaaaagaaaaacccctaaaacgatatatttcgagactgtttggataaaaaaaaaatcagtgtttctcttctatttttctggaaaatgcaaggatgtcctcccacccccagtgctggggattgaacatactgttcctacatgatatccaagcatcctacacttgagctagatttccaatctttattaaaaaattagggtctcatgtagtccaggctggcttttcactgtgtaactgaggataaccttgaactcctgatctttgggtctcccatgcaaatgctgggattataggtatctgttaccatgccccactctcagcatacctcccgctatgtttgaaatgctgatctcaccatgttgtccagcctgagcttggatcttccatgtccttctctctgcctcccaagtagctagggtttataggcatgtgccaccatgcccagctcagaaggactgttaactctatctatccttctacccaagttctgtgatttttgtcttctattcagtatacgacatgacattattattttctgctggcatttttctttagaccagagtttagctttttttttttctgtaaaggccagatggtaaatattttgtttctgcaagccatatggtctgtcacaattgtttagctccgctattgtagtgccaaagtggccatgataacatgcaaaggtctttgcatgcccattttcaatgaaacttatttatacagacagacagtagggaagaattggcccataggacaattcctaatttaaagtaattgatatcttttttccttttcctttttgttccttctcccctccctttacatcttctctctctctctctctctctctctctctctctctctctctctctctctctggttttggttttggtatagcccctggctgtcctggaactcactgtgttgaccaggctggcctcaaactcagaaatccgcctgcctctgcctcccaagtgctgggattaaaggcttgcgccaccacgcccggcacatcttctctttaccccttcctttcctttacaccccttaaggctggacttaaactttctctgtagtgtaagctggttttgaactcctgtcctcctcttcttcctctcaggtgctgggattttcaggcgcattctaccacaacagggcttttctcctttatttgttgctctgcatttgaagttctctctaggatcttttattttagtactgaggattaatccaaagaaaaagctcttccactgaattacatctccagcctcaaagaactttccaggcaaggatatctgttcttatcattgtttttcaacattgtgtttcgaatcctagccagtatgctaataaggcaaaggaaatagaactcatacagattagaagaaaaaaaatctctctatttacagattaactatataaagaaaacacatgaaatccacaaaagaattcctagaactaataagtgtgagatacaagataaatgttaaaaatgaatacattatatactagctacgaacacataaacactaaaggtggaaaaaatatactacctgggtatttatcgagtgtattgttcagtggtagaatactagcttagcatgtatgatgccctaggttcttccataagaatacataataataccacttaccattagtcagaaagtactaatatcatagccaagcatcctatacctgagctatatttccaatctttttgttaaaaaattagggtctcatgtggcccaggctggaactgaaaagtaaacctagcagagtgtttgtaggacacatgtcttgaaaaccatagaggtgagagaaatcttagtagatggaaagacggtatcatagtcattattggaagactcagaataattggagttgcaattccctacagattgaaaagcagctttaaaataattttatgaaaatcctagaaagattattttaatagatatacatatttttatcttaaagcatatatggatcacaacaagatctatatgaaatggcacagggtgtggaacacctaacagtatcttctaaaagaagtagaaagcgggaggaattagtcatatagtttcacaatgtactgcataactatagcaattaagactgtgacaataggtgaatgcagttaaatgcaagaggacaaagaactagcaataggccttcagaaatatgctcaattgacttttgaaaaacacttacttttgatttcttgggtgctggcactgggctgtcatcccattgcctagtgcttgctagacaaacattctgccatggagtcctcaccctttaattaatttacttcggaaatgagttctcttgctgccagttatggtctagaattcctggcttaatatatccttcttcctaaacttcccgagtagctggaattacaggcacacaccatattacatggatcttttttattaacacatttttaattgtatacatcagtttagcttgagtgacatgtatatgtctactgtgaaatgatcaactctcaacactccatttctaccacattcctaatctctaataattccaattatattttcaaattgactttagtgtttacctatgaagggaaaatcatacaatgtgtgttcctctgtatatgattcattttacttactatcaagccctgcctagctctgttgtaattacttttttgttgctgtgaaggaacaaaatggacttgccagtgaaagtgagggcaagcaggcaaaacaaaacaaaacaaaacaccaaaaaaaccagtttctttcttccaaatccttttgtttttctaattagcattttaaaaattataggcaaggtgaatatattattgttgctgagggctgaggggccaaagccatgagggaatgagtagctaaaagtaggcaccctgaggaggctttgtgatgagaatgttctgttcatgagtgcatccatgttggcactgtggttgtaatactgtacagtagcattgtaaattatcatggggggggaaatggataaagagttcaaaggctctctgtatcatttcttataactgcatgtgggcatatacttcaaatgaaaaacataagtatagaaacagatgatacctggatgggaaaggatctgaatgtgagaggtacaatactctgtggtatcacttaatattttattaattgttttctttatttacatttcaaatgttaccccgcttctctgtctccccttcacaacctcctatcctctccccctcccctttgcctctaagagcgtgctcccccatccacctacccactccagatcaccctccagcatccctcttccctagggcatcaaatctccacagaaccaagggccttccctcccactgatgcctgagaaggccatcctctgctacatatgcagctggagccatgggtccctccatgtgtactctttggttggtgctttaatctctgggaactctgggtggtccagttagttcatattgttgttcttcctatatctggtcgtattccaaagtactggttcagcgtttttgtgagatagagccataagggttcatgtgatttcacgtgaatgtatgttttcctcaatacagcagatttgggggactcttcattgtatgtccattgtctcttgcttcttgatttttgttagacataaagcaaatgttttcatctcagtttggggatctttccttaactttcatgatttcatttttgcactagtgtttcatcaaaaggccagagtgattttccctggggtgattttccttgttccttgtgtgatagggatttctagttgtcccctgactttcacattttcattccctttcctttaaaacagaacttcccattttgagtgtggcccaaagtaaaggttgcaactgtccagatttcattgtagctatgtgtgagtctgtgactgaggtgtaaactaaacggagctcccaatttacttaaaaacaacaacaataacaatcataacaataacagaagttaacagattaaataaaataattgctataaatgcagtgtgctctgtattgaattgtgtcttccaaaagatatgctgatatttcaactctagtaccttaaggatgcaatcaatcttctttggtaataggctctttgcagaagtaatctagttaagatgtgctcatattgaaggaggatgggcctaattcactatgagtggtattcttaagatgacagtcctacaaagacagattcagagagagtgcatgtaacatgatgatcagagtggtgcatctaagccagtggttttcaacctgtggctcatgacccatggaggaggagtcaaacaaccctttcacaggggatcctaagatgagtggaaaacacagaaatttacattatgattcataacagtaacaaaatcacattttttttgtttttgtttttcgagacagggtttctctgtatagccctggctgtcctggaactcacttgtagaccaggctggcctcgaactcagaaatctgcctgcctctgcctcccaagtgctgggattaaaggcgtgagccaccatgcccggctacaaaatcacagttttgaagtagcaacaaaaataactttatgttaggtggtcaccacaacataaggaactgtattaaagggttacagcattaggaaggttgagaaccactgatctaggcaccaaagaacatccaaggcctgagaagcaagaggcagattctttacttagagcactctgaatggaggcaccctgcttactgatacctcaggtttggttcccagtctccagaactgtaagacagtaaatagggtctcttgtcctaagccacataatgtgcatggttctaacagagctgggaaagtagtacctagctctttgggcgagctctgtttttgagtgtgtattaagtggttagatcatgaggagaaggtcctcatggatgggtttagtgtcccagtaaaggagtgctgaagggagcttgtttgtctagtctatggatgcagaaaaaaagcaaggaagtgccatttatggaggggaggaggcaaggaggggaggagaagacagacacctctgcccttcataccctaaccaaatactgaatctgaatctgctcacatcttgatcttacatagactttgagtccagaactgggaaaaataaatttctaatctgaatacaaggtagcttattgctaaagcccaaatggaatcaagtcagggagtatttaaaactgggctgaccatgcaaaggtttctttctttgagtcctgagacatttggactggctgtatcttgtgtttctgagaaaaaaaatctcactgaagcaaacatggacattgttcattgctttaaagccttctcttccagctcccgtatgcttttactgcagatttcatgtgcttgaatgccaggcaaaatgtaaggtgaatagtagatgcaaagcctgggtggtttccatggagaccttccttgcttttttcagcagttgtcagggaaacatttcgtttcagtttgtggggtctacctatttgcacagctcttggtaagggttttggttaaatttcaacaacctaatgaattcagagcagaatttgtttcgttcctttagaattatattacattttcctgcaattcatagatgttaactaatattctgtctgaattgatcagactactcatttatgtgtatgcagtaagcattttctgagctttgcagtagaaaactgaggttcatggacacagaagctaactccggaaaactgatgttgaatgccatatggttttagtccatgtggttgttgttgagacagggtctcacactacctgtgggtggttttgaactttttcttttactttttattattactactattattattttattctttaatccttttttacagtccagtcatcctcctcctcccagtctgcctcctagctgcttcccattccatacctcccccacctctgtctccaagaggatgtccccatctcccaaccttcacctcaccagaccgaccaacggttagggctaggggttagggttagggttagggttagggtttatttcttccctgaccaagttatcattgagtagattggtgttcagtttccatgggtatgtgggttttctgttgtctttgttgttattgaagaccagccttagtctgcagtgatcccagacatgaagaatcatttcagttttttactgctttgggaactctgccactatgtggaaaaaccacaggcttgggctgcaggaagagagaccatgtggaggaaaatagcagtaccaagccaaccgatagccacctgcagaagcataagtgagcccacctgagatcagtgacatttggcctagaacagcagcattgcccagctgaactgggcccaaattactgagccccagaagtttgaactgaaaaagtattgctttcaggtcctttgggggcaatttgttattcagtggttagtagttgatatagccaggattagaagctcttagatgatcaaggctcacctttaagttatcttttgtcactcccaacattcttaataacaacatctagactagaagtaattgtggctaattggtggagaaaaggaactattagcagaattttgcgtagttgcacctttctctaagaaagctgctgaggatggttgaaagctgcacaggtaaagggcagtagggccagaaccacagcctgatcacaccatagaactgagccagtgagggtgctggtattctagatagtgaatagaggatgccccaactacaacaggagcattacctttactgcacagaggttggactgtctttggatctgggtgtcacagtcaaccactttttatactttgcatcaaggattcaaaagcccatatggatagtattggccaaggttagttctgtgcccagaccttgacttggaagaaatcaggagagtatttgtattgaggatgtggcttggtggtagagtgctgtctaacatgcagaaggctgcagattcgattccctagcaccacacactcacacaaaagaaagtatccaacagttattatttagcttatttagttgaaagcaagtggacaacttcatgaatattgagaatattctgattctgggcagtcaaaagaaaaatgtcaaatgttcattagttctttacaacacagttaataaggccagatttgtattttgtttccatattctgttgagaggaaacaattctgagtctgtaccccagcccttgtttaccttcagagatacatgctggtgggcattcagagatagtgggcctaacttgcatgtacctctgcctactgaggtaggaatagtacatttttctgttgccgggcccaaagacactccattcattccatagtgtcctacccatgggggctgaatagtttatatcttagtgagcctataggttgactagttgcacaatgaaatggttcatgtgacacttgtttttatttactgtttgttttgtggtgctgggttgatagtgcctagggccttatatctgctagggaggcactctgccactatggtgatcagtcttgatagtatttataattatccagaaaactcctgccctcatctctctcagtttcctgactgtggatacagtgtgaccagttagttgccttacacacctgcagaaatgactctctgccctgatggattgcaccctcaaacttcaagccccacaaaccctctcttaagttgcttttgccatagaattttgtcatgtcagtgaggcaaataatatatgtatttaatagttacattgcaccaactaatctctcagttaataaccaagccaattccataacaaaatccctcatgccacaactgtttgaacactttgggacttggctttgttctcatctctctgcttgtcctatacctcacccttcgctaacactttctttgtgaccaacttcctaagattagatctaatgccctgaactacacttacatctttgttgttatgccatggcgatatagagtgttctgcttgtcatgagaccctgctgttggtgagaataatcctgaatatggaagaagttccttatccaaatttagtgccagtgaactgttcaggggttggggaggatagtgctgggatgtcaggaagttgagaggtgtgtttgttattttaacatccagagaaggcctccattgggacaaaaaagccaaataattggagtcagattgcttagccgatctaagtttggtgtttctagaataactttagttccatgccagaaatctccagtctatttggatttgaggttgagtagacacttcttttttttttttaacctattgaacttttttttctttttttttttaattacgtattttcctcaattacagagtagacacttcttatgatgtacactgaacttaaatttattcattccctcagcatgccaaagatctttgtatagtactagtgatccactcactagaaatgcctggatttatcctattcttattaaagttttagtttctttcaaaaggaaacgtgcaccaaatattatgtacaaaatatagaatgtattgaaatcaacttgggaaaatccaaataacctgcaactattattttaatttttctatctatctatctatctatctatctatctatctatctatctaagacatgtaagctctggttgtcctggaacttactctgtagaccaggcagggttcgaactcatagagatctgattgactctgcctccagtggtggaactaaaggcatgcatcagtatgcctgaatctttttttcttttaaaatatagaatagtttattcaggggatggggagggaattgagaaggtagcagagacagagaaaagcagagagagagagagggagagggagagaggaaggagaaggaggaggaggaggaggattagaggctggccatgagcactggggagagagagggagagaaggagggagaggacagagctagagcaagaagtcaagagcacctggctcttttttttttttttttttttgagacagggtcttattctgtagctcaagctagcctggaattaactatgtagcccaagctgaccttcaatttatggtgatcttcctgtcttagcttcctgagtgctgtgattaaagtcatgcaccataagcctggcttttacttttgaaaagcactaaaattgtcagaaaaggaactatctgcaacgctaatcctttggcttgtgtgttacgtctgagttgccagaaccagcagaagctttatataattctggcagttcatttgcattcacctgagatttctctgcatccagctgcacagaacttctgtgatatgcaaagccctgaaacttgggccagaatcctgaaagtaattttctcttgtaatctgtgctataattgcattttaattcagttctggtgtcaagattgcttgtgtgtatatggcgtgttttcttcatttcattagttcctggtatttaggccaagtgcctggtctttggtaaattttatttgttactgtggagcctgctattctctcctaaattaatggagagggccctttgtgacttggcagttcacttcattgcccacctccccctctgctgacctttgcgtggttggatcctattttttccttggcatgtgtcagctctgaggaacccttgaacttgtagtgatgagtaatcacttgattgcacccatctgggcagcttggaaagccatagcatcggcttgtcaaagaaggccgggttgaagaaagtcacaagagaacatcagcatcactgacatcatcacatcagtccccattctcctcatattaggtgcaaaagaaaaaaattaccatagagcagcctccatttgtaatcgcagaacataatggggaagagaaagctggagggagtatcagaaattcaggcatcgccttggctacatgagaccatgtttcaaagcctgtattggatatgtgtccgaggtccaccatagctgttttcactttggtagtttcctttctctgtataccagggacctttgctgccatgcttagtcttgcagtctgtgagctgtgcaggttctctccattcttccaagactgcctggacagtacctctttgaaggagctagtatcttgttgtggagtgtctcttcggaatgttgagagtgtggaaagtattcaccacagtgagatctgtacagacaaggggggctgtcttcctactttcaagagctcctcatgaaccaacctgctggtggatacacttaagagttcttggggttctatagcagtaaatagcagatacttggctccagagcttgatccacttgctgacctcagactcatgggtatcaaacggcagtattattctcaggtgatgaaattagcttttgactactgaaggtgagggttgttcactactgagttgaacctcttgcagcctggactttcaagctgaatatgtggttccctaactctccataactacctatgagctctatctcttacccctggcccataataggttaaatttgggtgatatggcttgctatccccaccccaccccccctttttttttttacatctttccagggtagctcagtttaaaaggttccttttcaagatggtacctggccacattaccttccaagtcatatagagtacggaatgggattatatctctattactgacccatttctggaagacctaatctcatcaaaagcagccactagacgaggcttgtgggattgggctgtgggtaggattgccagtttccttttactaagatcacctccacctttcctaagattacttgtggatgaagcttgtgcttctcaccacccccctccccaacttgggagccatgtgattggagctgtgttctacccagcttttggagggttacgctatttgtaatttttagctttcgcctagttcccggacactagcctcctggcacaagaccgcagccctccatagatctgtgtccttccaagcccctccataggtagaggacatgacctgtggtcacttagcctcaagacagatctccattttaatgaggtacctaaaggcctggaggcttagccaataaactccccttccnnnnnnnnnnnnnnnnnnnnnnnnnnnnnnnnnnnnnnnnnnnnnnnnnnnnnnnnnnnnnnnnnnnnnnnnnnnnnnnnnnnnnnnnnnnnnnnnnnnnnnnnnnnnnnnnnnnnnnnnnnnnnnnnnnnnnnnnnnnnnnnnnnnnnnnnnnnnnnnnnnnnnnnnnnnnnnnnnnnnnnnnnnnnnnnnnnnnnnnnnnnnnnnnnnnnnnnnnnnnnnnnnnnnnnnnnnnnnnnnnnnnnnnnnnnnnnnnnnnnnnnnnnnnnnnnnnnnnnnnnnnnnnnnnnnnnnnnnnnnnnnnnnnnnnnnnnnnnnnnnnnnnnnnnnnnnnnnnnnnnnnnnnnnnnncctctcagtgctcccagccatggcctccaccaagccaagtcaagccacgtgctgaacaagccaaggactagcacccccttcttccccttctgcctgggctagatccagttcagggttgtcagggttaccagtttattcttggctcttttgtgactcccagcagcacctgggtgcccaagagcctgagaaccagatggtcctggcctccttgcaggctcggggacccccaagccagctccagcagtccctaggaacctcagactgtgctccccctacccctggagcaaagtcccatggcttcccatagcccaacacctgcctggcgctggtgtggggtaagcatagtcaaaacttcccacgtgtcactttcccgagtggcccaagccctgaggcagagcagatgtggcatgcatcaaccctacacaacctaccaaccaaccaattatcccaaaccacctggaactctgaaaccgctggaagcaaacatttcaagatagagacagaggtgtgggttttctgaaaagcacttcagtagcccaggataaaaagagctgacaaagggctagcatgaaattaaaataacttttgcaaagcaaaggaaacaactggcaggatgaagaggcagcctacaggatgggagaacaattctttccagctatacatataacaggggatgaatttctagaatctataaatacttttaaaaattaaaaatcaaactactcaaatcattaagtcagtgaatgggaaaatgaataggtagttatcaaaggaagaaacacaagtagatagtaaatacttggaaaaatgttcaaattaaaacattgagatttccgtttccctgatgactaaggatgttgaacatttctttaagtgcttcttggctattcgagattcctcagttgggaattttttgtttagctccataccccatttttaatagggttattcggttctctggtgtctatcttcttgagttctttgtatatattggatattagccctctatcagatgtaggattggtaaagatcttttcccaatttataggttgctgttttgtccaattgacagtgtcctttgcctttcagaagcttttcagttttatgagatcccacttgtcaatagttgatcttagagcctgagccattagtgttctgttcaggatattttcccctgtgctgatgtgtttgaggttctttcccactttctcttctattagattcaatgtatctggttttatgtggcaatccttgatccacttggacttgagctttacacaaggtgataaatatggatcaatttgcattcttctacatgctgactgtcacttgaaccagcaccatttgatgaaaacgatgtctttttttccactgggtggttttggaatctttgtcaattatcaggtgaccatagccatgtgggtttatttctgggttacctcacagcagtcagaataggttatcaagaaaacaaatgataaataaatgctggaaaggatgtggtaaagaggaagccttatttactactggaaaaagtgtaaactggtgccaccactgtggaaaccagtgtggacgttccttataaagctagaaatactctttgatctgccttctacagtggaactgctgctaagatgcagtttttcataaagaccgtcacaggaaagaccatcatgctcaaggttgatcccccaaacactataggaaaatgtgaaggccaaagtctctgtttaggaagctgttcctcctgattagccaaggctgctctttgctggtaagcagttggaagatggtcatgctttgtctgactacaacattcaaaaggagcccatccttcatcctgtgttgagatgtcatggtggtgctgagaagaggaagaggtcttacagccctcgcaagcagaatgagcagaagggaaagaaggttaagctgtctctatggaagtggataaggtggatgaaaacggcctgggttgagagtgcctttctgatgaatgtgatgctggagttttcatagcctgccacttgaacagacagtactgtggcaaatgtctgacttaactgcttcaacaaatcagaagacaagtaattgttgtttatgcattaataaaaagataggatctgaaaaaagccaaaaataggacttcaacatagctccttgggtaaaggcacctggtgttaaccctgatgacctgaggccaatcccttagatccacagggtagaaggagaacattgatcgtactctaaattccacatgtgtatcatggcatgtaagtgtgcacatatatgctaaaatatattaaataattaaaagactcaaccatacctaacttatatgtactcaaaggaatccaaatcattgtttattgctgcatgattcataatagccaagacatatataatcagccatatgtacattagtcatcagcaggtaaatggataaagaaagcaagaaagtggaatacatatgtacaatgaaatttttcttagctgtaaagaatgaaattatgatatttgtaggatggaaatggcaatcattttacatgattgccaacacgacatatcgtgttaaatgacataagccaaacttagaaagacaatacatgttttctttcatatacataattttgatttaaacacacacacacacacacacacgccttaaaacagaaggaagtagtaggaaactaacaaggtggaggaaggagggattggggagggtaattgtgggtaagaacaagatacaataataaagatgtattagctgggcatggtggtgcatgcctttaatcccagcactcgggaggcagaggcaggcggatttctgagtttgaggccagcctggtctacagagtgagctctaggacagccagggatacacagaaaaaccctgtcttgaaaagccaaaaataaaataaaataaaataaaataaaataaagatgtatgaagatgtcataattaaaaaccattattttgtatactaagtaaaatatttaataaaatacaacttctatttacataagttacaaaaatgtatttatttggttagattgatagtcatacagtttgctatccaaagatgtaaaacaccacatatggggttttttcatcatgccatgcataattaaaaatgtaattagaatatttattttgtgagctggacaagtaatatgagtgctttgggaaagggaaagatgattttaaaatgcaagacttgtggacaggaagatgtttcattgggtaaagcacttactgcataagactggtgtcctgagttcaattcccagaattttcataagggactggatgcaatgccaaacatcagtattgccgacattcttaccttgagatggaagaattgcctagaaggccagctagcctgggcgatccagtgagtgcaggagccacaagagagactgtgcctcagaaacaagaggaaggtgagaaccaactcctgaaagttgtctctgcctgtatacacaagaaattaaagatgcaaaacttaacctggagagagttccatccatgtaggcgcctgcattaggtgtactgagaaccacagtgcaagatggaagttataagtatcagagcacaaggttgaaaccctccttttagattttactcatagtcatagaatgtttggggaacgtgacagagccttacactctatctagtgtgaatgctttgttctaatagatgagaccagaacctgaaggacttcagatgcctcctctatagtcacctggctagacagtcttcagtaaggcaaagtgttgctttggactgtgttgacagttgagagaaaagagccccgtgtttgtgagtgaagtctgggatgatgagtgggatcccttgaagtgttgtcccattgggcactttgttctgaagttgcccataataatagcacatggaatgcgaatgtttctggtgtatttctcggacacttcttgctaacatgatgtttggccgtgtctcttgctctttatacttcatactaaattttgacaatgtgattcagattgtacaaggtacaaaataatatagagtaaattgttgcttcttcctatgctcttgtttctagaggcagccagcagtcaattttgtaagcttcaacttagagagctggcttatctctaaactatgtgtcttcacacccagcaaggcatctgatctccactacggtaactgctgagcaccatggttcttttcatttttctcagtttatcccaaggtaacctgaagatcctgaggacttcttcattccttgttaattggtgatctctagggcaataattcactctagggcaaaccaaagggtttgaggtaagtcacaggattgtttggtgagctggagaaacagggtgggtgggtcctagcttgccggtagcaaagccctgagccacacacactactcatgccaagcagaagccttatgtacatgaaccttcattacgtgcagaccccaggggtttgactgacagtaactgcttctttccccactcctttactggaaaggccactcactcctcagctacatctacaaaagtagaagctctgaacaaaatagtccttttacttccttgtttctcttcaaagcaggctattttgaaatgtgtttctaatggagcctagatggcctgtttatagctcagttacatgggaattaggacatttgattttcaatttttttttgaaacagggtttctctatgtggttttggctgtcctaaaactaactctgtagaccaggctagcctccaacttacagagacccacctgcgtctgcctcctgagtgtggggggattaaaggcgtccacgtccaccaccacctggctgatttgcctcgtcccccgtcccgaatgctgggattacaggcatgttaccacacatggttttatgtgttgctggggatctaacccagggatttttcatggagactgtcaactctacgcacaaagttgcattctcagccaaaacgacttcagaaaaataatccacatctactcgtaagaagaatggaattaatgtatcagggataacattttccttaatgaaattctaaattagtatttgcaattgtcaaatggattgcaaaatgatcatctgtaaagcccattttcagcttgtgtgctgaatcaggaagtagactggtgttcacccatgagcaccagtagttttccagccctgatataatgaacagagtatgaactttgagccttatcacatgtagtttgatattgtctttgaatttgagaccttgaatatctcacttaactttttgaactgggagctttatttgtgtatagctagggggcattctattataatgttacttaatgtacattatattaccatacataaagcatagaaaaagattaataagatctgctgtctgatatcacacctaagccttgcttgtctgttctctctttagtgaggtggtttggtttgggctttgtctcagttagggttttactgctgtgaacaaataccataccatgaccaaggcaactctctctctctttgtttttttttacgtcaacaatccagttatttatttcttagagtagtctgtgtttgatgtgtagtaggatgaggattgatttttattggatattttctttatgtacatttcaaatgttatccccctttcaggaaccccctatcccatcccctctccccccgcctttatgaggatgctcccccacccacctacccactcctggcattctcctacactggggttcagtcccaagggctgctcctcccactgatgtccaacaagtccaccctctgccacttatgcggccggagccatgggtccctccatgtgtactctttggttgctggtccagtgcccaggagctctggggggtctggccagttgacactgttgctccccccatgggactgcaacccccctcagctccttcagtcccttcttcaactcctccatcggagactcctctctcagtctaatggttggcttcgagcatgtacctctgtatttgtcaggccctggcagagcctctcaggagacagccatatcaggctcctatcagcaagcacttcccagcatccataatggggtccaggtttggtgactgtatatgggatgatccccaggtggggcagtctctggatggcctttccttcagtctctgctccatactttgtctccatatttcctcctgtgagtattttgttcccccttctaagaagcactgaagcatccacattttagttttccttcttcttgggcttcatatggtctgtgaattgtatccaaggcaactctcataagaacagcatttaattggggctgcttacaggttcagaggttcagaccattatcatcaagacgggaacatggcagcaaccaggcaggcatggtgcaggcagagctgagagttctacatcttcatctgaaggctggtagtggaagactcacttccacgcagctaggataagtggaacacctacttcaacagggccacacctgctaatagtgtcactcccttggatgagcatatataagccatccccattccactccctggcccccataggcttgttcaaacatatgagtctatgagggccacacctaaacatagcatgattaaaaaaatacatttagtccaacttccaaagtccctatagtctatagcattctcaacaatgttaaaagtccaaagttcaaagtctctcctgagattcatccaattatttaattgtaattcccaaggcaagataggaaaccaactgggcaaactccaatctctgcatctccatggctgatgttctcctgggctggttccactccctgttagcagttttcttcagtagatagcccatggctctgacatctcaaacatcttgggatctccaaggcaacttcaatgttacagcttcttgtttaaatgtctgggatccacacatgatcttctgggttcctccaaaggggtggcatcacttttccagctcttccctcagtatcactctaagctcaggttgatccattccactgctgctgttgttcttggtgatcatcccatgcatggtactggcatctcaaatatgctggagacttctgctgcaactaggcttcaccaataccttctcatagactctcttcatggtgccaagaaatgtgccatcagtccagttcagtatcatcaaatggtgccatcaaatccttttcatgaccccttcagtcctgtgtcattaactgcaactgaagctgcaccttcaccaatggcctttcatggcctctcacagtgccaagcctcagctgctattcattaccccttcatgccttcaaaaccagtaccatctgggtgactcttaaaaattaccaagtacagctgcagcacaagatacaaccttggctatctttggctttgtgctcgcagaaaacacttccctgaagatgtgacctcaatgatactggtttcctaatcaccactaatttcttagttccagctaaccagcatcaattgtcccagtactctccttctcctcttgactataaagccagagccaaatggccaaagctgctgaattctgctgcttcctggggctggaacttggcccccttgttatattacgttatgaccccctttctgttttccaactccttcacagcctaagcttagctgtcctggaacttgctctgtagactgactttgaactcaagagttctgcaagtttgtctcatgggattagaggtgtgtaccacttggatctgaacttagctggatagtatcttgccccaaagtcctactcccttaatctgctatctcctagaacacagaattaggctccatttaacttcctggtgcccctttaatactcaaacattttattttatatttttcctttctcagcttactatgcttgtttaaaatgctgttcataagacttaaccacaaaacaaagtctatgataggcatttctgagacttcctttgccagtgcaattaatctaagtctcttcactttagcctcaggcagactcttcagacaagagcaaaaagtagccacattctccaccaaaattccacaaaaaacagtctctaggccatatattgaagttctccactgacacttcttgggtcaggtctgaacaattcaaattactcttagcaacaaagtcttccatattcctactaggatgtccaattaagcccaatttaaaacattctacctctttccaaatccaaagtccagaaattcacattcttccaaacaaaagcatggtcaagcctatcacagcagcaccttactcctggtaccaacttctattttagggttttactgctgagaacagacaccacgatcaaggcaactcttataagaacatttaattgggactgattacaagttcagagattcagtccagtattatcaaggtgggagcataacagcatccaagcagacatgatgcaggctgagctgagagttctacatcttcacctgaaggctgctagcacaatactggcttccaggcagctaggatgaaggtcttaaagcccacacccacagtgacatatctactccaacagggtcacacttctgatagtgccactcccatggccaagcatatacaagccatcacaggcttatattacagtttgctatattgagcaatatgatataggagtccatcttttcttgagtgacttactgaagtgacattagaaagcataaatgaatgggaaagggaaagccagaatgcaattgatttgacaattcatttgtttcctaagaggccgaaataaaacctatgagcatgtccttcaaattcttttccatgttgttactgagtgtgccaattgacatctactagggtatactgagcacaagaaaaaaaaatctctagagtggcaagacctcactgtgatactctattctgaatctcagggcgaggatgaataaggatgagcagttaggtttgaaccagtactctcctagccgaaaaagtggggaacagagcagttcaaaatctcttgtattcttgtaggaattcttggctatatggtatgatatagctaaagctaataatttacttaagcagctgctcataaaagtaattacaacacgagagagaactgctctatttctgcaggctgtataaactaaccagtagatattcattgagtagaaaagtgtacagcaaacatcatgaagtatgattcctagggaacagccatgataaaaccatactgttgacttatgctgcacactggggatatgtaacacaaggtgggctgggatggaatggaaatggttaacagtaccaatagtgtgtttccttcttttgcttcttccttgctgagaagtgagctgttttgcctcctgatagacctcttgccctgatatactgtccataatggactgaaatcactgacgctgagtgaaagaaagccttccccatttaaggtgtttgtgtcaggtattttgtcacagcaatgaaaagtctaacatagtgtcgtggaattgcataaggcttcagagttaacatctgtcaatgggtatcgtgaagaacaagcctggctggcaaagaaacaaggacacgattggcttctatgtaggggactcctgaatgggtattgagaaacagactggtgtctggtgtgcttagaaccttactttatacatcagggtgggagttgttggaaggatggtttggatcagatagaagggcctcaaaagccatactcaggactgagttttacaggaaggagtttacacaaggagcctgggaagcactttggaactgtggaaggaatgctgaagctggcagataaaggtacacagtctagaacaggatgtgagccggtaaggtgagagcagagactgaatttaccagctgcagggggaaaggaaggggagagggggaaagggagagagggcaggggagagaggggagagtttcttggagaattcgtctagcccctatttagaccattctgtggaggcctttaaaaatacttgaagcatagtcaaacctttgaactactccaaaaatttattatctttcagctaggaaagaaagtattatttcagccaaactggaaatgcgtatggactgattccacacagtcacttaatcttacagaaaaaggtaggagggaagcaattttagtggccttcaaactcctggaactgtgtctgtattcctcccaaatggccagtaaaattttctgatttgtagcatccaacatccagtttagtgtgcatctggaagttgtgaggaagttgattctatccattcctttttgccatgtcttgctttccacctgagaaaacaaaccctagtccaaaggtttgcattctatactgtaaatctgcacagtatgtaatcgaagacagacccagcagagtgtggtgtgtgtttggggtaagctgaagaagagggcaaaggaggtagcttatgaaatactgcctgctaatcgagtagctggagtaactttttaagtaactttcttaactttatatatcattaaactatttctatacacaccttagaactttccaatggagaatttaatcaggaaggactttgattttttttttttttttttttttggttttttgagacagggtttctctgtatagccttggctgtcctggagctcactttgtagaccaggctggcctggaactcagaaatccgcctgcctctgccttccgagtgctgggattaaaggcatgcaccaccatgccgggcaggactttgaatctttttggtttttcgagacagggtttttctgtgagccctggctgtcctggaactcactttgtagaccaggctggcctcgaactcagaaatccacctgcctctgcctctcgagtgctgggattaaaggcgtgcgccaccatgcccggcaggactttgaatcttaatgaacaaaaacaacaaaacaacacagtcaaacccttctaaaagcagcctatcatttggattgcaaaatctcaggctgatgaggcaccactccataggtaaattccaaaggtttataattcttttctctcctttgaagcttgtgcatttcagaaaggtcttggtatgtctctaggaggtttggtgtacaaagagcaagacgtggcctaagacctgactgtgcttatatgtgtctatcctattttggctaaggtgcagtgattctaacagtatacgtcaaaatatagaaccaaatgaaaataaggtggttttctgatgtcagatacggtgagtcttaaagtgccatgatgagttttaccagcaatttcagttacgtgttgtaaaacattgtatacattgaattagtagctacggtaaaggagtcgcttaaagccaattcaatagtaaattcctacttttaagacagtgtttttttttttttttttttttactgctccagtggatggaaggggactttatttggtcccggggtcacatgccaggtatgaccccagctttatttgaccttcttcttggggcacaggttgttggtatggccgcacttcttcttgcggcagttgactgcacgagggtgcaggcgtgcgtagcacttgcggcagatcatcttgtcacagttgtacttctgggcaagctgacgaagggatggctcaatgatgccaccgcgcagacgcagcaccaggtgcaaggtggactctttctggatgttgtagtcggacagggtgcggccatcctccagctgtttgcccgcgaatatcagcctctgctggtcaggtgggatgccttccttgtcttggatcttggccttgacattctcgatggtgtcactgggctcgacctcaagagtgatggtcttgcccggcagggtcttcacgaagatctgcatgttggcgtctgccgctcgcccgcctcgttgaagagaaagaggacagaccaagacagtgttttattacattttatttattcctctcatgtgtggatacatctggcatggatgcatgtgtgcctataggggttggttctctcctttctccatatagattctggggataaaactgagctggtcaggctttctggcagtgtccctacctgctgaaacatcgtggtgacccctttcattgatactttctaaaatgtaattgttcactttatgaaatagagttcatttgttcacttaccaaggactgtagttttttataattggagttatcctataagataactttcttgatgctgcaactacgtgggcgctataggtcatgttttccatgtacagcctcatgtataacttaagatgtgtaatttacatattcacagtagtggacagattatgaaactcacctccgttttattttgagtgtaggtttcattcactacgattgagaattgattgtatcttgggtgtcttatttttttgtgttgggaggtaaaaatgtccctgatcttgaagagaattcatgctaatgggaagcagagtgaaagagagaatgagagtagaatggacagtacggaaaactgaatgaaccactgtgaacctagctttaacaattattaactcttggttctgcctgatttcctcacatgcttgtcttctcttcctttttccttttaaatacctccaagacaatgtatcgtgggatggctacttttagtcatttgaatagtgtgctttcagaatgcactggggaaaataaactattctacccaagagtttaagaaggatctgtagaaaagaaatagttgaattcagtctaggtgtgaaggaagatactctcattatagggggcagaacgggaccatcagttattgtactattacgtatttatgtgcatagtgcttttttgtttctctgcaatgggcacctgaggtataatttactaagaagtgacttgacttgttaactatattttcgtagtactggggttaaatgtagggcgttgtgcatggtaggtaagtatgctaccactgagtcttatccctagctcttgaccagttcccattcagttttggcaaaccgggataacacctaagcagtggtaatgactaatctgatcttttagactttgtacacttgaaccttgaaaagtcatccattctcttttataagaagaggaacagccagcgtttgtcatctttatttttgtcttcaaaagaggaggaataatcagttctgaaacatagtgagtaggcagacattaacaatttgaataaaacccctctctgtaaactggagggaaagaccactcaaccactgcatacatgtaggctcctggggctactttttggttaattatactgcggaaatgtcaaggtttcatcatgtagctttgcctcgtttttcctgttatgaaatggggttttcagtatcatttttctttttgtctgtttcagatcacagaactgtgtggtgcaaagcgggttggttattttggcccaacacagttttatgttgccctgaaattgattgctgcagcacaggctggcctccctgtgagaacagagagtattaaatgtggtgagtagcttacatttatatgttttattgtctacaacaggtttcttatctgtgtgaatctttctcgtgtgtctaaggtgtgttctctcagcttttgtggaatttctcctagcttccttttaccttcaatgttaaataatataaggaaactcaccaggtagctttagttgctgttttctttttcagatggggaaaaaaatttatagtgacctaggattagatcctttcagctggcagttaaggtagatcttattctttagcaaggttatagtggggcaggaattctccagactgtggcaaaataataccattccatttaatttccacttcaggtgccagttaatatcacttaaggctctgttagggattaggatggactaatgaaagtgtgacatggccctggctgtccttttctctcctccactcctattcgccttttaaatctccattcctgatttagctgttccgatgacttagggcttaccaagattttggcagaatgactttatcttctcaagagttctcttctgctttttgttttttgggtttttcacatgctggcatgaaacccagggcatctcgtgcatgtgagacaagggtcccacaccgagctctgtcccttgccttcttggagttctgaagatccaggtggtgacacatggggaaggcattgtaattatttgtcactctacactaaatcagtcagaatttagatcccctggaagtgctcaaggaaattgagcagaagtccttctagtctgcttgtcacccatctctcgagaatcacctgttgtgctttaagtacaaaatgaaaagatgtgaagtttttatttaattagtccgggctctatccagggtagtgggacttttgggagttctgttggtgattcttacatggaaccaaggttgagagtaacttctcatgaaagtcatgtgaaatatttccaagaactttgcatatggtatgaatatatatttcatgatagtggcatacagggcactccatttaaggaaacacatatcagtattgtttaagtgctaaatatgcatttacatgaccctagtggttaatgcctcccttatgttgatactaagcatttctgtagccttgccctggttgcaactaaaattgaattgataactgaacagtttaccaggtaagtaggagtgcaatttatggaacacaaagaacttctgctgtctttcctttctggagactgaacatgtgtgaggactaagggagggttagccacgatgcaggttaggattcttaacctttttgtgggtgccacgaaccattttggcaaatccttcttgggcttaatttatttttattttagggtcctggaatcaaacccagggccttggccatattaaacatatacttttctactgacctgcactccaggccagaacaatgtttcaaatatgtccaaaggaatagaattataaaggaaacttgttagcatatctatagcaatatgcatgcttctttttttccatttttattaggtattttcttcatttacatttcaaatgctatcccaaaagtcccccataccctcccctcggggctcccctacccacccactcccacttcttggccctggtgttcgcctgtactggggcatataaagtttgcaagaccaaggggcctctcttcccaatgatggctgactaggccatcttctgctacatatgcagctagagacatgagctatgggggtactggttagttcatattgttgttccacctatagggttgcagaccccttcagttccttgggtactttctctagctcctcctgtgttccatccaatagctgactgtgaacacccacttctgtgtttgctaggccccgatatagcctcacaagagacagctatatcagggtcctttcagcaaaatcttgctggcgtatgcaatggtgtctgtgtttggaggctgattatgggatggatcccagggtggggcagtctctagatggtccatcctttcgtctcagctccaaactttgtctctgtaactcctacctctcctgggcatatattcagaagttgttccaactggtaaaaaggacacatgctccactatgttcatagcatccttatttataatagccagaagctggaaagaacccagatgtccctcaacagaggaatggatacagaaaatgtggtacacttacacaatggagtactactcagctattaaaaagaatgaatgtatgaaattcctaggcaaatggatggacctggagggcattatcctgagtgaggtaacccaatcacaaaagaactcacatggtatgtactcactgataagtggatattagcccagaaacttagaagacccaagatacaatttgcaaaacacatgaaactcaagaacgaagaccaaagtgtggacacttcgccccttcttagaattgggagcatgcttcttttttaaaacatttaaaattaattaattaatttgtttatattacagttcagactttatccccctcctggttaacaccatccgactgttccacatcccacacctccctcccccactccaccagacctccgcactccctgggccccaagtctcttgagggttaggtgcatcttctctgactgagtcgagtcccggcagtcctctgctgtatatgtgatggggcctcatatcagctggtgtatgctgcctggttagtggctcagggtctgagagatctcaggggtccaggttagtttagattgctggtcctcctacagggtcaccctcctcctcaacttccagcttttccctaattcaaccacaggggtcagcagcttctgtccattgattgggtgcaaatatctgcatctgactctttcggccgcttgttgggcagtcatgataggcccctgtttgtaagcacattatagtttaagtaatagtgtcaggccttggggccacccccctgagctggattccaatttgggcctgtcagtgaatctcatttctctcagtctcttctccacttttgttcctgcagttcttgcagaaaggaacaattctgggtcagagtttttgactatgggatggcaaccccatccctccactttcttctggaggtggactctacaagttccctatccccactgtcaggcatttcatctaaggtcctcccttgagtcctgagagtctctcacttctcaggtctctggtacattctagagggtttccccccacctcctacttccccgatgttgcctgtttcaattctttctgctggctctcagggcttcagtcctgtcccctacccccaatacctgatcatgttcccctcttcccttcccttttgtctttcccacccaggtccctccctccttctctcttctgtgatttttctttattaaatgtattaaataaaagttcctgcagtggttgaaacagtggttacagctgcagagcaataatgaacatgtttacaactgtaatgacatgaaatgatgccataggagttggctgcctccatgcttaatggaaagaagggtttttacttcacttagggtatgggaaataaagcagtgggttttcctgctcttttccaggtaactctgacccagaattgttcctgtctgcaagaactgcaggaatagaaatggaaaagagactgagggaaaggaggtccagtgacaggcccaaagtgggattcagctcagggggtggccccaaggcctgacttgatttcttttctgtagtcctcttggaatctgtgaactttgctagtgcaatggtatggttcctgttatcttcaggactgtgtttctcgaaaatggctcatactctgttggtagtttgtcacaatttgcagttgaaagagagcgaactattagggaagatgagttatttatagcataaatatgtttatttccaaaagtttttcccctattgttaggcacccttttaatgagttatggtttggggtaaaacacttcattgtttttgaggctgcttctcactctgtggcccagattggccttgagcccatgactatacaactgcttcggcctcccaagtgacaactaggcttaaaattcttggcaaagtcaaaatgtggcaactttatgttggtccttggtgaaatggtagaaatatttactgttctatgaaatcacaaaatttgtgagccatgttataatttcaaacataccagtgcaaagatccttaggcaaaccattttactgttgtgggtcctggctggaaaatggccattctcaacccaggggactttgtaccttcacgagatttcagccagtgtatggcaacatttttgtttgttataagagaggggaggacgctatagtgggcagaggctagggatggtacttaatgtcctccactgtatagaacaaggtcccttgcctcacagtaacaaactgtccagtctaatatgcaaggaagtaccaacactgagaaagttgcctgcaaggtaaacatcaagcagcctttttaggcgtggtggggtttctaatcctgctgcctccctggcctttagatcctgagtgaggtggaaagattttggagcagtgatttttgtttcactgggttttttctctcttcaaatgggaattattgtatccaagacaaacagaagcagagattctctagttgaacagagggctggaggggaggggtagatgctgtacactgcttatttagcagactttatctttgaaggctagaagagaatcttatgggtgggacaagtactttgtaggaaagacaactccttagggtgggtggataggatggctaggtgtggggtgagaattcctaggggtaaggatggagccaagtgagtctgatgcgtttgcaattccttccttaagcagagatggacatttgaatactaagtactgtgttgggatttgcctttaagccaaagtcaattaagcccttttgcctaatgctttgcctaaagcctcagttctttttcttttgaaaattcagtgactcttttagtagcttccatcctaccttctccccctctcagccttcctatggggatctagagctgctctgaagaattcccctgtgcatagtgattcccaactgtatggctgaccaatagtgttttctaggcatgccttctctccatacccacccatggactcagcttttctgttgcctcgtttctcctcaaggtcatgtccaaccttatgagcagtacttttctttctttctttctttctttctttctttctttctttctttctttctttctttctttctttctttctttctttctaagaattatttatttatcttatgtatatgagtactctttctgtctgtcttcagacacaccagaagagggcatcagatcccattacagatggttgtgagccaccatgtggttgctgggaagtgaactcaggacctctggaagagcagccagtgctcttaaccactgaaccatctctccagccccgggagcagtacttttcacctttgtttatttatgcttgatacagaactctctcgtagaattttttatctttaaaaaaataaacaaaattacatttccgtgtgtgtgtgtgtgtgtgtgtgtgtgtgtgtgcgcgtgcgcgcgttcatgtgttgtgtgtgtgcttgtgtatacatgctacagtctgtgtgtagatatcagaggacaactttggggagttgattctttccttctaccacatgggtcccagagatcaaactcaggttgtcagccttgatgccgagcagctttacacactgagtcatcttgctggccatctttgactcttttatctagtaatagctctggatcttaccaggaaactacacactggcagtggggaaaaggagtaatgggacatgaaagaaaatttggtattttaatttatatgttggttctccttccctttcctgtctctgatatactcacacatacatgcaagtcaaaactcttcaaatggggtattttaatgatctgtataaagtataactacatacaaaataccctttgcattatttgcggaaaactcactcacttgctcgcatttaacattataatagttcttattaagatgcagatttctgactgcagtgacccatttttcatgtggcttatcctttccagtatggtggccaagagccatgtgtgtctcctgaacacttaaaataggacaagcattgaagtatgaagtaagagtgtgaagagttttcactaaaaacaaatactccattgatttaaactataaacatgtttgattgccctgggaatcatacccagggatttgagcatgctaggcagagtgcttatgtccctgggcttttcagcttccttcaccattttatgtcatatgttgaaataatgatatggggctaaaataattaaaattaatttgacatttttatattttcatctaaaatgaaaaattcttgttataagtttggagctgagatgaaaggatggactatctagagactgccccaccctgggatccatctcataatcagccttcaaacactgacaccattacatacaccagcaagattttgctgaaaggaccctgatatagctgtctcttgtgaggctatgtcggggcctagcaaacacagaagtggatgttcacagtcagctattggatggaacacagggcccccaatggaggagctagagaaagtacccaaggagctaaaggggtctacaaccctataggtggaacaacaatatgaactaaccagtacccctggagctcgtgtctctagctgcatatgtatcagaagatggcctagtcggccatcattggaaagagaggccccttggtcttgcaaactttatatgcctcagtacaggggaatgccagggccaagaagtgggagtgggtgggtaggggagtgggggggtatggggggcttttgggatagcatttgaaatataaaagaagaaaatacctaattaaaacaagaaagttatctaagacccccccccaaaaaaattcttgttataaaattcatatggcacacaattttcccctcttaactattttatgtttgaaatttagtagtgttttttttttaagaattacttattttatttatgagtgtactgtctctgactttagacatgccagaagagggcatcagataccattacagatggttgtgagccaccatgtggttgctgggaattgaactaaggtcctctggaagagcagtcagtgttcttaaccactgagccctttctccagcccaaaatctagaagtgttaggtctattcattttgttgtacatgcagtttctagacatttctacctccatttatagaatggaaaatatgattaaacaactacctattttcctgacattccttatctctggtaaccactatacaagcttctacttgtttgtattttactactcttgatgtaggtggaatcacagaatatttgggttttgtgaccaagttatttcactttgatttttttcttttttgtgatctttctctctccctccctctgtatgtgtgttgcatgcatgtgtctgtgtgtgcacacctatacatgtgcatagaggtccatgacatcagtcattatctactgctgtccactttgttgatttgagacagggtctcttattcaattggagaatgtttgttctttcagctgcactggctggccagcaatttattcggatattcccatctccttccccagtgctggagttccaggcacacacagccatgctcaagtttgtacatagcttctgcgaatttgaaatgattctggagaagtgtccttaagggtatggtggagtcctgtacagctggtaacgtttgtaatgctgcacttgcgttccattgttccccagaccgaatgcattggccagggagcttatagataccaagcatcttttgccttttttttttcctgaagagatacttgaaatagagttatcttttcatggctggaccacagtagaaagttttgtatgctcttgcctgtgttttacgtccattttgcagactgagctgaaagacagctttctgagaacacttacaggattggcttctgtgtgattcgccgaagctttggagttgtccttgcttacctttttgctcaggtccccatgcttgcagacaaagtgcccttggtcattgaacagaaatgtctaggggacttgaaagatggcagttgagaactcttgctgctcctaccttgtttgtcatgtgctaatttaattaaggttgggatataagagtctaagcaacgagtacaagccgaccttccgggatcacttggcatgtgtcactgtatagcaccatacagtgggtgcttactgattcactttctaaaaagcttcactatcaaattcagtgtacagatgacaaaaaatattcagaccaaagacttgaagttttaccttcttaaaagcttgtagcagcctcagggagatgacacggtcatgagttgcaaaggataatatatatggtttcagttctgctaagtgacagttgtttaaaatcccgggactgaagaaagtccagaaagaattcagctgtattgtgtctttcactgtctgcaggccatctggaggcgaaagcttgtttcctaggcaaatgattctggagaaatgccagagccaaagtgggagaacgtgggaagtgacagtgtccttaagggtatctcggagtcctggtacagctgttaatgtttggaatgctatatttgcgttccattgttccccagactgaatgcattggccagggagcttatagataccaagcatcttgatttttttttttttttgcttgaagaaatatttgaagtagatggaagtttcatggtccagagtagaaagtattttgtatgctcttgtcctgtattttagatccatttgtgagtaccatctgaaagagctatttctgtgcagagagccacagttctgtgtgactcaccaagactctggagtttctttttaacttttcccttttgaaatccatttctgccttcagtgctggagagatgcccattgttgggaaatactcaaacattaaaaatggtgaccgtctttctttagagaggagtcttgatttaagttttcaggttgatttatctatttatgtctcctgggtccttagctgattgatcacacagggatttgtcataattgcctacctctttgaaccaaatgtgaacatagcaactaaaaataaatatgtgcatagtagggccttctttgcctggggagtagcatacttgctgttgctaagatgtttcctggctttagcacagcatccatcatgggagcacagctgtgtttttggagtggagggatgacagaagtgcataggcacactgggaattatcctgaacaatggctacagatgcaaatcattatgcctaatccacaacatcatctttatttgtgtggatctttgtgtcacatgcttgtgtgtgacttgctgtgctgagaactagaagcatgccaaagaacaattttcattttcagaatagtttgtcagaatttgaaagataagtaaatataccaggcagaccatttttgcactgtgagtggccagtggttttgactttagaatggcaaaatgttagaataattgctctgactacataatactttcttatcaacaggcaaacagagattgagtgtgaaatttcaaaaaagaattctattgagtgggaagctatttaacccagtaagtttaccccaggaatgggggtcattaatgtaggtcactggcaagaaccagcttgcttgggttcaaactgcatcttgcccagagatgagttgtgtagtcctgggggacattatgtagcttcttcacatcagtttctacagctgtaaagggagttgctaatgctagtttctcttgcagaactgctgtgaagataaatgggtcggtatttgcagtcccctaacattgcatctggtgtatttaagcatttataagctttgcttgctgtccttgcctcttgttttgataaaatttcacatcttcccgcccctcccaccaggatcaagtgggagctagtcccaaacctgaatttgttctgtgatgattctagcagcatggaaaaatgttacgcaggaataccttgcttaagcattacatttctttcttgtgacattattatagaactctcccttgtgcctgaactaaaatttaaactatatttagtgctctggaattttcccttaaattgatttattttgggcattgagctccccattttacagttttaagataaagcctcacttaagcttttctacttctgcttctaaagaactgcctctgcctcgctttgtgatgtcgaagaatgatggtgagatacggtttgggaacccagctgagctgcatggaccgaaggttcagattccatacttaaccacagagaaaaattccttcaaaagaatggacaatgaggataagcaggtaaaggtgtctggtttggcatgttcatttgattctgactgcgaagcctcattgtagcacagtctcttgtctgttgccagactcccagcaaatattaccatctggaacacaattacagacttggaagtcagccaggaaagttttctcatagcaagaagaagctgacacataggaattactgctagccacccactggccctttagaatctgccttagtatagaattgtgcctcaaatagtgctgttgatttaacacacttatttgatttatctaggtcagtggttttctaagtgggttcattgacctataacttctcaacaacatggaaacaaacaacaaagctaaaaccaaaggaagaaatggtctgtctaggaattagcaagtgctcccctccaaaaaggagccctgagggagactatgctcaaacatggttggaaagtgtgtcctcatatcccattcgtatgggaaagactaagtcagccttggaagtttagaatgtatatcaacaggcaggttctattgtaaagagacctggagatctgtttaccaaactctttttattttttaaatcagggaatcctttcttgggaaacatatgtggaacagcatctctgcaaatgctattacccacttaccaggcttggaaccagaatagggaggatgggcttttaaaatcaggccattgattgcagccatcaggtcgtgattaataaagacaaaagaatgccattatagtgggcctatcaggaagagaacaacaatcatcatgagataactcattcttttgataaagagacgtgcagagaatcagactgtattcaacagtgtcttctgtaaggtaaaggtacatgctatattttaggaagaattgaaccaagatgttttacaatgcaatgaatattagatggttatgctagaaaattagcttacatggttaactttgatggtcttggatagtcaaggttgcaagtttctttattttatttctttttttgacacacagggtttgtctgtatagcccaggctggcatcattcttatgtggtctttctgccttctgaatgctgtattacaggtgtgcttcatcatgcctagccaaagttttatgtttatagataagaagtgtgtctcactttgttcaataactccatgtaaggttgctttaattatttaagtggcatattagaaaggcacaggaatttgtagtcagtatactttgatatgagtctataccagcatttggagaggactgagggcacactgtctcacagtggtagattccccagaaaggatccaggtcttatctcagatcatgtatttgtttttaaattaaagactccaatatagtctctgggttataaaaagcattattttcctgttctttggataccctatgctcacagtctattggtagtctttaaagaaataaaaggaggaagaggaagaggaggaggaggaggaagagaaggaagaaatccagtaaacaggcccaggctgctcatttgacctagagtccagtatcatggtcattgttgagttggattccaattgtacttgtgaaggctttcgtctatcttagtattttggagcatcttagatggggtggctatgttttaaagtctctcaatgaggaacaaacaactcctcaacatctaattttgtctaataagctctaagaatacccaccgttagacattaaacatttaaaatataaattttattgcattttctagatttatacttggtgaataaaaattcagtaaataggaatcttaaaaaggaagactcattaattcattaattgaatgaaaatggaatctgtccacaattgaggtttatgaatgttctctcatgtgatcagtgtctttcattttccagaggaaaatattgtggggctagctacaagcgtttcgggctggcattcgtaatttaggtagcacagcactggtgagcctgtattctctgggtaccttttttgctatgctgcatttttgaggaaacatttctccccatttgttaaatcagccgggtcaccagccgtagagtcacattttgcttcttaaactgcagctcagaatgccaggcttctccagtggttgcctctgacctctgctctggttctttgaagcaggaaacacagtctcccacgatgtcacccctcgcctcccctccttcttccccgcctcattaccagagggtgtccttgagccatggctacagcaaactgcggagcggcacagaacagatgcatccaggtaagaggcgaccagggggccagctgtcacaagcaatatcttagagtcttcttaatgtaccaggcagcaatgccaccagctgcttaattccctgatttaattattcttgtctttggaaacatggctcaatttcattttatattctcaagcaaagggtttttttttttttaaatgaaattaagcatatctcagcaatgctttgtttcctagtctggaagctggtttgtccttagacttgtaaacaactatttagatgatttaatatttcatattcaaatagcattaaaggaatgtagcatgtataaaggggttgtatttttatgagaattgttatttccttctgcaaggacactgagcacatttactcagtaactgcttttatggaaattctgtaaaaacataactatgcaaaaagcaaaagagttgatcccatctttaaggagtggggacataaatgaaaatattgagcttttatgtgttaggataagggtaaaggaaatgcagtggaagtgatttgctgagaaacgtgaagcatgcccagttatggggctacctgcgtgttcttatttctgctctcttggtccttccccgggtagaatgcctgagctagtcctcagcatgacttgcagagttgcctgcccagactgcaatgtgtgaaactccatgaattcactgcagcaccttgttcttcagtggttcacatctctagtttcagatatgacctgtttaatgtattccagagtagaatgccctatagccccctgcccaatttgtgtgatatgatggaaatggctcagtttctgcaggattttgctgtattagaaaaaaagtaatgacttttagagggccacagaaataaaatgatattctaggctgaagtaaagagaagctgtccttttgctgagagaagcaggtaggatgctatgaaaagagcttttggttagaaccagaaggttgggattgggaggcccctgaatgactttaggcaaaccattgagcttctatgaaccatattttttttctttttaaaacagtgatgagggtgttaagatgatttactggaaatatgaatgtaaactcatctggaaattacatcctattcaatgcaagatagtgttcctaatagataatttaaaaattctcctgaaaatcatctgtctcattgatgtatgaaactgcacaggggtcagacttcactttcctcttgtactttcccttgtattattttcctttttaaaaagaagtacagttgttgcttctatttcaaatctaatttgggcttggaaattaatgcttagtccacaggtaagtccatctgtgttctattaagtcagcctgtcattaacttctacctttgatagtccttgtttgtgtcctctatttcctgctccatcctctcatccgatgctaaatgggctcccatccctgcagcactgaagaggcagcctgcttccctcctttctggattctgaagagttgatgccaaggctctgtacgccctcattcatttttatactttctttgaaggtggtaatatctgtctatgacgaggtgcacatattttaagtatttaaattttaacaaatggctatgctcaagtaggtaccactgacataaaaatatcccattgtactgcctctttccaaccataccccaccctgaaatgaaggactattgtgacttttatcattttttattagttttacttcttctagaacttcatgcaagagaaaacgtgcagactgattttgcttgtgtctgctgccttctcctcaatgtaacagtgaaaattcctattagtgtattgctagttccttgcattttattattcaggaggtctcattgcaaggataaccatggattaatggtccttctcctgttgatgagcatttgggcaactgtagttagtttttggctattatgaataaggataccatcaatatttgttcatgattctttttatgagttacatggtcatttccttgacacttaggagtagaatctttgggtgtgggtgtacaaacagccacagttccactctgaaactgaacttcagaggaatgatatcttcagggttctacaaaacagtcctctccttggagaaacatgatgtgtctatatccataagaaacctcttgtaaaggaattgaagagttacttggtttgcttttgaattgcatattttgggtttcctttggtaaggaagagagttgaggcactaaataatatatacccttttcctaagtttaggttcagttaaggagcaagtcagatatcagattgctgctggcccaattatcagctttgttgctcatgtagctaaacagagcacattccttagatagatggctaattttgatacccactttttcagccacaggcagccttggccaatccaaccttttcccttagtggaagaaaaacctgtctctctaaagtgagctcctgtctagctgagttttcattgaaacctgactgataaaatacatccgtctctccatgttacaatccctataggtaagggatttgagctgaagttcacatggtaccttcttcgcctatgggtcttctttgggtggtagacgagtcctctctgttatgggaagtccaggtccatgggtttcattagaatttataagcactaggatcctagctatactctggcttactgtgcttaaaactttttggtagggttcagttggtatgaagagtttattgtggttccatcaacatggaaaaaatctgaattatcagaggaaaatacttgcctacaagttgaaatttactttgaagacttagactatataatacctatgaaattctcttttgtagttttacatttatatgtactcctagtaggttctgaaatgcactaaatgtgttgccaggcaatcatttagatattttaatctgttataatttggtgttctagttgctaggaagaaatacaaaatgtagttgtgagcctgaatagtttgttgctttcttagtttctttcttccttcttcccttcctttcctctctcttttcctcccttcctccgttcttccctccctccctccctgtcttttcttttttgctttcttttttgtttgcttgctttcttgctttcctctatcctgtcctgttccattcctttcttttctctactttcttttttgagacagggtctcatgagtaccagtctggccccctgcctgcttatcttacaggtgcaccacagtccagcctgtttagtattcttgatgtgttattgttgtacattctttattttaaaactatcaaatcatgctaaatgtggtaccataacagccacctctgctcgccactcaattttatttttaagttacagaaagaagcagtttatatatttacatattttaagtcctcaaagtgttagcccacagagatgagaaatggtttcattttgggtgataatttctcctttctgttggagctggttatatttaactgtcatgttaccatattggcaagggtattattatgtgttctggaaataaaaggaatatcattcattttgtggcttagaaatgtagtaaaatcatttaaaatattttggttatttattagtagaataataaatatataatacatttattcatttttgtatacttcgttttacattctgtacaaggaagataaccatttatttttatagtaaattttaatgttaagttttagtgttcaaaatttatattaattttctttagaggttatataattaattgaatacatttaaatgggggtatctataaattataactacattttggtatttatctataatttcaaaagaattacaagcctcattttttattttaaaactctaagctttatttttatgttatgtttgcaagtattttgcttgcatgtcattctgtataccaagtccatgtgataccggtggaggccaaaagagggtgttggatacccaaggactggagttacaggtagttgtgaactaccatgtgggtgctgggaattgaacctgagtcctctgaaaaaggaaacagtactcttaaaccattaagtcatcactctagccctcagaaaacttaattaacaaattcttgctgggtgtggtggtgcacgcctttaatcccagcactcgggaggcagagacagaggcattgtagggctggagagatggctcagcagttaagagcactgactgctcttccagaggtcccgagttcaattcccagcaaccacatggtggctcacaaccatctataatgggatctgatgccctcttctggtgtgtctatagatagctacagtgtactcatataaaaaaatcaatatttaaaataattaaaaaaaaagagtactgagctgggcagtggtggcatacgcctttaatcccagcactcaggaggcagaggcaggcagatttctgaattcgaggccagcctcatctacaaagtgagtttcagggcagccagggctatacagagaaaccctgtctcaaaaataaccaaaaaaaaaaaaagtactgactgatcttccagaggacctaggctcagtttccagaaaccacactgaagccttgaagcctacagctctccttaagtccaggtctggggaatccagtgcccttttttggtctccatgggcttcaagcatgcacatgttgtacaggcatacatgcaagtaaaatatccaaatactcaaaataaaatgatactttttaatatgtatagatgatatgaataagcattaagcccacgtcaaataggcaatcattccagtctcagaatcagtttcctttccataaataaagttatagtgtagttcctgtgcttaatttggagggatgaaatatacaattcatttaggggcagatagtattttggattcctgagttttctacttgatgtacagttgagttttatttgttcctaattcattttttaaaaatgcaaggctatttttcccttttacttttctctccccaaatgaatgtaaactttgtttgaatatagcataaaattggaaaaaggaaaaaccgatgtctaaattcattatagttttttttttaagtgacaggggatccaattgcagtagtgcatgccatgcttcagttttgattccactggaagaaaagaaggaggaagtcaaaatagcccttcagccatccaggaaaagtacagcccgtccctagatatagtttataaggctgggggtgctgagtattcaaatcaggcctttgtttaattctcacctacagccaagtatttgttttaggctaaaatcacatccttcaaaaccatgaatgaacataaaagtgagctccactacttcaggtcatggtccaaggttactgcccccctaacagaaagcagcaacaaacaatgagtactggtagtatggcacatttctactgcggactcactctgaggttctcactgcatcaccctcttgccttattcctaaccttaacccttttggttttatcatggtattggttaaatgtctttagattgtttagtgaaattatggaggtaagaggatcaagatttgtgagtcttaggtagcgctcagattatatgttccaattcctttattacctttttcttgaaaagcacatgctacatcagcttgagtggaaaatgataattttgtaatagagtctctgtataccctgctagcagtctctcttgtttttcagctccatatgaaaggcagcccattggccagcctgaaggaccctcatcagagggtccaggagccaaaccctttcgtcggcaggcatctcttattcgggtaagtgatgatgtgggcctacaatgacagaattcaatgacagaattgggagaaaatttatactgtggagatatggcatttagggatggagatatggcttagtagttgcaagcatttgctgctcttgtacaggatcagtgttcaggtccaagtacctacaaagaccacatacaactacttgtaactctaactctagggttgtccaacaccctcttctggcttccatggatagctgcatgcatgtacacatacccatacacattacatatgcatacatttactaaaaataactattatagagaaaactctgaaagaactatggcatttaaaagcattaattattttacagttagcatatgaagtgaggggcttcattttgacatttttttcttctgttgggtagggtgagacagggtgtcaccaaggtcatctcaaactgcttgtgtatctgaggctggtccttttgccgccaccgcccaagagctgagattgcaggcatggtcaccatgccgagcttcactgtaatatttcacacgtatatatcaaactgtgtttgtctccccccatgaccctttcctgcccctctacatccttactgattttcttcctaccaaacactctatccttctgctttcctgtcaaatatagctaattgtcttctattgaggactgtggctttttgattattctctattttgcttcaagaaaggtataaaactacttcttcattcaaacattacactgttttgcttgtatattttcttaatttttcatttgtttctacctcttccagtctctagaataaactagaggttgtctcttgatcgtcagtgtctctaaaacactcctacccctttattcacttaatcatggagttccttctaaagcagagcgtcacattttctgtagcagcttgcctcgtgtttgccttattctttattaccacttgtttaatgcctaattaactgttttccatttgctgtgtgtctccaattatgtggtaagcatttgaaaggctgcagtagttctgtattctctcagtgcctcagacaattccatttgaatagcaatttatgtgtaagtataaacaagttactacttcctacatgtaatatataaaatattatggcacaaatataatgctattaagtttcttcaggtcatatcatagcttaggtactttcagcttctggttctctagtattttccttcagataaagagctctgttccccacccccaaattcatagctgttgtcttgtatgtctaagttcttgtatggagaaggtatattattgaagaaagattgtgtgtgtgtgtgtgtgtgtgtgtgtgtgtgtgtgtatgtgtgtgtacatacatggggagaaactattaaaaagataggtttattatttaacatgaaagacaaaaggaagtaggtggtggtttgtataacatttcaattgtggaactcaggaagaaggaccatttctgcacaggcagctctactcaaaatagaagagtgaagtcagacactcccacaaagaagtgggctgctagtttagaagagaataaacagtctgcataagatcctgagttcagtgaatggcttctggtcataggacactgttagacatgacaaagtactcaatcttaaagcagtgttctgtttgcaaaaaactctctaaaagatagcaattaagtcatatgtgatatatttaatgtttcctataattataagctctaggcactgctgtatctattagtatagatggatagctgagagaggtcaagtagcaagtctgagatttcattcatacctagtatgtggcagagccagaatttgagtctaggagagttcagtatcaaagcgtgcacattaaacacttagctccacattaaagttctatattacatgaagactagatgacatcatgaacaaacactaggtattataatatcacccctctgtgtgtgtgtgtgtgtgtgtgtgtgtgctgtgtatgtgtgtgcggtgtgtgtgtgtgtgtgtgtgtgtgtgtgctgtgtatgtgtgtgcggtgtgtgtgtgtgtgttgctggggttggaacccatggccttgcctgtgccaggcaaaaactgtactattgtactacatcctcatcaaaaaaactattcttgaaagtgttatttgagagaatacctgtcaggagttcaaggtcatctgtgagcacatagttcaaagtcaacttctaagattcaagaccctaactcaagaaaaaaggagaaagaaaaaaaagaaaagaaagacattctcctttaaggtcaatacagatgagttttaccctcaagttgtaatgcaagattgtttcttcagctgaaccccagatgtagtacttggctatgttttagagatcccatggtataaaaatatgtgcctttaaacatgagaaccacacaaactggggaggcatgtttacattagggaagggattggagggaatcctctcaaaactctctaaggtgtggcctgcaggttcctgcagagtatgttctgtttctgtggagaggaaatcttgagtgggtagaactctgatcaaatttagcagtgaatcttccgtttcacaggggtaggatggggctcactggacccttcctaccaagctccctggaagcatggccgtgatcccttatttggatttgtgatctgtcttctaatctctagatttcctttctgctgagaaatatgcttcttgaacccttcacttgacaaatacttagtgaatacctataaagtaccagatactatattaaatgatgttggccatcagtaggccccacccttgtggacctttcaggctactgtaggacacaagtattaatcaagctatcacaaagacaacatatggttatagtatatgatgtgaatgaaaattatgctgcactttgaaggtgaaaaaatggcaatagaatataacctagacttgcagacaggttagtcaaagaagacttctttggggagtaacatagagttgaagtgggaaggataacagaagtattagctaggtaaggtggtaaggatggggaacagatcagaaagcagacagagctgcatgtacacagacattttctatgtacttagaattttgtgcacattaactcagcactcaccactgtcttctgggattgcatcatagctaacattttagatgacaaagctgaaggtgtagatgccttattgagttttccaaagatcacagctgggaagtggatgggctagagttcaagcagtggacaccattcctcagctactggctccggaactggatggtactgtcatctgttaagcaaggaaggactggaagaaacggtgctgagaacaaatcccagctgtaagttcagtgttgaatgccagccctggagctttggagagacctcagaggaggtgaacaagagttctgtgtttctatgggtctgaatttgggggacagctgaggctggatatggatgtttggcaacaactcactattgggaagcacaggaaaaacaaaacaaaacaaaacaaaacaaaacaaaacaggttctgcccagggcccccctgactccacatgacctggagcaagttcctttccttttttgttgcattaacatcacagtatggatttagcaatatatcctagcagtatgccagtgtgactctctcaatgtttgtttgttctcctaccacctgttggaagcatggccttctatttaggatgatagcaagggacctttcttgcccaggatggcagtctgtggtttttgtggtgggtgtattttcctttcttcagctcttaggtttccttcttgtgcctgtcagtctggtttggctgaactccatgttacagaaagcaaaatgccagtttgaattagtcatggggatgagatttgaagtgaaggttcttggtggtgggggattaatatttattgggtatagtgctaagcaagttagagtgactaattcccctcatggtgccatgtccctatgctgatgacaatctattctctttgttctagctgtatttgtcaccttctgttcaaacctttcctgcaaacagtggggtattgcagctatagttcactggtaaagtgccagctagatcagcatagcaaaaaccacgtctttcattccacagcacttcctaaactgggaacagtagtacacagcaggaagaccagcctcagcctgagactctgatttcaaatcactgccaacaccataaataagttagaggggacatggcctcagagtcctagtgcagacctttagggacccatggccagtgctattatagcccatgggtttagcattttggaggtatttatgtcaaattctatactttggaattgttagtctttttcctgaatattttagtcacttttttgttcaaagaatagatatgtttcctcattaaagtttcagacagtgctttggtgaatagatggggtttttaaaaatcaatcgcaagtctttggctttacctggtaacagatcttcagaggtcatttgtggtttgcatttctcataagccagtctgtacattttgcatgtagattatgactcagtcttcataacatttagaactacaacttctgctttcacttgtttctttgttttactaggattggtgaaaaccacattgggtataacagtcttgattctttggctacctttgctgcaatatcttaactgcctgctcnnnnnnnnnnnnnnnnnnnnnnnnnnnnnnnnnnnnnnnnnnnnnnnnnnnnnnnnnnnnnnnnnnnnnnnnnnnnnnnnnnnnnnnnnnnnnnnnnnnnnnnnnnnnnnnnnnnnnnnnnnnnnnnnnnnnnnnnnnnnnnnnnnnnnnnnnnnnnnnnnnnnnnnnnnnnnnnnnnnnnnnnnnnnnnnnnnnnnnnnnnnnnnnnnnnnnnnnnnnnnnnnnnnnnnnnnnnnnnnnnnnnnnnnnnnnnnntgttctttgggtggtggtcgtggaggatctcactacgtagccttgcctgggatggaattttatgtatagaccaaactggcttagaactcagcacctgtgcctgtccctgcctcccaagtgttgggattaaaggtatctgaaaccatgcttggaaacaatagagaccctacaaatacaatcaggcaagagatttaaatattttacaatgtatacatgtgttgaaactctacataccactcattattatgtgcaagtgttatgtttttaggctcagttaaaaatacatttagttatctccttcacagctgctcatcgtatactgactttgatctgtcactgctcatggttcttaccatgtcatctgtgttctcaaatatggctcctgggcacttgtattgtttgccctctgctttcacctaaagccacactgcccagcaactgcttcttgtcctttctcaggcagtcagcatttccagtgggacttctagtctttgtttatttacttctacttttgcctcctttgctcttcctttgtctgaattcatctttgcttttgttcttccagggacagcatgaagtatgaggtttcctactgtgctcatgcatatgtgatgcctgcaatttccattcttaaaaaaaaaacaaaacagtttattgctcaactgtatctgtgaaactcaatcagatgactgtgagtctgatcattatggatttccatcttaaaggcaactagactttttttatattgttccgagaacattttatgcagacacacaaatagaagtatatatgtgtatttgcattcactcattaattcaaaatgttcccctctcgttttatttttttaacccaaatttagggaggctgctttggcaaatgaaatttccttgcaactattgatgaaacacaattatcttccattttaaacaaaatcagcctcacttttgaaaccctaaccaagcttgctgtctagtgtcttatcttggaggtctgagcattcctgtgttgtaaacagtcagtgctcatcaatcggctattcttagataaaataatagtagaactttgagtcttttagacgcttgccattgcacttgggttttggggttatagatttggggttataaattttgtaccaagatggtatggcaggataagctagcagcacgttcatgtaaaagtttgtaaatggaaaagcacttatcgtgtgtagttgtgtgtttgtttcctactgagttccacagttttgagccttgtttctctcctacccctgagatttcactttagacactcagggccagaaacagtcttcctaatccttgaaatagttctcaagagttaaagcaagtatgtaaggacgagaaaagaaagaaacacttatgagtctctgttggaatgttgttggtgtaggtcagaagagaattgcttgtgccacaggtaaagtattcctgtaagacttttgatgagaataaaaaagaaagagtcctttggggaggccaacacgatactgagatcattgtttgggttttttcttttttgtgctatgaaagtatttgtgggtggattggatcaggattctggcaagacaagaagagcagagcataaacaatggctgaaagcttaggattaggccagggagcttagataagacagtgctaagcactgtctttgtcactggttagcttaggaagtggcccacaaggcagctttgggccatgagaactcactcagctttttagaggttcattttgaggaatgaaagtctctatgtgtgtgtatcctacacatgtattaagttagaaattaggccttttttttcatttattcctttagagtcttcccccttgtctaagaacacttatcttgactatgttgaagagccccagtggctacttcagcataatgctatttctacatttagttcttgtgttttcctgtattatccacagaggttaggatgatgtgcttgcttatgaatgacttaaggtaaacaaagttatgcagagacaaatggcccacctcatggtcagttttctcctaataaagccatggcgatagaattctgcagtttggattgtttcatgctatacagtgcacgttacactgcagatgttattttgggactgtgggttgtaagctctaaagatgctgaaagatttttacaaagtcaaatattgaaaagggtacagagtgaaaaatggccctctcactcctaccctttgagcacctattttagaaacaactataacccatttcttttgtatagttgtatataaaataccttattttacttagtgctgtatctgaatcttatcctaatacttaaataattataggtagtatactcaaagtatgtatatagttcagccttttacctatgtggtaatctattatacatctgttatatactcagcatttttctttaacaatagttttactaatattctgtggcagcacacaaaaactctttttgtgtttttgttgttcaagctcttagtgttttgttgtatgtattttccataagccatttaaacagcctcttcttactgacatctagctcttgcaagcgtagcattgttagaagttatatagattcaattctcaggtatacaactctttattgaaattgtctatactttggtaatttttatagaaatgttcagattgtaagctctaccaatttacacacttgacataatgtagaaaatgtctcttttctggaacctttgtaaaacacattaacaaacttatagatatttctcattctatggaaaaatgctgtctttgtatattaattaacataccttttagtgaattggaaattttaatgttacagtattttttccctaagtatactttactgtgtattgcttcttcctttcataggccttttgtcttttgtctggggtattcacgattttgtactgatttgttattctaaagcctgaaaccataaggtgacattttaaacccacgagattctgcaagctgtgtggaaaactgctcgttaggtgttcaaatacaggttgtggacacttgaggcacttgaaagaggttagggacacaagtttcttttcagctccataggtacatcaggtctgtaggcaatgggaatctcttattatatgattataccaacaaggttgaattacttactgtcttagtgttctattactgtgaagaaataccatgaccgcggcaactcttactttaaaaatcatttaattggggcttgcttacattttcagagattcactctactgtcatcatggcgggttgcacacaggtggacatactactggagaagtaactgagaaagttctatatacagatccacatgcattaggaagagagaaacagtgggcttcaagtaggttgttttgaaacttcaaagcttacccccccctgacacgcttcctccaaccaggccagacctcctaatcctttcaaatagtgccactccttgatgaagtattcaattctatgagtctatggtggccattcttattcaaattaccacacttagtttatgagtatagcttagggcttaacggtcatttgttattggagataggaagtgagcttctctgtttttatttccgttctctccctctgcctaaagcagaagacagaggaagagaaagtatatgcatttgaggaaagaggtgtagaactggtttgatttttttaaatagttatatatgtcctcattcttgatttgggacattatttaccagattcactctccattttatttcaagccctagctatacttttttttcctttactattcctaagtgataatgaggtttgtatgtctaatgtatattttacctcaccgtgtctgctgtaaagcccatggataactacatggcactgtaactacaaggaggacctgtttttttgtagtatcaagccttctgtctacttgtttcctttggtcattcatagttctttttctagtttcctagctattattcttgggggaagaattattttacttcaaatgattctgaagtttatattttttctcagctgaaagctttaaaaatttttgtattcctcagtaaatgctcattatgtgaccattctttttttttaacataaacgctacacaaatcacagtacagtgttcatgcctctgtgttactctctgtgctatagccagaagagtgttttagtattcccatgtacagttagctttaaatatcttaggcagaaaacgtgtgtttttaagaaggcaacaagaacatctctcccaatacatatcatcttcaaaatgcattcattatgttctgtctttttaattgttatattttggtacaggagtattgttcctcattaatatcctgtatcttcatatacaaattgcacagaacacagtaaaatttctccatgtaactgaaagaaaagtgctttaatatagatgctaaacaaaacaaagtacagtttgcaagcctgtgtgttattctctgtgctagtaaacagaagagtgtttctcttagtattctcatttatagttagcttaaaatatcttctgtgaaaaatgtatgtttttaagaagactccaagcacctttcttccaatacccatcttcttcaaaacacattcaatatgctctgtctttggaattgcttcattttagtatactttactttcctgtttccttccttcctttcccttccttccttccttccttccttccttccttccttccttccttccttccttccttccttccttcttcttcttcttcttcatgtaagtacactgtagttgtcttcagacacaccagaagagggagtcagatctcattatggatggttgtgagccaccatgtggttgctgggatttgaactcgggacctttggaagagcagtcggctttcttaaccactgagcccatctcaccagccccttaatattctttctttgttttatgtatttggtgttttgactattatgtgatgggaagagtttattttctggtccaatctatttggagttctgtaggcttcttgtatgtttatggatatctttttctttgggttagagaagtttttttctataattttgttgaagatatttactggccctttaagttgggaatctttgctctcttctagatctattacccttagtttggtcttctcattgtgtcctggatttcctggatgttttaggttaggagctttttgcatttttttttttttttgactgttgtggcaatgttttctatggtatcttctgcacctgagattctctcttctatctcttgtattctgtttgtgatgcttgcatctatgactcctgatctctttcctaggttttctatcttcagggttgtcttcnnnnnnnnnnnnnnnnnnnnttttttattggatattttacttatttatatttcaaatgttatccccttcccagttcccctctggagacgccctatcccctcccccctgcttctatgagggtgtgcccccactcacccacccactcccacctccccaccctgacattcccctaaactggaacattgagccttcccaggaccaaggacctctcctcccattgatacccagcaaggctatcctctgctacatatgcagctggagccatgggtccctccatgtgtactccttggttggtggtttagtccctgggagctctgcggagggagtctggttggttgatattgttgttcttcctatggggttgaacaccccttcagctccttcagtcctttccctaactcctccactggagaccctactgcagagcatctcaggagacagctgtattaggctcctgtcagcaagcacttcttggcatccacaatagtgtctgggtttcttgacaattactctagttgctttgtttcttttctggtagtcaccttactaccaagaaggtagtaattacttaatataacaagcattattattattattattattattattattattattattattattattattataagatgagaatactaaagaaatggattactgaatgaaaactccagggagtacatatctgggagagaagctgaaggatatttgtagaaataagatattaattcagcaattatcagaaccgatcagagtattgccttaaggcctgaaagtatttatatttagacagtgggcgatgaggaaatggtaacaaataatagccatagatttaatggtattgcaactgggtggttagactacagataactgcagctgagtgtgttctatttgtggcactaatgctctcccatgaggtatgaggtattacactgaagtaagcctcagaactgaagtaatattgtagccagaactttctgaggaatagttagggtgcacattggtttgatagatagaagctcctctgatacagtgttttagatatagctgcaaacacctgtctgaatgctaggtcttagacagcactttatataagtagagctaagggtggtgtttgttttttatttactctcagggctctggtcttagtcatagactaagctgttgctatgtaagcctcctttataagggcaccattttagccctttgcccatctatactcttcttcgtgtgaggtgaacagtaatgtcatggcttctgtcccaacaacagtagtgactactggctgagtgtatatctgcgggcaaagctgtgcttggccctttcagcctttccaatagtcttgcacagtggtcattatatccatccatttgtaaatcttagtaagcagcttctgggagtcagcaagcatcccagtgttacactgaaggtacaaacttgttctcaaggcacttgtaaccaagttgaggagatgagttcaagtcatacaatctccatttatgcatgtagaacttaaaacagaatcactggaaagataaggagtggcatgtaacagaaaaaatacaacataaggctacaaaatgaggagaggcttcccccaagagctgatgcttgagctcagctgtgaagcatgacgtgggacataagttgacttaggcaaggatggagctgtgatgtgaggagaggaatctttcctgttgtggcaagacccttgacaagaggcattcactgggcaggttcttttttaaaattttttattttattttattttattttattttattttattttattttattttattttattttacagtcctgtcattatccccctcccagatcaccctcccacagttcctcatatcattcctcttacccctgtctccaagaggatgcctgcccccttgtcaggcctcctcactccttggtgtctccattctcttgagggtttaggctcatcttctctcactgaggccaggccagacagtcctctgctgtatatgtgttgaggcctcagaccagctgcctgtttggtggctcagtgtctgagggatctcaggggtctgggttaattgagactgctagtcttcctaatggggttatccttctcttcagcttcttccagcctttccataaccaaccacaggggtccctgagttcagcctgttggttgggtataattatctgtgtctgtctcagtcagctgcatgttgggtctctcagagaacagctatgctaggctcctgtctgtaagcacatcatagcatcagtaaaactgtcagggcttggagcctccccttgagatggatccactggggcaggttcttaatggcagacaacaggaactcctttgagtagttaagcaaaagtgcttcataataggcagtatggataacttattaaatctttgaaagacccaaagaaaatctaagcctagaagcacaacacctccagtctcacagataagctcggctggtactggcatctttcctctgccacagtcagacagctacagggttaggaaatgctgccatcgtttcacgtctacttccactgtgtgacctcaacaagccacatgaaggccctgttcacctcttctttcaccctgtaacttggatttgaatcaggtttccatgggtgtatttgtttagtgggtccgttgtcccacctggaattctatcaccaagtattagggcattgctgttcttttactacgaagcctgtgcagcccagggagctatgctaagcagggataacatgtattttgactgagccagtctgctccacatcacatagagaacagacacactggaactaaaggctggtgtgactagagcctggagtgggagggagatgagactggagatcagtataggacttgatgggccttgggattgcctttttggtgtgggaagcaggtagcttggaaattaagttgttaataagggcccctccacatttgaatgccagtttgcatgcttctggcacctgaactctattcgtactttgagtctgtagcctaaatctcagaagtatttcttggttttagcctgagttcttggagcatctggttcccgtctggcctcaggctctcttgagtgtgaaagggagaacatcctggcaatgtcaggcaaggcagcctacctgacctacagggatggggacagaacattgttacagtgtgtttgaaagtctgtggccttaacagagtctcatcttactgctgatttcttattttctcctggcattgaggaaaaaaacctgaaaattgtaaagggcatctttctgtccagagaagtagaccttggcttcttatgtaagaattggagaggttactaagaagtatttcttatgtccatcaaaatagcatctgtgtttcatatgaaaataacaataaataaactgattgactatatgcatggtaacctatcttccagattctttgaacatgtgaaaacatgccagatgctgctcacatacaaaaattatgtgcttaaaaaagaggttttctgaataatctaatggtctaccagctgtaatttgaaactaaatcagatgatgggggagggtgtaaatctaatataatcattcacatctcaaactcagatccttgatctaccacactttctgaaaagaaaacaattccttattgtaggatgggtgggtaggcagaaagagataaccacagagctcaatgacaaagagttcgtgttctgtctcttatttctaggcctgtggttttggtaaactacttcatttacctaatccccagtttcctgttctccaaattggaaataatgggtcctactttgtagcattattacaaggatgagaattgatacattagttacttatactgtctaccatttagcagagtggtaaatacacattaccaaacattcacttatgtttgtggggatagctttcttttgtttgagaatttcatatatgcacataatgtattttgataaaatctacatcagtaggcatatcttgccagactagtcattgctgtgaactttacattgtctttagagctagcaactgcatactgtacagtagggtcagaaagatttctgcagtttaacattaacctaagatggtgaaatttgagccctaaattacttttgaaaataatggcaaaaagtagtttttgtactgtttctgctaaggctacaaaggaactttagtctaaaatctctctcccttcattggtggaatggctaaactcttaagtcagcagcatgtataggagacctccagagtagtcttattttgtaagcagaaatgttctatggataaaacaggatatacacacccttttaacattctaccagacaatatttctttgtaattcatattgttcacctttttgtgattttttttaaaggtactttgagggtaaatttcattttggggtattttatgaatagtattatttttaataagtcttttgatggctctttcattacaaacagcatgttttccctggagacaataacttgaagcaccaaatatttgcatttcatttgaaacaaaatcaaggaattgaatgttttgaatataagcaaatataattctcctgggtctggagaaaccgtataatgtgccatatgtttgtagattgtgtagacagatgtggaagaatgttccttctcctcaggttttttgtttttctttttgaacacagagtttcatgtagctcaggccaacctctaactcactatgcagccaaggcttgttttaaactcctggtccatttggatctacctctagatccaaaatgtaccatcaccctggtttttctttctttttttcttgtctttttttccttcaaactactggcaaaactcaaaattggcatcaagtagcaaatatctctgcccagccaacaaaaccagtggagctggggttgaacaggcaggctcattaggatgtacttgaaggaagagcctttcctggttctggcttctgcttgagtagctgagtctccataaaatgcttactcctatttctcagtgcccttggtctctgctaatttcttataggtgactgaactttcaagtctttattcatgacagaatgttacttgtttcaagttactttattcataactttgactgatttgggggttacctcagaggtggtggttccatgtatttgggtcctgcagtaagatggtccttagatactgacgaagaggctctgaattacaatttcagttctggagcgggtcttctgtgctgatggctgtgtgagggttttgttctctttcatttctctccaaactcttcttacctgtaagccacatttgtctctggcttcagttgctcaaatggttgtaactgttcttccttgtcttcacatttcagtgaggtgatccctctgtgacttggagtctgaatattttatcatcccgttgaatattatctggggttcctaccctcttctagatatactttgttaactatgagctctgcttttcacctgggccagactgaggcaactccacccaggtctgtgctgcactggaagtgtttatgtgacccaaaatgggctgcttctaggagttggccacttcctctttttttttttttttttttttttttttttttttttttttggagacactgtattactgtgtagaacttgaattctctatgtagcctagcttggccttgaactcatgatcccctacgtcagcctcctggatgcatggattataggcatgcaccctactcnnnnnnnnnnnnnnnnnnnnctttctctatatcggttctgtcctaatctcacagactcttcttgctgcttcatagcttaagttgcacctggcccttgttctgactcatggcctggctgtgtatctattcaggttttgctttctctgtttgttgatttgtatttgtattattcatatctttaatctgacaaaggttgttcttctaagaacatgcatcttcttttttttttatttaaaactacttcttttctttttaaaggtattttcttcatttacatttcaaatgctatcccagaagtccccccaaactctccccccactcccgtaaccacccactcccacttcttggccctagcattcccctgtactgaggcatataaagtttgcaagaccaatgggcctctctttccaatgatggccgactaggccatcttctgatacatatgcagctagagacacgagctctggtgggtactggttagttcatattgttgttccacctatagggttgcagactcctttagctccttaggtactttctctagctcctccattgggggccctatgatccatccaatagctgactgtgagcctccacttctgtgtttgctaggccccggcataacctcacaagagagagacagctctatctgggtcctttcagcaaaatcttgctagtgtatgcaatggtgtcagcgttgggaggctgattatgggatggatccccgggtatggcagtctctagatggtccatcctcaatgcctgtcttagtcagggtttctattcctgcacaaacatcatgaccaagaagcaagttggagaggaaagggtttattcagcttacaattccatactgctgtttatcaccaacgaagtcaggactggaactcaaacaggttaggaagcaggagctgatgcagaggacatggagggatagtctttactggcttgcttcccctggcttgctcagcctgatctcttatagaacccaagactaccagcccagagatggtcccacccacaaggggccttttccccttgatcactaattgagaaaatgccttagagttggatctcatggaggcatttcctcaactgaaactcctttttctgtgataactgcagctgtgtcaagttgacacaaaactagccagtacaattgaccccttgtcaacttgacacacaaacacatcactagtaagcctcaacccttaatttcttattcatccccaagatctaaataactttaaaagtcccacagtctttacacattaaaagtcaatccctttaaaatgtccagtatcttttaaaatccaaagtcttttttacaattaaaagtctcttaactgtgggatccactaaaatattttcttccttcaagagggaaaaatatcagggcacagtcacaatcaaaagcaaaaattaaactccaactgtccaatgtctgggatccaactcacgatcttctgggctcctccaagggcttgggtcacttctccagtcctgtcctttatagcacacggcttgtcttctagactccagctgcctgtactgcactgctgctgctgttcttggtggtcatctcatggtactggcatctccaaaatgctgcatgacccccttcagtcctgggccatcaacttcaactgaggctgtaccttcaccaatggccttccatggcctctcacagtgccgagcctcagctgctctgcatgccttcaaatccagtaccacctgggtgactcttacacattacgaagtcccactgcagcacaaggtacaaccttggctatctctggaatacagcctctgtgctctcagaaaacacttcccagaagatgtcacctcaatgatgctggtctcttcttaatcaccgctaatttcttagctatagctaatcagcatcaatagtcccagtaatcctaagattttgctttagtagttctggtatcttgttaatcacagctgattcttcagcccccgctaaccagaactacagaatcttcacaatcaaaacagcaatggccctgaaaagagtctttaatcttccctctgaaatttcacaagccaggcctccatcttctgcactgttctcaacattatcataagctcctacacaacatctgacagagttcttaacaacaaatggatcttcaagcccaaagttccaaagtccttccacagtcctcctcaacacatggtcaggttgtcacaggaataccccactatgctggtaccaatttgtcttagtcagggtttctattcctgcacaaacatcatgaccaagaagcaagttggagaggaaagggtttattcagcttacaattccatactgctgtttatcaccaacgaagtcaggactggaactcaaacaggttaggaagcaggagctgatgcagaggccatggagggatagtctttactggcttgcttcccctggcttgctcagcctgctctcttatagaacccaagactaccagctcagagatggtcccacccacaaggggccttttccccttgatcactaattgagaaaatgccttatagttggatctcatggaggcattttcccaactgaagctcctttttctgtgataactgcagctgtgtcaagttgacacaaaactagccagtacaaatgccaaagcatctcagaggccagtgtgttatgagcccaattactgttgtttccgtgtagccagatgatagcaggtatgagtcatgtcattcatccacacagccacacttagctgctgcttacctttgtaacagactgtgttggggcaggaagtgacctcagttatgtgtgtaggcatggatgtacatatggtagaaatatggaaagggcactttggagcagaaggatgtaagaaggggaaggatttcatcaggctggcaccagaagaagagtttcctgggaagaagacctgagtttggtctgtaagacgtgagcacttggggaattacaaacctaccaagtcagcaaagagtagcatggactgcaagagtcctgatggccaggtagaatagaccaagacctattaaaaagtgactcacgctactcaggcatgaagtaatataaataggaaagaaagtagctgcaagattaatagattttttttctcaaatttctcaatttctcaaaatgtctccaattatgagcttggagaaggagcaaccatgggctagaatgaagagggactaggttgggaggcctctttcccaggagagaaataatgcactcccagggagcagggctttccattagtagcaggcgatgcagcagatcaacatttagcatgaagacttctgtgcagcgatacctgtcttgtctttactcgtttccttttgccttctttgtgaccacctcttggttccatggacatggcccatggtaaaaatacatggttttaaggtggatgggaaagatggagcaaagccccagatgtttctctcagcacttccattttgtgtctgttctgaaagcctagactagcttttatttgctcctgcattgcgttctgggcttctgagctcttaaatcttcaaatttggcatgcctgcctgccctctagtggcaggtttggtgcacccctttgttaccctgctgatggcagtggttctcattgctcagctttgtacttagtaaacagtcccaactcatatatgtgaagggtagattcagcgatactgacttaggacccagggacttggattgggcttggaaattttgactcctgaatttatacaatgtaaatgcaacaggagaagaagagcaacacagttatgatagctcacatcaataatcccagcactaaggagcagaaatcattaaatctgaacctaactttggctatatagtgagttctaggcaatcctgggctacagtatgagattcagtctcaaaaacaaacaaacaaacaaacaaacaaacaaagaaacaaagaaaatatatgaaactaaaagattatgcagttatagtgttgccatatgttctgtgaagcgcagaagagaatctgaggctaaggagatggctcagcaaataaagcacttgttatgcaaatgtgaagaccaagatcaggtctctagaatctgcttaatgtccactgggcatggtagcctacctataattctagtgcttggaatgtggagtcaggggtcaagctggctaactacagtagacttaacagagtgaaaccttcagttgagaaactctgtttcaatacataaggtgtgataaattgaagaagactccttatatcatctttgccccccaacatgccatacatatacatgtgaaaattttattattaaccacttagccaatctaagagggtcagatgtgatgaatagttgaagagaagaatggtggccttaaaacctgtcatcattctttacctgttcagtaattcatgttcctgttaactttgaagatagaaaaaaccatgaagcttgctgtctcctttatattatagtttatgttttggttaaattctttttatgagacagttatgtttattcctttcaggagaaaattttaaaaatacaaaataacattcattggtgtttaagtcttacacctcatctcatgacaggcacgttctgtgagcactttcttttttaaagtccttttcagtggagagagaaccgcaggagaacaacagtaattacccagatgagccctggaggataactgaagaacagcgggagtactacgtcaatcagtttcggtccctccagccagacccgagttccttcatttcaggtgagagaacatggtgtcctggaacgtggggcccatgtgaataactacagaacatcttgagaaatacaaaatgaatattataaccttctttgattccaatttgtattcctctaaggtacaacttcttatcaaatataagtcatgcagaaaaaaaaatggtaatgatgtggggaaaattacactgctattgcagaagggtaaatgtgaatttgggggaacgtagtctagatcctgcaccttatcagctaaagcacgtggaacagtagatgacagtgccatgggacaccttcaattgcttactcattatattagagccagaacaaagacaaagtgtaacctgccttcctgcctgtcctccttccttccggcagaggtccccttaggttttatgctcccagaagtttaagctcatgctcattttctttggcttaagcctttctttcatggttcttgaaattgagatatgaaaggaagactggccagcaccttctcaatatcagttctagattatcttcagatgtctgcattcctgttgtgccctcatgtaacattcaaactgagaggaattgatttagttcccatgtgccttcattttaccaggctgaacaaacagtgaaatcctagagtctggaagaaaaaaggataaaacaacttcttacccttcagatgtaaagaatatctgtgggtttgatcattctaagctaacagtcaagcatggattaagactaattttctgtgaaataaggtatataattgatatattcttatatatgtaaaggcaaacatcattttggtgattagtaataaatgaccttatggaaggtagaatagtctagaaataacaaaggagttttaccatcatgatttagaatatatgaacagaaatccagattccatactcttgctcatctgattcttttcgcaatatatgcacatatttagccaaatatggataaatcgtttgaggtgttttgaaaatgtctttcaacctttttatttttgcagaatttcaagtgtagattcaacttgacttacagctataaaaaatccccacggacaagtgctggcagttttctctatattccctctcagcaaggatgatcttgaaataccattgccagaccatttgatttgaaaaatatttcagaatatatctttgggtgtcttagaaaaacataaccagaactcactgatacatgtgagaaaaaaaatcacatattctttaacacaatcaagtctttcttcattgttcagaattatctgtctcataaaattttaaaaaatgtttagtttgattacaatgaagaagttcatgaatggcattagttgatgtcttttaaaataaataacttagttgaaatataattcatataccataaatattaccatttgaactgtgcagtcagcagttttagttcatttacagacaagattcataacctaagttcagaacctttctatcacccctctataatccacccacttagtagcagtgactccctcctcctgtcttctccacctcgcagacctaggccactgctgtacattcttataaacattctttatatgaatatatattctttatatggatatataaatggagtctctttttcttgtggcttagtggaggaggtggagtgaaaatgaggacttctcacatggtgcactcaaaggagacaggactcaggctttctcctctgctccttctttagctggtgacatctgggacacagctgaatttgatagctgtcagcttcccaatgccttccacctaacttttttgagactctatggtacaatagtctccagtatgaaagccagcatcagctactgttctttgaagaggatggatccagcagacgacagactgataggagaagagaatgcctttatatcttggttgctataggatagctggtaaatgagccaacaagttttgtatgtcaggtgtttcacaaggtggtcggttgcattggtagccaagagtcatgtgatagcattattgacagaatacatttagggagaaggctcactgggttattgatactttgcttttgaattttaataatttatcaaaagaaagttgagtgttgctttaggatccattataaccctttttaaattttattttgaagacagtgtttcactatgtaacccctgctggtctagaacttgctatgtaggtcaggctagcttcaaactcacagagacctgccttcctctgttagtcaagtgcagggattaaaggtgtgcaggccattcctggcctgatttttctgtttgtttatgtagtgttggggctttgcagatggcaatcaagtatctaccaactaaattcccacctattcttactgtttttaaagccaattagagcacttctaattgcgctgggagtcttttgacttatcttagaacaaaatttggggctttaatgctctcttatgttggaaatgaggcttttgaattgtggaacctttgggagcatgaaagcaagaaaaatgtcagtgaaggctagcatttcaagtgcagctgggacaatgggatgattgctgaatttcaactgacaaaagttctggctacattgttcaaagtgccaccaagaaatcttagaattttttttttgagacagggtttctctgtgtagccctggctgtcctagaactcactctgtagaccaagctggcctcaaactcagagatttgcctgcctctgccttccaagtgctgggattaaaggcatgtgccatcactgccgggaaatctcagattttgtcaaaactatttctcaatattttggaagggttaatgatacaatttttctcgttccacttaccatttttccatgcctctacattgcttttccattctctaagtataaaactcaacatattctcatttacttaagtaattttgaatgttttcttaggcatttttaatgaaaatgtgcagttttggtaaacacagcaggagtttatcttatttgtatttgtcatgagcattttgtcattgcatctttttctttttacatattctatatcccttttatttgtacttttctcatttttgcaacaagaagaactaatctttggccctcagatgtgctaggcaagccacatgctgcttttatgaaagtccttgtaattgttgttgcttgaggaataaaagtgtttgtggttatgtggtagagatcgttaaagcaaaacatgacaattcgcttgcacatccaagctgcttcagacaagtaatgctgacttaaatcatggctcttgacagggtctgtggccaagaacttcttcaccaaatcaaagctctccattccagaactctcttatatctggtgagtatgtttgttgccaagtgtgatcatagactcatcttttcgctgttttgattttttaagatgtaatttttgtttgctttgagagagagttttactctgtagtctagaatgacctgtaactcactgtctgtgtagctcaggctagcctcagacttgcagcaagtgccatgcctcagcctctcaagtaagtttcgatttttggttttgtttttggtggtgttaaggtttgaacctagggcctcacacacaccagataagtgttcccctgctgggccccactcccagtcctgagaagtttattttctggatgatttttaaaactgattgagagagaatagaactcaggtttttgttgctatgaagattaaataaattaccctatgaaaatcacaatgagcagtatcagacctgcatagggagccctacgtgttagctactagtttaaaagtaatttctgcaggctagcgagatggctgctcttctagaggggtggttttggttcttcccacccacatagcactcctgactgcctgtaattccagctccgtgggactcaacaccctttctggcctcccagggcactgtattcatgtggtgcacacagacatgcacgtgcatctacacataagaaaaggaattccctacttttatttttttcccatcctgatttcagtctaggcagttgtgcacatgtgagacaatctgtcatacgttttattttcatatttttaacttagtgtgaggcaaggagccaggggaccttgaaaagccattcttcataatattttataaggtagggtgaacagaaggtccaagaacattctggaacgaagttaaatttgtctattctagaagcctgtgaactttgtaaagttggcaggtgtttcacagctgggccccaattcagccagtgcagctgcagtgccggctctgccttgctgctgaggcctgccacacttggagctccaggaggactgcgttgccatggtccagatggttctctttgcatgtctgaaaatgctcagcaccataaactcctgcctttgtggatcatgctatcgtaaatatatattaaaacattggaatatttatgtaaagagtttttcatgaggcattacaaaattatgatagaatttagaatttagaatttagaatcacataccatatattgttgatcttattgaaaaactattcctggtatatcgtgcttgccagtgtagctgggattttgagctggatttacgttttttggcatatatagtttgtctttttttttttttcaacaagtcttatgttagattttaagggtaggaaaaaaaatgaccattttgaaaagaatagcgtctgctttggcagaactcccagccttaacattaccctgtgaggcttcctgtcattttgtagagacaaatgcatgaaggctaaatggcatactctccatccggcatctgacgcagttcccagatgcctcaccctggggagcagctgtttcagggctgctgcattctgaatgagagcagcagtctcctggggaataggaggatgcaaatggtccaacgcaaagttatagaccttcccttagagatttttttcccccaatagcagtatctttttagtacacttttacatgagtcatttctacacttgttctaatacaagtctgcttgtgtctgtataccacagagatgttggtgcttaagggaccttagttcttttagcaaataggcttcttttgtgttcaatgaataggcctgtgttttttagtgaaagatggtgactgaagcagagacatgcctttttaagactccctttcttcaggtttctcttttccagtaccagccttttactagttactacttttatattaaactatgatgcaaccagtatttcttgaacctctttgtattcctatatactctcgtcttctctgttcccctctcctcttctgtctcctccctctttctccttttgctcatcccatctctgtgtccatattttaaaacagggtcccatgtacctcaggctagaaattgctatgtagctaagactagtcttgaactcctgaccggcctgcctttgcttcctaagtgctgggcttacaggtatataccactatgcccggctttctaagaaaaaattctcatgtagagactaacttgctaccaaaatgcacactgcttcaaaccattttcccttaaaattaaaaaaaaagagagagagaagtgcctatgtctgtagtctgaatgaacttagtggctggctctgccctcccttggctcatttccagcatcaagtccagcactcttcacaccacacagcctgcgcttatcgagcaactgtcaggtaactgcaaaaacccaagcatcatttttttttctcactagagtttcctatgccttgtcttagtgttgaaaaaaaaaaccagacctatcagagagccagaagaatttccactttcatttacaaagtgccactgatggtactgccacaaatcagcttttttcccccctctcattggcccctgggatttcacatgggtttgcctgggaaactttaagattatcacaggccatgggcaggaatctgggaactgtgtgtgcgtgcttgaggctgatgctgcatgacaggcaactcatgacatctttcatcttctagggaactcagtgatgctgactgtgatggagccctgaccttgtccgagttttgtgctgcattccatctcatcgtagcccggaagaacggctacccactgccagagggcctgcctccaactctgcagccagagtacttgcaagcaggtaaggcctttatcatacatcataaaccttagctatattttctgaatgcctaacagcaaacacttatttcttaaaatgatgtctggacaccagggaatccttgacatctgaagatttttttagaatacaagttatagggatgatctgaggaagtataaaccatatgttctatttatggtgccttctgggtggattagaaccaatatcactgtttttttcttttgacagtcatggatggcaagtactgaatccccctgttgatagactataaatcttaaagagccaactataagcttggcatcttcagatatatcctagtatttctaattggtcttcagtagggtagttcaaagctataaggtctttttctttaacaaacagtcatagaactaataatctttccctctaaattagaagacagccttgtaaggctacattgcattgtttggtggactgtgtatgagccatttttgatacttccatgtctgggggactgggtggattccaggagaaaatttttgttataaagcatgttaaaatgtttttagtctttactatgttttttttctgtggtttgggaagaggggcagcaggtatgctgagaggtgttgagaagggagttgggacactcaaggaatagacacttcaggccatggctgttggagtgcatagaacaaagaagcaaggccaggatgaggctgaagagaaaagcaggaaacaaatcataagcaatagcattggcccggggaaggcagggagatgacaaaattagacttcttgtctgcaatgattctatgggttacctactcagattgaggaggtgacagtggactcagagatagacgatagggtggagataattatcagttgtttgttgtcatttgtagtctttgaagtgtagcttccggaacaagactgccttcttctatttgcccccaaatgctagtggatacctcatggcaaagtagtaaagtattttactattactctcttaagaaacaacctggctgccaggcaattagcttatcatgtagcatcctttctctctcatgccaattttctgagcttcccaactaacaactacttttgctgttgtatgctctaagagacttataatgctatttctctattgtcagtcagtaggaatgtatacttttatttttgtaacttctgttaaccaaagtgatatgtatttcataaagttatgtttagtatatattattttagtattttgcttatttctagcaatacctaaaaggaggtattcttcatagtatttaaaccattgttatggctactgcatttaaaaattgtgtttaatatgattaaaacttaacataccatcgtagccaatgtggccaattattaccatgtggtaacattcattgctaagagtaagaattcgtcagctggacttctgggtgttcaggtctctgctggtcactgactagctgtatacccttgagtgagttgtttgccttccccgctcctcagtttcagtgtctttgaaatgggaatagcgctactagattgtgtttgtaaagactttcaaatgctatctctttacagctagtgatgttaatagtacatatgagtgagccgactttgtcgttacatttaacgagcgcagaaacactgctaagacattccactatggctatagtaaatattcttacgtattttttcttccctactagctttccctaaatccaagtgggagtgtgcaatttttgattcttattctgagtcaatgccagcaaaccaacagtcctgtgacttgaatcggatggaggtaaaaaattaaaacaaaaaactttcccatgttaatcaggatgtatgatagaagtaaactctagcttatgtcttcacaaactctggaaaatgaacacttatagcaaaacatttttattactcccaattaaaaccctcttttcattagcaccacttgccacacttcccatcgccaccatttgatggtcactagtcaatcttattatgtttatttattcatttggggatgggtgcacaggctgtgacatcagcatggaggacagaggacatgagtcctgtcccttacagtttgggatctggtggattgaacttgggtcctcagatgtggtaacaagtgatttctaacccactgacccatctccctggctcctactaacctttctgtttctggtttagtcctttctaagcatttcctataagtagaccaatggcgaatgtctgctttcgagtgtctttttcatttagtataatgttctgaaggtacttctttagtacagaatagttttaattgtatggatatgctatattttgttcatttctccctccttattgcatattttgactattatgaacctatatgagtgttttatatggataaatatgattatttctctttgcaatgtatttactagtggaattgttggattgtaccataactgtgctaaacttttgaggaatcaccaaactgcattatttcagttctccaagcaggaatgtataatggctcctgtttcctcatattcctgatcaccctggctcatgtcattttcattttagccatcctagtgggatgcacttgtttctcatgacagtttcggtttgaaaatgaccagtggtgttgaacatttttctcatttgctagttagctatttgtgtatttccattggtgaaatatttattaaaatcttgtgtccatttttatttgcttttttgtttcttcttggtgttttaagcaagtgctttaccactgagctatgtcttcagttagctttttcagtgacattttggatttattttgtctgaattgtcttattcctagaccattttcatctgtaacacagtcaagataggagaagacaataaaataaatgccctattaagatataatttctggccgggcagtggtagcacatgcctttaatcccatcacttgggagacagaggcaggtggatttctgagtttgaggccagcctggtctacacagtgagctccaggacagccagggctacacagagaaaccctgtctttaaaaaccaaaaaaaaaaaaaaaatagatataatttctgtccacctttggattgccaactgcttgctatgtgaagactggaggatcataagttcaaggccattctggtctatggactgattttaagactaacctggaaagctgaatgaaaccctgtctcaatagagaaacagaaaagcacaatgggatattgtttagtggtatagccagatgcctagaatgctatgaggatctaggttcaatccccagcagtgtaaaaaagaagacattgataatttattagagataatagactatgaataggggctttcattgaactatggaaaatcacctcttaggataggaatgcatgccgtatcaaaccgattaaaggaggtgttggctaccctttcagaagaaacagctaaaatgtaaatgtagactatgtactagtctacagaaaatgataccatataaatcaaaaagtgagagggccttgtgagatttcctccttccacattggaatgtcaaccagtattatcattagcttacccctagatgaagaacatgcctgctaagagatgaaggatcagccttctctagggacaagatccctgataggctatccagttccaagtggtcatgtaaacaacactaatggacttagaaagctgtgtcatatatccatacatccatatgctcataaaaataattatgaaaggagaggccatggatttgaaaggagtgggaggacataggaggctttggaggggagcatgtgagagaaatgatataaagacagcacttagatatgagcttctcataaactaaattaaaaacaaagggaaagattggaacttcatgtacacaacttaaaagtcaaacatggctcttttagagagatgcatctaaagtctcttcctgcattctagaatttaaacaatatccatggatgtataattcagctgctatttggtttaaatggacttagcctgagaaatgttacattttttgctattttttacagagaaaatattttccagtttatcacataattcagtgggtgtttgagctgtttgtctagtggtttatctgtagtgatgcatacatctttttactttaaagtgattcagtatatattacattatgctataaccgtgacattaacacttgaatcacctagatgaggcgtgttagaccatagatcatgttcccacctaatagtgctatgaaattttattttggaactatttcaaactagaagcatggctttgagttctgagaagtaaatgaaagttaaccactgaaccaaagacctctatgcttttattcaccatccttgcatttttccactgatctctgaagtttcagatctatttaaaatgtatgtaataccaaagtacatttggtgacaaatcaatctgtcactcttctctctgtctacctagctatttttcatttttagatacctttgcagaccttgtacataaagatggcacaaatatgaatatattttatcctttaaccacagcagaagccttagagtacatactttttcagctttgtctagtatattaatctagtaagaccaatataatttcacatgtttttgatgttttgatacatgcatagagacatacacacattgtaaaatcattaccacagtcaagccaagtagttcctcagtcaccttacacaatggctttgttttagtggagatttaagatctgttctctgggcagtttttaaacacactatattttactaatactatagttagagtacatattgggaaagcttagtataattactagactttgaactatttgaaaatgattcatatgtgatcaatttgagtattcagtcgatatactgagaacttgcctttttgcattaatcaattcacttaacatccctatcacagctccctcctctcttcccagttctatcctttcaagctcctcctctacttcctcagaaaaggggaaacgccttatgggtaccaactcaccctgttcttatctatgagttaggggatttttttttttgagtctcactatgtcatagaactcactatgtagaccaggctggcctcaagctcacagagatccacctgctcttccagaggacctgggctcaatccccagggcacccacatggcagctcacacctgtctgtgacttcagttccaggggacccgataccctcacacagacacgcatgcaggcagaacaccaatgcacataaaaatgaaaataaatctttaaagaagaggggctgccaccgtgtccagctttaggagaaaaattttatctgctcatctataaacatctacaatgaggaggatggacatccaatacataacagatcctggcaagtactcgcactgtaggcccacttatcacagcctctccctgtttgtgaaaaaggcttggttcttggctgactggacaaatggaaaaaagtctctgcctgactcccagtcaagactgaaatttaaagtaccattcactaataagccttgatttgaatctttgtttctcaaatctatgtctttcctctatgtatgtaaatattttagtgcaaatttacttgtacctccttaggaaaccaaattaataaagtagattaaatgtcagaacttactgaagacaaacattttggacatgaactataacttttaaaacatgttttcatgtgattatcacttaattttttatttcaacccgtatatttaattttctttcccaagaagacatctgttaaagacgtggctgacttccctgtccctacccaagatgtgactactgctgatgacaaacaaggtaggaaaataattcgttttatccttataaggatgtcttcctccatctcctcattgatttcgccctgcacgggttttagatcatatgaggacactgagccagatgcacactcactggatatattgtatagtctaagttgtcagaagcctatagttcatcaagtagcagtaggacccttttttttctgaatggccttaattcattggtcattgttaatctgagggtattttgaggtatcatattggattctggtcccatagttagaaaatggaaagaattgggagattaatatttagtgttggcataaatggtttgaaaaacaaacagcactaatgtacatttgtatagaggtctaatccataaagaagttctttcaaacagagcttcaatcttaaagctgtatctgtttctcattagtcctactggtgcgaatgtgtgatatggagtccagtttcaatttgcttatttagctgagaaggcagtcagcccagtgtccagtgttagagatacccccaggcatggggcacattggcctgtaatatccacagttcaggaaggaccctctcctctaaggactgtgtaatttgcatgatccttctatgacttaccaggcccctcctcatataccatcttacatacaggtctcacaaaactagtgcctttaaaatcactcaacatttagaaataagcagcaagctcaggcaggcagtatgaatgatctactttcacaaaagagagagagacctgagacaggaactaagagtttctgtcttaagccagtgttccatctgttccatcaattcaccactcacaagtgggagaagcccatctgaagtgaagccatttcaggttttaccattgagccctgccattaattcagcctcacagagacattaaacatgaaaaagttttccactaagcactgaaggttccatacttttgatttaagtgtttgtttaggagattcagctggaactagacattgcctacagctgatcactcacataacttacaagccattgcctcaactaccaaactcttaaaaaatattaaaacatgggtttaaattccaaatattcttttgtcagtgattgactgttaagaaagaaaatgagagggctggagagatagatggctcagcagttaagagcaccgactgctcttccgaaggtcctgagttcaaatcccagcaaccacatggtggctcacaaccatccataatgagatctgacaccctcttctggtgcatctgaagacagatacagtgtacttagatataataataaataaatccttttttaaaaaaggaagctgacattaggccttccttctgtctgtggggaacctgtctctgtgctgtatgggttttctttgttctaaaaatgctacagcaactctagaggtttgtaagaccttttttaaactgatggttagggattatttgtgttaatgtgatgtatctcacaataaaatttcacaaggcctttattttctttcttctcctttctctttcttcttgcttaaacatgaaacaaaatactactagctttgaaaagtactgttaacgaatccttaccaaaggacgtatctgaggatacaggtaggatgaaaccattttaatgtattctctatccaataatctaattgtaaaatctcagctgtttggtgacctgaagattgctgtgtctgtgatagcgtgtctgtttgtctctaagtttttggcttgtggtttgtaaaacaagaagccttagattttataccttctccgtgtcttcagttagaggatgactttaggctctgcatttagatttcattcagtttgagtttagaagtgccaaattgggacagtgctttctgtgtaaggtaaggaactcagaatatggattaactagaggcccagagttgatattttcattggtaaaatgtcaatctcaaatatctttataatccttccctaccaggaagatattgcttaaacatggagtagattccaaggaggaaaaaaaggaagttatgaagtcagttccttggagaaaacatgtctgtaaaaccatagagaatttctgggcctatgttttcttctcttctcttctcttctcttctcttctcttctcttctcttctcttctcttctcttctcttctcttctcctttctttctttctttctttctttctttctttctttctttctttctttctttctttctttgttcttagagacagggtttctctgtgtagccctggctgtcctggaactcactttgtagaccaggctggccttgaactcagaaatccacctgcctctgcctcccgagtgctgggattaaaggtttgtgccaccactgcctgacagggcccatgttttcaactctttctttaaaacctgtttatttatttgtttatttttatgtgtgtttatgtatatgcctgagcacatatatgtgccttatatatgtgcagtgcccatggatgccaataagaggtattggattcctggaactggaattacagatggttgtgagctgccatgtgtgtgctgggatctaaacccaggtcccctgcaagaataataagctatctctctagccacctttagctctctcttaatggtgccatcactgaagcaagataaaccctgttaaattcaagtggctccagaaagcctttttatttagatctttggttttgaggatcagaatgaagtttctccttttttctttattattattgtccttgcatatttcaaatgtaaataatgtttcttctggttcactaactatcatcttgagcttatttgtttaaagtttcaacaaagcaatcagtagactactgaagcttatgcttatattttccaaatactaacttcctttgaagtttaaaagcaaaagtaggttggagaaagaggaaataggaggagataggaaggactgcacagaagacattccagcccccaggtgattctgctatgtggcctatttggaaactactgcctccaaaaagcaatgctgcaaaataggaaattaagatggtaaatcaatcatgactctaaaatcagtgggaattctcaagcctgattttgacttttgaaatgtgtttggatccattcttcacggtggaaatgttctatttccataggccaattctgagcgtctctgattgtggatgttaaggtagatgctttgtaaatttcatgtcgtggtattagtaaaagctatttcaatttggagtgttaatttaacgcttctcctataggctttgggaatcctaaatttttctatttgttccagagatttcagcacgagattaagtgttctctgaggcatgagcctcggttttcatttttaacattctttgactaggacttggcaccaccagataaaacctaacaggtgtgccacagcacatgaagtatatctaaatttgtttcacactgcctgggaacatgctgtgtgatttttgatttattcttcctactgctgcccccttctggatataatgcaatctctcatgtcaaacacatttaatagcctgtttcctggcaagtcaccccagtttcccctaggagataggagagtcacaagatggtaattataattctggtagtcagtgtactggagacagttcctctcagctccattgcaggcttttaggttaatcattaggtctgtgtcatcttctctgactcatttcctggaaagatgatgaaagataacatgcctggagtgctccaggaagttgtcattttcccctctctccagctaaatgagaagctgtgatccatccattggcttttgcttgagcttgcaacatagtatgcccttgccatttttgcagatactcacatgcactggggaactgagtcaggctgtccaggtggcagatggaagacttaactagcctggtactgttgaggcttttgtggtctgaaacttgggccaacttaccaagctgtaccttggaaacatctttgcaggtagagaggaaaagtaagtctctgctctgcttcttattactatacatggtggcagtgctgctgctagcagtgaaggggaggggctgggtgatagatgagggaatggaggagattcctttccttgttaaacatatccgacacactctcacaattttagttattgaatgcatatgtgttagtggagtctaggatgtctaacatgcctcatgttccagtctagcctaattcagtcacacatagtgcacggtagtagttgtcatcttgcttctggatcatagtgaagtgttcctgtgcagcatggtctccagattgctgtggacagttccaggtgctgtttcgttgctagtgagcagctcacagactttctgcatcgcagcctttcttgccttctgctacctgctccatctctgtctctttttatcctgtaatgaactaaattcagaatccagattttcaggcctagaatattagggacctttgtttacatcctctacaaatggaactgtttgccattctgcaggacattcacgttcttaggactccagccttgtttaccaggcgagggaagggcagctcagctggttagtgatgaggagcactggggtctctggacccccaacccggtctctgttcctttcttcatggctcattcacacccttactccatttgtctgtctgcctgtctgtgtatctcccattagcagagctcatccttgcttccacacccatccctgcagcagcacaaagataatgctgaagacaaatgacgaaggagtgaacggttaccatggtgtggtgggctgggaaacagtgttttagcatggctaggacttttgctcccgaaatatttctggaaagcagtgagtcttgaaggagaagaagggcatagaggagcggtggcaggcctactcagaggcaggctccagcactgcagggagtctgggcacagatttgtctcctagctccagggcagtctggctgaggagggttgcctttcttttcttcctggagtggtagggacggacggacagacggtttggtccttctttgcctaggagtgtgtgcatgatatgaacaaggagagtctcagtcttgttagcttttccacacttttgctggtgaggagggagctatggcagcatttcatttggaagctgagacatgcctgggctcacagttaggagaaatggtgtttttttttttttaatgcagctggccatatgtaagtaaaggcttgctctctagggagtttgctttgtgccttgctggcatttatgagactttcagctccctttcttccttgcttgtctaacccaaggattttaatgaccatcatcaacctatgctgcttcataccagaggaggcttttatctttagaatggtgtggatgaggacagaatagcatagcaagatactttcttttggataaataatgtgaaacaaagaaacaacttatattctccccatttcactcttcctgtggatttttatgataaacatttgcagcgtttgcaaaaccatagcagagctctgaggttctaaagacaccttctacaaataagtggaaacacaaaagagagctcgccactacttctgatgggaacgtgggctccatggctactgatagtgagcatgagcttctgatttaggtttcattaggaaaagtgtggttgaaacacattttaatccatcgtactctttgtatgatttggttacaaagacaggggaatgaaccagagtattttctctttcatatttttatagagggaggtttttgagatagggtttcattctgtaggttagccaggctattctggaatttaccgtgtagcccaggctgccctcaaacccatgatgatattcctgagccagctttccaagtgctgggatcataagcatgggcagccacgcctggctatgggtattttcttataggaaaagctgcacacctttttaactttgttttgtaagagctcagctttctcatgaccatggtaaccatggtgctctacgcatgcacacatgtatgtatacaaatgtgtacatacacacacatgcatgaatgtgcacaggctctcattaaattagtcttggctggcttaactcaatatatagacaaagctggccttgaacttgtggcagtcctcctgcttctgcgtctagaattcaggtattagccactatatctgactctggcaatattctatagttacagaagatatgcagctagatatattcctaacctttgtgggagattggtttcaagtctattattagactatcatgggagaccaagaagccctcaggtgggaatctatcatataaaaagacaaacttttaagtaggttgtctttttatcttggaatgtctccattaatccatttagacttaaaaaaattttagacttgagaatggtctctcagtgtttctatgaaagaaaacttgctggacttctttccctctcttgcctttaactttaaaagtaaaataagaattatcatagtgtggaagcccctgcgttctcacatgggtacatcaacctcagttttgcgtgttgctgcgttctgtactagcctaggtgctacttactaccctgattagctgagaaatgagaagccaagcaaccaacaaataatcttttgtttcagcaacttctaaggactacaacagtctcaaagcaagaccaagatccaggtagtgtttatttaatttctcatttggtgcctgttgtgccttttccctgcctagaagtaaataaaaatcccccaaaccacatccaaatcactatctggtttacctttcgatttaaatctaaagatgtgggtcatttcacttctcaagagtggcctgcctcgattacacagtgatgctggagagccttttagtctttgtgggcattagtgctagaagatggtggctaggtgttatctggacccctgacaggaagtagtttgtgtaacatgactgagctggggtaggtgtatagctttgttaagagagaattagggctaaaaggcaacaactaacatttctgtgaatgtgaacaccgaaacagtaagaactcaggaacagaaaatctatagaagggaaaatgtttatggtgacttcaaggaggcaccgggcttcaggtaagcactacctagagtctgtgtgagccattcttggtgtcttttctcagcttcacagttctaaaatagccatcaacaaaagaggagaaccaaaagaacagagcgtggctgttatcagctttggaatggaggagcagaggggaaatccagagacaccgaaagagctaggacactgaagacaagaaatatcggggccacttttaagcagtagagctgtagtgtagtatgggctaccacatggttggttgtgttttttgtttgtttgtttgctttgcttggctctaaccctcagggacttcttttcctccttcagcttcagctcctctccaccactccgcaagttgatttaaaccatatcatattttatgcacttgaaagttaaggaacactacctaaatgtaaatcaaacaatttaggcttcactttcttgttcatataggccacagatacttatattaatatatattttaaacaacaatttcagtaaaaagaaaagtatggtcactttttctttggtgaccatatttaatcattcttttttcttttaaggattggcagattctttacatattagtctgtactagctctgggatacagaaatgataatattaacctacatttacaataagaaaggccttccatgggctggatagatggctcagtggttaagagcactgactgctcttccagaggtcctgagtttaattcccagcaaccacatggtggctcacaaccatttgcagtgggatctgatgccctcttctggtgtgcctggagatagcaacaatgtactcatatacataaacaaacaaacaaataatctctttttaaaaaagaaaggccttccatgaattgcagaaatgagctgatgtatactatattagccacaaacaacttcataaatatggctttgatatatacgatattagccattgaattgaacttcataatatagcttttgatgagttcttctctcctctcactatgaatgaaagtacaaaatcccaaaggcacatcctccactagtaatggactggacaaatttaatgtattattctttcagaggttggacccttggtccaatatggataattttattttccttatttctaacggattatttactgagatcaagactgtcaaaccatctttattctcatttgtcaagtggtaagaatttgtagaagtataagggtaagagggaaaatgaccattctgctatgatgttgtccatcattttgccgatcccttgcacattatgttttggtttacctggtcacagtcatgccatacagtcttacttatttgatattgattacctttccatgtaaaaatataaacatggagatcatatacaggaaggaagtgtgggatagtatgtatatgtatgtacatatatgagtatgggatagtatgtatatatgtgtacaagcatatgcatgctcacacaaactgatacacttatgtttctatacttattttttcttccttgtgtagaacatgtcaccaaagctgtacatggcatagaaagctttttttttttaaacttctagctaggaactctagcttacttgatgaacagttgttgattccctttggttctgtttgacagagttagagaatttttcccttagctctagtctttgtttgccttgactgtctagccagatacagtacaagaatcaaacaaagagaattcccccaaaccattattatggttgacttaaagactgcttccttgcaagacaaacaaaacctgtagacaccacagaaagacctttgggaagcttttgttttttgaaaagaaaaacattgcctagcaacatttgactatgaattggacctcttgggaccctgcccctccctgctgaactattggttactgacggattctggaagaagagcagccattgtgtctagttgcatacccaccaaggagttcaccaggcacaaatcgaaagtttcaagtctgtagtcacacaataaacctcagtgggtctaatgagcaaagaaacaaaacaaaataacaagcaaaaaacctcatgaatgtgggaaggagacttgggaagaagcaggaatagtagaaatgggagggaatttagagagggggctgtaataatccacatgcacattacacatatatgaagtggtcaaagaacagacctaacaaaagttcaaagcaagcaaaactttgctttgtcaaaaacagctttaccaaaactaaaggagtttaatagccatcgatcaactctgatttagtaagaactgttgtaatagctaattacaaaagcaagtttcctgaaggtaatttctttctcagatgtatcttgcttcagaggtaattttctgctttctgctttgtcatgaagtcagctgagaaagtgaacagcagagatggacacacatatctccgtgtttttcctgatcatcatattaggaactcgtccatattaataaaccaaaaagtatgttattgcattaacatagaaaacaagtatgttgccaatatcctagctactactccaggaagatttactctctgtttcacaagcactgaaccaacaccttaaaaactgaaacagatcagagtttgcaagattctggctttttccttccattttttttaaatgctattattatagtgtcagaagtcaccaagttagctgtgctttgcctcactttaaagcactttaaagaaagttcaagttaagcctttgctttgaaaatttccataaaccctcttaggacaaggctggcttacctcctgaagctgattgctgtgtttccctttctgaatgaagcatcgtttgtggtataagccttgtgtttgagttcttggtcagtgtggctgtctcaattccacatttgcctgcgatcacactgtgagtaaaccagggttttaatcagttaataccatgaagcccttttcctcaaacacagaaggctgcaagctgaaaggcttatttacacattgttcttattaacaactatcacagaaactgatttgaatttatataaaccatttttggagaagttgtaaatttaggcctaataatatactaagggcaaaagatcccagtaatggctgggtttggacaattattatacgcaatggcatttaagggacagtagaatttctagctgccctttggcaccttgcctgttctctgcagtcattttgacattggggtattctctgtttccacccagcttcagggaataaagctctgctcttttgctctgaccttcccttattttgctacagatcttactctagcacctccatagaagaggccatgaaaaggggtgaggaccctcccaccccaccaccacggccacagaaaacccattccagagcctcctccttggatctgaataaagtcttcctgcccagtgcgccaggtgaagtgtccctctgcatctacccaagctgttcccttgcctgttggagccagtgcacatacatccctgctgcagaggcctctgtgttagggaaaagagcacacagacctggcagctttccttgccatgcaagtctttatgttgctatgatattcttgggcaggaaaaaaaaatcccagacagatgcatagcatatggggctggagactttcccacactgccaagaatcaagaattatgaagttcgttttttttttttttttttttaagtaggagaacaaaaatgcttcaactgcagactgcccactgtgagcctgcctggctgcagtcttgtcctctatatcatggtaattttaaagtaagatcactgctattttcctgacacattatgtgtgtttttgaggtcagagctcagtgaccagcccctggccagaaccttctatgggagtttatccttgtgttcttagggttcaattcagaagactccaaatctgaatgatgtttgggtgctgggtaggggtatagagccgtggggcttgtgggtgggctgctttggagtttctgggaattagttttgagtcagcagagctgtatagctgcactggggccagaggtgtcagagaggacggccttttcctttacttcctgtgaggtaggtagggtgtgtcctcctaggaaagccgaggaacaaaatgtaggaaacacgcctttgcttcagcacaggtgacagcagattgtctcagccgtcatgaggggagctacaagggcctttccactgatgtatgtaagcgaactatcaatagaatttcctgaaatgttttctcgatctgtatgcagtttaaatcaaggcagacttgcctggtagtgatgtgtagatgattaccgcttctactaaagcacagcgtctcattggcatgagctccgtgtcctggcagagctcagggtgttcccatgttctagtaaatactcttcttatagtgaaggtatagatggttttttaaatatacacaaattgggacttctctatcaaactgattctctgcaacgagttcatcagatcaaaatttctcttaaatcttccactatactttgttccaaattctgacataatttcataggtctttagggtaagagtagccataggttgatgagattatgaaattttcacatggatataggattaggaactagaagactctactgtgattgcaagaagactaaaatgatatggatagctgtgtcagtgtctttcccttgcatggactgagaatggaaacgttatgtggatctcagtgtatttggagcatgggtcgatgctttttgcctgtttgtgtttcagagagtgagctaatcttttgccccagattttttatcttaaagtaaggccaatatgtgcacttgggattgtaaagctttggttagttgataaacatacttcaaatgttaacctgcttggccttaatatgtacccaaggctcacatttccatggatgaaaagttccaggggcagccccgatactttgttttcgagtgatgaagacaaagccccagcactcccttgacgccagtggatagttctgtgattctttccagaaagtttttttagaatgcttacagaaatatcagagtacggtttagtttgtcatcgcacctatttgttaacaaatcttatatgtttctgtcccccctgctctgtctaactttgcccataactatataagatgtaccctgaagttcccttcttaaggctgctttagggacattctgaattcaggcagtgtcttttaacatcttcaatggtgacatgtatttcttgatgaaaagtattttggtttgataaatgtgttggagagaactctttcattatgtctagataaatttaatagttgcattaaaaatagctgatagggcactaggaaagatgacccaattgttaagagtatgggtcactcttccagaggggcctagattcagatcccagcacccacatggctactctaagtatccgtaactccagttccagggcatccaacgctctctggcctccatggacactgcatgtatgtggctcacagacttatacgcaggcaaagtacatgcgcacaaatgcatgatgatggatgatgataatnnnnnnnnnnnnnnnnnnnnttaggccaggctggcctcagaatcactatgtagtcccagggtagtctagaacttttaggggaatcctcctgcatcagtctctcaagtacttacagagaaggcttacagaaatgaacttttaacaagcagtttaaatttatctcatgaggaatagaatgtttctatagtataaaaggcaggtgttattgtgtcttaggtttctattgctgtgatatagccccgagatcaagggagcttacagaagggcttacagttccagaggaatgagaccagtcatcaccatggtggttggagaagtggagcagcaagcagaaaactggcagcttacatcttaaaccacaagcaggaaacagagagaaacccgaaaaagcacaggccctcaagctctcaaaaccggtcctcagtggcataattccccctccagtaaggccacacttcttaggcttgcctaaacagggccaccagcagggccaaatattcaaatgcctgagaataggagggacatctcactcaaaccaccatacattgcatctacttttgtttctgttagttcattcttacagaaaagtacaagaggttttctaaattgcacataattttattatgttctgtatttctagaaaatatttaaaatgtgatgaaccagaaatgcctaaagtagagagagactagacataccagaggagtctgcctgagagaacttctatgatcatgctcattgcacttgtctttagacaaacaggatcagattacacttgctgttccatgtcctgtcctttccaattagcctttttccctttttcacagtgaaaaaaaatgtatcattctttttaatggatgcatgatatggatgtacaatagttgattatgcattgctggaaaaatttctcccaacagacacacaccttcttttcctccccacaatcccactttgctcttaggattaaccaaggccaaagttgtcagtgatttcaaatctacacttaccttttctcgtccaattattttcttgtgttaaatcctaaatggaggggttttgggatcaaaggctatagatgtttatggtccagatgtatattgctagactgctgcagaaagcccgtgagcttgctttatttctagcattgtctcagtgtgtcccctacaccctcaggcatcagtcttcatccttttgaatgtaggcaaaaactttcccgattccttgtaagttcaagcatttcccctacactattattggccattatttcatcttttgtgaatcatttgctcacaaggttcactcagcttgtgttgatgaatcacaagtaccatttactatttttttcacctttcctaagaactctgcttctcttctctaaggcatgtgagaatgtcaacaggccatgggcagctgaaatgatctgccactctgctagatccttatccctccagtctctcctttcacaagtctatctgggctgctctgtttataaaaacaggaataagaaaaggtatggtaaagaagggaagatggtttgagatgaagcaagatattgacttaagtggaaaaaacaaagccttctttaaaagatggggcccacagggtgatagaaagcagtatgtgctgtcaaggtatggagagagagtagcttaaagataatagcaatggcctgtgctgtaagatcaagaattgacaaatgggacctcataaaattgcaaagcttctgtagggcaaaagatactgtcaataagacaaaaaggccactaacagattgggaaagaatttttaccaatcctaaatctgataggggactaatatccaatatatacaaagagctcaagaagctgaactccagaaattcaaataaccccattaaaaatggggtacagagctaaacaaagaattctcaaccgaggaataccgaagggctgagaagcacttgaaaaaatgttcaacatccttaatcatcagggaaatgcaaatcaaaacaaccctgagattctacctcacatcagtcagaatggctaggatcaaaaattcaggtgacagcagatgctggtgaggatatggagaaagaggaacactcttccattgctggtgggattgcaaacttgtacaaccactctggaaatcagtctggaggttcctcagaaaactggacatagtactaccggtagatccagcaatacctctcctgggcatatacccagatgatgttccaactggtaataaggacacatgctctactatgttcatagaagcccgatttataatagccagaagctggaaagaacccagatgtccctcaacagaggaatggatagagaaaatgtggtatatttatgcaatggagtactaatcagctactaaaaaacaatgaatttatgaaattcttgggcaaatggatgtatctggaggatatcatccttagtgaggtaacccaatcacaaaagaagtcactagatatgcactcactgataagtggatattagcccagaaacttagaatacccaagatacaacttccaaaacacaagaaaatcaagaaggaagaccaactcccagatacttcattcctccctagaatagggaataaaatatgcatggaaggagttgcagagacaaagtttggagctaagacgaaaggatggaccatccagagactgcccaacccaggggtccatcccataatcagccaccaaacgcagacactattgcatacattagcaagattttgctgaaaggaccctgatatagctgtctcctgtgaggctttgccagtgcctgtcaaatacagaaatggatgctcacagtcatctataggatggaacaaagggcccccaatgtaggagctagagaaagtacccaagagctgaaagggtctgcaaccctataggtggaacaagaatatgaactaatcagtacccccagagctcatgtctctagctgcatatgtatcagaagatggcctagtcggccatcattgggaagagaggccctttggtctagcaaacttaatatgccccagtacaggggaacgccagggccaagaagtgggagtgagtgggtaggggagcagggcgggggtgggggagggtataggggacttttgggatgcatttgaaatgtaaatgaagaaaatatccaataaaaaaagaaaaaaataacatggaaaggaaattggatggaggggctagagaagtggcccagcagcaaagatcactgactactctgtctagtactcagtacccacatggttgttcattgtggtggtttcagtatgcttagcccaaggagtggcactatttggaagtgtcactgtgggtataggctttaagaccctcatcctagctgcctggaagtcagttttctcttagctgattcggaacaagaggtggagctctcagctcctccagccccatgcctacctagatgctgccatgatcctgccttgatgataatagactgaactgaaactgtaagccagccccacttaaacgttgtcctttgtaaggattgccttggtcatggtgtctgttcacagcagtgaaacctaagacacccatgtaactccagtttcagaggctctaacaccctctttgtacttccagcagttaagcgctcttccagaggtcctgagttcaattcccagcaaccacatgatggctcacaactatctgtaatgggacccaatgccctcttatggtgtgtctaaagacaactacagtgcactcatatacataaaataaataattctttttaaaattctaaaaaacgaagcctggtgtggtggtatactaccttaatcctagctcttggggttcagaggcaggtgtatttctgtgagtccaagaccagactggtctacgaagcaagttcaaggccatccagggttacacaatgaattttttttttttttttggtttttctagaccgagtttctctgtgtagccctggctgtcctagaactcactctgtagaccaggctggcctcgaattcagaaatccacctgtctctgcctcccaagtgctgagattaaaggcatgtgccaccactgcccggctgtgagaacatttcttaagcaaaaacaaccaaaaaaaggcaggcaggtgggcaggaaagaaggaaaaaaatggataaagagagaatgccaagaagcaaccatgcaagaggaaacgaagagaaagatgagatagttaaagaagagtaatatttatatcgaacaagaagcaacaatgtatagaaaacagcaagcttgcaaatactggaaataggtttcaattttgagaattgcaaagaaagtgtggatatgtaatttacaggagcccagggctctaggaacaggcaacagacaagtgtgggctttcattggagaaggttatatgattggatcagataatttgttatagctaatcctggtcttaaagccatctactcagagtctcacacaactgccatctttgaaagacaatataaatgtgtgaggatgagcccaccacgtgcatgcacaaacacataagtaaatgtgataatcatgtagagtgtgatgcagatctacaaaatctagaggtaggcaagcctgaggcctgtttgatgatggtttagttttgtaggtctgctattgtagccatgaaacatctattactgaaattcctataagaaaaatcacatgctgaggccaatcccttttacaatcgaactggcttttatcattacaatggtgaatcttttttccatgaaatgtttttttccctcctactggatggaacttcccctcctactcttgactctgacctgttcttccaaagccatgcctacggtttacagcctgtggtttccatggtgatggtaaaaagctttcattctgcctttatcacaacagtcctatctattcttgtaattgagaatcctggcagaagcacaaagactgtgaggagttatagctaccctttaaaaatttagattagggacttccacttcttccactctgaccaagggagcaaaaactggtctcatggatacatttagctatgaaacagggtagtaattttctaatggcactgttttattttaaaagaggagggtggatattgatggacagtcttttctaccatacctcatatggcctcatccattaagagccacatattagaaccattcaaacggctgaacaaaattcttacatcatgaatggttcccactcatgatggttagtgttacgttccggctagacagaatctggagttaccttggaagggaattcctgctgttgtgacctctctgttataacggactgtaacctggaactgtgagctatgtatgataagccctttcttctttaagttgcttttgtcagagtgtttttttttaaatcataggaaaagaaaagaaagatgctacctttgctttaaaaatattgataataaaattcatcccataattaaaattacaattcatccataccataaaatgaagctcttcgaaagaatgatgtctgtgtactacatagaaaacatctgagataaattaagcaacaaagacacattgcagaatatttgtgcttgtaaatgtatagataattccaagaagaatacttatatttatttttgagataggtctcaaaacctgtaacccaggtttatctgctttcacctttcaagtaccgagattactgtgcctggctcaggacaactgatacatggtgtttgtctctagggaaaggaacagtatggctgggacaggaatgagagacagtcctacttttcattcattctttcaaatagtgcagcatatatgcatattacctattatgctgtaataggtaatggtggtacatgagaatccagagctatttttcctggctaaattcacccatctcaaagttgcttaccattccaggatatctttataaccatctgctaccacctcctggaatgcagctgaaatgacagaagcattctagagcattctttcaggtagtgctatattcttcagattacttttctgtacccctttagtatagggggctgggggacttcccataacttcccattgtgagatgtttgctcaggtaaaacgtcctgctgtggttccggcttaatgtgggaggcgagtgctcattactcagcggtgagctggtggaagtccgtcccagactttatatacatggttattttcctctgtgacttgagaaataggaaactccttgggtataagagatgctttcaaaaccagacttcatttcaccttctctgaacgatgttggtcagctctgctttatagatcgcttcatgtctcattcctggaagaggtagttgtttcccttcgaaatttcatacaatttagtaggatttaggttttagtaggattatgggattcctgctgcacatttagtatttgaagctcatgatacaaatccagtttgagcagttttatttttttataagttgaggttaaatttaccttttaaagatgtatacagctcagtggcctttgtatatttagcatattaagtagtcaaccacactctctaatttctgaacgttttcaacactcaagaagagatcttcatccattaccagtcattccccatctacccttttctccctgcagtccctggtaaccacccccatactttatattctaaatgttgaccctcttcccctttccctctccaagagttcttcaccccataaccttcccctttgcctcctagagagcgcttccctaacctctcacctgcccaccccacacctcagccccctgcatttcccttccctggggaattccccttacctgtgctggagcctcagatcagcttcttatgctctttggttggtgacttagtctctgggagctcccaggggttaggattagttgacactgttggtcttcatatggggttgccatcctcttcagctcctgtttttttttttttgttgttgttgtttgttttgttttgttttaacatattttagatacaagtttcttttctggtctttcacatgcaaataccttctctcattctgtgggcttgtcttttgcatttttgatagaatcatttgaatgcaaacctttgagcgctttcataggttcagtttacatcattttgtcacttgtgctttcagtatcccattgaataaatcattgcctagcccaaggttacacatttcctttgcttcagaaagtttcatgagtgtgcttttaaaacttgtatctggagtccatttcaagttatttgttgcatatgagacagaactccagttttatttttctgcatacctttattcagttttccctgtaccatttcctgaagattattaaattttgatactgtggtggaaagtcaattaagtatgtgtttatttctagagcctcaagtctatccctttatctgaacatcacagtatcttagtaattaagtgttcatagttctttttgaaaattattttatatgtatgattgttttgcctgcatatgtgtgcacacatgaggccaaaggggggcattatgtccccttaggtaagagttatagctgaggcactatgatggtgtttgggatcaaacccaggtccttcagcagagcagccagagctcttaactgctgagccatctccagttctttaaagggtttttcttgagattgcagttgaactgcaaaatttcacctttcctttcctctctccaaaccctcccatacactccccagctctcctgtaaattcatagctgctgtagtatgttttggtgtcaggaatgacaagactttctacttttttctttttaaatattttttattcattatttggattctttagtgtttccatataaaatttagaattagcttgttggttcctgcaagaaaaaaatttgattggagtttcagtaaggattgcaccaatatttaggttaagtttgattcatgttattctcttactaatattgtcttctactccccaaacacagaatgacttttaattcatgtaggtctttcaattggattcagtagtgtcttataccacataagctttcagatcttatacttatcttgttaaatttagtcttaggaactttgttcttttaaaattttattctaaatagattttttaaaggagaattcattttcaaaactttaactgataatgtgtagaaatacagttggctttagttatttatcatgaattctgtagcctcattgactttttgtttggatacatcttattctgaagcttacgtagtgaggtgggagtgtgttcattacagggctcctaacagcttagctaataatccttcagatacgcacaaattaaagatgaaatcctctttagtctctctggaagacaccaataggatcattattgaatgtcacattttagtttcagtttttctcttgtgtatgaaagaattgatctcagaccatttctcaagtaatatatgctctagctatgcagtggcaatgttaccttaagtaaggcttccctgtttgtacttacaggtttttcatttcactactgcctaccaccagatgtaatagttatgagtgacaagagtttgagtcttgttttgtacaaaggacatatttaaggcattttgtgtgcattatctccaaaattcacagtaaccctgcaaagtagatactgtttcctcctcattttactgacacagaaacaggtgcaagttaatttgcctaaggtcattgaggtacttgcaattaaagctagtgttttaactatatggtctaaagctaggaccccagtttgcaattgcaaaaggggcagtttttctcttccatctctttcatttgcctttcccaattcatctgctcaatcaaatattttataggagtatctgctaagcttcctcttgtggaagtgggacatagcagcagacatcaagttgtgattactttaactcattcacctcactttgctttacagttagctggaccagaactcctcttcactcatactcagaccttcgactgctagtacagtcacctggctttggaggcctaaggcagttggttcaaccttcctaatgctgcgcccttttaatccagttcgtcatgttgtggtagcccgcccaaccataaaattacttctgttgccactatataactggattttgctactgttatggataataatataaatatttttggagatagaggtttgtcaaagaggtcacaacccacaggttgagaacagtggggctaagtcttccctttgcattccagatctgaatctttgcttttagacctgctcctaggagtaacacgaccagaattgatcttgacagagcattaatatgtctttttaaggttttcagtacttgagatgataaaaagtcttggctgcagcatagtgttcctttggcatgagatttgaagtcaagaagtttatgtaaacaatgagaagtacatttggacattggcctagatgaatcttttcagaggtatgagattcgttcaggttgcttctaagcctgggtgtgccagggctcagcatgaacacttagatgaaaggcagtcttttcaaagtgtgggccagtgcactagccgtccttggcttcttttgccttttctggttcctgcctgtctttatttaggagatttttttcttctccaacaaattctgtgcgacttgctcgactaacacaatgcagtggattgggcttccaaaaggtaaaagccgggggatttagcaaaccttgtaatgacaagccagagctgctgggtggggtgcattctctttgtctcctttctgattttatggagatttcctggctggtgaatgcttttcagagggcatgtatgggaggaacaggaccatagtctccggagaatgaagtaggaatagttagtgactgctcttttgaaaatgtgtatgaaactcattccattagtaaatgcctcttgtatgtacagtcaaagataagtccatttcttgactgcatccccaccaagtcctctgtgccacctcagcccacgcagtgtctccttctgacatttgatagtgcatttgtgagtgtttatatgtccttgtgacatcaacttgaggttttattctttaaaatacttgagaccacattatgcattatgttttcttcatcattttcatgttatttcctagagataggcccatgtctatctgacatttgtctttctcttatacagatattctgtataataatttatttaaaaagtgtattatgggggctggtgagatggctcagtgattaagagtgccgactgctcttccaaaggtcccgagttcaaatcccagcaaccacatggtggctcacaaccatctgtaacgaaatctcatgccctcttctggagtgtctgaagacagctacagtgtacttacatataataaataaatgaatctttaaaaaaataaaaattaaacgcctgagagtaaagcgactcttctcacagacatgctttcctctcggtgcaggtcgggccctcctttaaaaaaaaaaagtgtattatgaaaaatttcaaatttagtggaccatttccatacattattttgctataaatcctaaatattatatactccctataagacagtgtctccatgtgtgtatcagataaagcttctttaaaattgtcattggttgctgaattcttctaaaaatttttttatacaaattaatgtgtttcattgaccttttcatacacacaagtcgctgtgcattgctcatattcctcctatcaacctctctagtccttcctcctcttcctgtggttcccttctacccccttctgcttaataaaattatcaataattcataaataacatttaatattcagccagtgtcctgatttctgccaagtatgtctttttgtagtgacttgttcaaatcgagattcaaacatgtgactacataagcatttcttcttgctttgattatttgtctcttaattggtagattcctttctcaatcatttttatccctttatagttgttcatttattcatccatccatgcactcatttgttcagaagaaaaccgttcatcttgttgatttctattgtcaaggttttggctggttgcttattttcccatatgctgtatttcctgtgaactagtaggtacatctacttgattagaatcagaattgttttataagttacttcctagtaacactgtttactttttcctgttgcatattaggagattcttgatatttaatgtctttctaatttgaattgtttgtttcattagtgagttcatatagaattagcctgatgcatgggttgtgatggagatcccaaataagctttcaaataattgcttttatatcagccattgatcattgttcactacatataacagtatactggtaaatgttaaaatcctgtcattttccagttttcatggtaaaaaacactcctgccttggctgctttcttgcctaatgacgtttcactgagtactgagctgtgaactggtgtgtacaacaggctctcacaagcttgcatgaacactttccagaaaactgttggtcagggtcctatttcactggtcgtcatgaaattatggtgtaggcacaaattttttgcaacctacttttaataagggttcaatttctcttctagcccaccaccgagcagaggtagtggaagagaaaagttattaggttatgggggggtggacctgttcagcaatagttctttgggggtgagatcaatcttcttgggcagcagtttagtcctgtagcatatgccaaacatagcttagcagctgcagaccagtcctctaggcaggcagacactaggcacaaaccagcagccatggtacagttctttcagcaagcagacaccaggcagctgtagttcagtcctgaagaaatggccaggcttggcaaggcagagcaaaccaaagctcagtccttgtctcccatgtctgtggggtcgtatttgtactccgtcatcaagagtcctttcaccttgtctgcttcaggaagacagtctttcacctgtttgcttaagcacaacatcctttcacctgtgtgccccagcaaaacatgatttggcataactaactttccaaaagaactagaagtttctacttcattatggtattatagtttatcactttgacctttattagttaagactgtggttcctttaaccattatcctattgttgagcattaagctcgtgattactctaaagcatgtaagctgagggaaaccataactagtaaatggtaatatactagtagtgtaaggtagtatttgtaggagcttatcgaattttctgaatattgagataactttagtgatggtggttagggaaagtgttgtatgtatcctatcagtatttaagaaatgcttactgcatgtttggcattgggtagcatcccatgaagaatagagatatgactccaaactctcctggtaaatatgatgtgacaaagaaactgaccacaggcattggctagctagaacgattagttcatgtgtatacagagggaatgtagggatgttgaagtaaatgtcaaaatatagaccttattttggagtcaaatcctattgattcttccttaacatctgcatttgttcatttcacattgctagttgctggagagacttcaatagtagtttctaatcttgtttgctctcctggagctacaggatcctccccccacccccaagtgtagcaatgaggttgcttccctgcttataacccttcaaggcctgttatgtcaacatttagttcctgttagtactaagattgaagtcacaagaatacacaaattcagtatcgtgggttggcatgcctgggctggaatatattataggaaggaagtagagataataagattctattctgtttcatggtcaagaaaaaaatgatgatcagggaagaaccacaatgatttaagaagttttaaaggaagtttcattagcatccggggtgatctccctggctatagttatggtgcaaattctttgtcaactcaataagaaatgtttaagacttagtctgactactagcatatttaaaaaatttagagtagaaaagagatttccagatgatagaaactttccccaggttaccttttcctttgtctgtctgtctctattactccgctgtaatgaaaacagggacttaaaaggtctaaggattaaaggaatgtgctactggacttagttgtaagtttgaatttgggtgggttgtggttttatcagtctttaccttttgtggatcatatctaagaactttttatctaactcaaggtctagaacattttgtccatgctcttctaagtttcatcactttagctcttgtactcagattcataattaattttgactttagttttgcataaaatacgaggtaaagtcctgagtcaatcactttatatttggatgtccagtttcttcagaaccatttgtcaaagaaaatatacttccctctccatggccttgcttgggacctttgttgagattcacctgacttctaagggtgtccttttagaccccttctgttgacccatatgcttattcttatgtcaataccacactagatatatacacttaaagctttatttgattatctatctatgtatctgtataaatgcaagtaccagtagagtccagaagagggcatccaaatcctggcaactgaaattacagatagtgagctgccatgtaggtgctggaaatcaaagttgggacttgtaaataggtgatcacataactttttaatttaaaatttacttttttatttaatttgttctttgatactttttatacatgtatataacacatcctaattctttttgctctatcctttctcatctgtattctacttctgtcaacatcacatctctcctacaaatccttttcctacatttacttcttttgttttatatcccattgaggttaaccggggccatctgtatcaccatggaagtgttcattggagcttggtcggctcaccagtgggtaaacaactaaagacagctactctgtcttccaagattcatctgtacccaatggttcagctcgaagcagggctccatgagccttcctctatcagtgactgattgttgacagggccacattttgtgactactcagtttacattaacttcaaacgctgtgagttcatcacacagcaatggctgtgttgtgcctagaagatgacatttcacagcccttctccctttccttggctctcaccttctttgaccgtttatctggggtgtttcctgggctttagaggaggtggcataaatgtcctgaacaaccgtgcatctccatattaatggtcattcatagtaaagagagccttctttgactaaagctgagaatactatttgtctatgaatataaacacaagtgtatagaaggcattttaacattatgcatgacactttaactaaacaacagtagtaagtctcttctcccatgccaggacctcgatttccctactatgttttttttgtttgttttggtaaactgggtttgtatgaccaggcatggcaggcatgggttccctcttgtgaagtgggccttttacattttatttatttattctcctccccgtctctccctctgtgtacactaaggaacatgtgtggaggtcacaggaccacgtgggggaatggaagagtcagttctctccttcaaccatgtgagtcccgggatcagactcaggtcatcaggattggagtcaagcacctttatctacagaatcatctcacgggcccttgactttcttgaaatcaaaagaaaggtggataaacatctttccacctttatgtaagttctggacattgaaatcaggctgtcaagcttgcatgacaagtgcttttacccattgaggtggcttgaaaatgcttggcccagggagtggtactatttggaggtatagccttgttggagtaggtgtggccttgatggaggaagtgtgtcactgtgggcatgggctttaagaccctcctcctaaccacatgtgagccagtcttctcctagcagccttcagatgaagatgtagaactcttagctgctcctgcaccatgcctgcctggacgctgccattcaccaaccttggtaataatggactgaacctctgaagttataagctagctccaattaaattttgtcctttataagagttgccttggtcatggtgtctcttcatagcagtaaaactctaaggcatccactgagccgtatcactagctcacttttatttttgagtctggcttataaaatgatcagaagcatccttttactatgagctagcatattcttgctctgaggccttttttttttctaattctttgtttaaattttcttttctttttttattggatattttatgtatttacatttcaaatcactctgaggccctttgaaatgctcattccctgggcttaacatccccttccccatctacctgcttcttcatatctccctggatttttctgctctttacctgtcttgaaggctcaaaatgtgaaattggtagtaaacttcacattatccttttattctccaggccttaatattctcatttacaaagtgaaagaatcgaatttgatcgtatcacttttccaaacgtagttaataagattatccttgttgaataaagcatgtataaattcatctctcttggcccttagtcttgtgaagatcatatgccccagtacaggcgaatgccagggccaggaagtgggagtgggtgggttggggagcagggtggagggagggtataggggaatttcgggatagcatttgaaatgtaaataaagaaaatatctattaaaaattcatctctcttaattgttggcaaaattgtttcattctgatatagattttaatagaatttatatttgggggatgcatgcatatgaacaaccaacaggattagaggtaggtattattatgaacgcactcctggaaatccttttgctaagtacataggtatagctgtgatatccctgtgtatgactgagtaatggagatggaatggagatagatataagatcacacatacttttgtgactagaaagaaaagaatgaacaatttctattactgtgaaatagccactttgtgaaactgttaagaagaaaaagggtccttcctgatgagaccccagatgactctgtacttgactgatacttaaaagtctagttcttactggcagactgattttaacagtttcccttcttcgagtgcctccccattggaatttgaacagttctattttcttcataaactattcttagtagggacttgagttccttttctctagctgaagttattccaagtttcactcccttacagaattgtccttctgttcttgaagctttcattcacgtctgatgctttcttttcatccagtaagttaggacacgttttcctttatctgattgtttgggccttgtacaaatcagaaagaaattaataaatagttatgtctaggaaaactattttgctgagaatattttcttggaataagctctcaactctctagactaggctgtcttggatggaactcattatgtatgtatgtatgtatggagacccaggttagtctccagagtgctaggattataacatgaactagctaggattataaacatgtattcagcttgcctagaaatttctaagtataacgatgtaaaaggataaaaaaaatgttaaaggttagtattttgggtgtgatccagaggatcaaacttaatacatttgagaattagctttacctttcgccatctggtaatctctggagttagttgttatagttgtctctggttagagattgttcctctggtgattctgtcagcacacaatatgtactcactgataagtggatattagcccagaaacttagaatactcaagatataagatacaatttgctaaacgcatgaaactcaagaagaacgaagaccaaagtgtggacactttgccccttcttagaattgggaacaaaacacccatggaaggagttacagagacaaagtttggagctgtgacaaaaggatggaccatttagagactgccatatccagggatccatcccataatcagcttccaaacgttgacaccattgcatacactagcaagattttgctgaaaggacccagatagagctgtctcttgttaggctatgccggggcctagcaaacacagaagtggatgctcacagtcagctattggatggatcacagggcccccaatggaggagctagagaaaatacccaaggagctaaagggatctgcaaccctataggtggaacaacattatgaactaaccagtaccccggagctcttgactctagctgcatatgtatcagaagatggcttagtcggccatcactggaaagagaggcccattcatagtgcaaactttatctgcttcagtacaggtgaacgccagggccaagaagtgggagtgggtgggtgggggagtgggtggggaagcgtgtgggggactttttgggatagcattggaaatgtaaataaaataaatacccaatgaaaaaaagaaaaagagaattagctttatattttttggttgcaagcctagccattaaagccgagccatttctccagcccaagaaataattttaaacgaggaggcctattaacatgttatgtgaatttagtagtaaatgacaatttatttacctgaacttttaaatctggcttttatgatttgagtattttttgtaagagtaacttttcttctcctgttgtaattgttgtctgggaggcttactgcctccgtctgctaacctaggcctggtcctggaagcttctagcatctgtacaatctcatctaggcctagaatgtttccagcctttgagactcactgctgaaaaactcacccattctannnnnnnnnnnnnnnnnnnnnnnnnnnnnnnnnnnnnnnnnnnnnnnnnnnnnnnnnnnnnnnnnnnnnnnnnnnnnnnnnnnnnnnnnnnnnnnnnnnnnnnnnnnnnnnnnnnnnnnnnnnnnnnnnnnnnnnnnnnnnnnnnnnnnnnnnnnnnnnnnnnnnnnnnnnnnnnnnnnnnnnnnnnnnnnnnnnnnnnnnnnnnnnnnnnnnnnnnnnnnnnnnnnnnnnnnnnnnnnnnnnnnnnnnnnnnnnnnnnnnnnnnnnnnnnnnnnnnnnnnnnnnnnnnnnnnnnnnnnnnnnnnnnnnnnnnnnnnnnnnnnnnnnnnnnnnnnnnnnnnnnnnnnnnnnnnnnnnnnnnnnnnnnnnnnnnnnnnnnnnnnnnnnnnnnnnnnnnnnnnnnnnnnnnnnnnnnnnnnnnnnnnnnnnnnnnnnnnnnnnnnnnnnnnnnnnnnnnnnnnnnnnnnnnnnnnnnnnnnnnnnnnnnnnnnnnnnnnnnnnnnnnnnnnnnnnnnnnnnnnnnnnnnnnnnnnnnnnnnnnnnnnnnnnnnnnnnnnnnnnnnnnnnnnnnnnnnnnnnnnnnnnnnnnnnnnnnnnnnnnnnnnnnnnnnnnnnnnnnnnnnnnnnnnnnnnnnnnnnnnnnnnnnnnnnnnnnnnnnnnnnnnnnnnnnnnnnnnnnnnnnnnnnnnnnnnnnnnnnnnnnnnnnnnnnnnnnnnnnnnnnnnnnnnnnnnnnnnnnnnnnnnnnnnnnnnnnnnnnnnnnnnnnnnnnnnnnnnnnnnnnnnnnnnnnnnnnnnnnnnnnnnnnnnnnnnnnnnnnnnnnnnnnnnnnnnnnnnnnnnnnnnnnnnnnnnnnnnnnnnnnnnnnnnnnnnnnnnnnnnnnnnnnnnnnnnnnnnnnnnnnnnnnnnnnnnnnnnnnnnnnnnnnnnnnnnnnnnnnnnnnnnnnnnnnnnnnnnnnnnnnnnnnnnggtgtgagggacaagaagtaaggagacaagtaagagcagaaatgacttttgaaagaggaggaagaagcttgtaaggtgccatctctgatatcttgacatggtagagagaacagcctagaagttccattccaaactaagggataaacaagtctgtggagttcctctcaggccgtcgatcgcctctccaaacttaggggaacatattctactataagattgttaatgttgattgttttgatatgtctccctgcacaaatgaataaataatataatgtcttcttaacctttcagtcaagatttttgccttgatacagccttactgataggtgatagtctaccgtaagtagcctgcaattagatacatatttagaatttatattatgtgcattaaaccatatagtaattttttttatttttttaattttgttttttttctaagatttatttatttatatgtaagtacactgtagctgtcttcagacactccagaagagggagtcagatctcattaggatggttgtgagccaccatgtggttgctgggatttgaactccagacctttggaagagcagtctggaagagcagtcgggtgctcttacccactgagccatctcaccagcccccccatatagtaattttactttttgtgtttgtacatttaccctttatgtttgttcaggttttagttcatcttagagtgaataatgcaacttgttctttttccactttatttcccctaatttgatcacagaccccatcagtttttttatagttccccttgtgaacttttgacacatcaaatattctatacattttattctcttagagaaatataaatgtatggtcttaagtgcttgttaaatccttttttcttcatgacatctctccatattgtcaccacaggattcccttactcattcaactatataggatttcttttatccatatcccttgtattattccttaactcttttctctcttattttgatagaacatacccttaagtggcttcccaggaaagcatacatgcagtgttcattttaattataccattgttcaggatgttagtttgagtagtgcatgagtcatttgtttcatcactgtaactaaatacctgacaagaaacaatgtaagagaggagctgtttatttggttctcagtttttgaggatacagtccattgagtggaagacatggaggaattcatggacattagaacatatagttgagactccttacaccatttccagaccaggaaatactgttcaaggagtgggaccaagctataaaaatcttgaggtgtgctcctgtgaccaccttcttgtgagactttacctcctagagtttccaaagcatctcaaaacagtgccaccacctggagaccaagagttcaaacattgaacctttgaggaacatttcattttcaaacacaatattccactcatgatatccacagtttcaaggtcatctcataatataaatgcattcagttcaacttaaagaatcttcatggccttaaaagttacaacactggtccatagtccaaaatttctttttagatggaattcagttttcttttttaacttggagcctctgtaaaataaaaataaaacatgtcatatacatttccaatatacagtgacatacagtaaatattcccattccaaaagggaataatgagtaatatcaaagaatggtcagaccaaagaaaatctagatatatcagtataaacagcaaatcctgaatcttcatgcttggtaacctgagctcactgggttcgtctagcccttcctctctagttcttttgcctacaacacatgtggtatcactgttggactgggtacactttgtgtcttggaatttagttttggcatgttctatgattatgacatctttccaataccttgatcctgatatctctattgcaatgtatgcttaacttccatagttgtacacacagccatcttacaagtgccatggtgggaatcagaccctgctatacattatctgataccagaggttttatgaaatcttggtgcacacttctgtgaccctttaactctgaaatttgcgtgcctacaaaccagcagcatttggataatgccaaagtctatagtctggcttccatagataatagctgcagtggccttcttggatgaacgtagccaaattttcccctacaggtcatctttatttttcctgtagagaaccttgaaggctctgttttaggcattttcctccaaaatgaaagtttttaattgaatatacatgatttccattggagcttttgatgagtagggtcctactctcaaggtgctctttatgttactctcactgcagagtccagatttcactttaatggtgttaaacatttgaataactatagtcacgttccccttgttcttccactctcagctttacttgagtttaaagcaccttccctctccaaacttcacatttctttccatgactttaaccaggtttatcttccttttctcactgaattgcacattttctgtttctttaagcttcacttttttctctttccctataaatcagaatgaatataacaagcaataaacatgccgcagcttgaacattatactgttttaaaattgcttctcccaaataaactagtcagttgcatgttcattcatcctcactaggtttccaggacatggatagaatgcaaacagatttctttttaccagaatgtaatatgaatggccttcagctcaggtatcagtagagcttttctttccctgttgaaaccttgtgagcttagtctttacagtctgtgtgtctactgccattcccatcttatgagcttccatcagaatggcccattaagtccagactactatccaagagctgctctagtccacagtcctagacttttgcatattcctactgagaatatttccagaagttgtaaagcacattctcagggttatcaacagcaacaaccccatttcttgatgttaatatcctatatcggttacttttcgtattgctgtgaccaaatacctgacaaaacccaacttgatagagaacaggtttatttgagctcatggctttagaaggttcaggccattatggtgggaaaggtgtgctgaagtttgtgggtaattggaccttaaccccaccttgagatggaccaagaagtaaagagagttcaggaagtaagactgggctgtaaaatctcaaggcttgaactggtgacctatttcctctctcaagtcttcaggctcccagaacattaccaccagttttagacagtgatccaaaataggagcctgtggaggacatttcacaataaaagtgcaaatatatagccatcacttggaagtaaattttctttagaattttgatacaattgtttcaatgaattctaggttctaaaggcacataaaaactctaaaaggttttgaacatctgttactttgtatgtggcctgccttcctctcccattccctgacaaaaacatgtagatattttctaattctagtatttttgtgataatgtgtcttgtcatacttctgttttcttccattgtgttaggtacgcagtgggcccatttaacttagaagctcaaactgttcatttctggaaaaatttattaaaccatttaattgattccctttttatattttctgtctcttggtagaacttttatttgaatagtaccctactttctgggaaatttcctgagattatctttgaaagtttctattgagctttcactttctgctatcatattttaatttctgagtgctttttaattttctgaatgttctttttttcaatagcttccaattatctcatctttctaaacagcatttcttattgcaactttacttgataattctacttaagatttcatctcacaccctctatttttatcttctcagcatataagatttatagggataaagtttttttttcagctcctgcctctccactagtatttttgtagcaccccaaacagtgcctagtatatagtaatcatttaagtatttctggaattaattttattatgctaataatgtataatttaaagttttctcctagtataagtcaagcctctttgaaatcatttttttctattattatttattctgtactttgtttgaatattttatacagatacctagtaatacttaatcacctgattatatttaagaatgagaggtatgctaatagaatatatgaacaaatggatgggatttgccaaatgtgggcataaataatagaattatgtagcagggtaacattgttggtgatatctatctatcgacctatctatgtatctatctatctatctatctgtatcttctgatctatcttcttggttgatcagatttcttggaaaacattcttttaatttttggatatcattttttgggggactagaagggaagagatttgaaaaagtctcagtatctaaagaatatgcattttcatactaaatggtcttctcaaatttatgtagtaacctattagtattttttttttctaatttttctgagttctaaatttaaagaacatttggacaacttgtttctcttttgcattaatgagttaagagtaaaattagttgtgtctattcaaactgctatatattacaaaaatattagtatatgctcaggtcagacttaatctcacttctgcctcttggtagtaccctcatgtatctggcagaagcaaaagagaagtaaaggacccactacccagacctcaagtattaccacagacaatgagatgagttcaatctcaaaggttaccagccatattaggaaatgaaacacaatgagaatcagcagaagcaataaataggaaatataaagaattcagataacagaattactgagtatatatagtatgttaaaatcagtcaggtgccatggtacatgcatgtaattctagcactttggatactgaagcatgaaaaatggatgctttgaaactgctatatagtatgttcaaggtcagcttgggctatatagaaagattgtgtttcaaaaaattatcaaaacagccgggcgtggtggcacaggcctttaattccagcacttgggaggcagaggcaggtggatttctnnnnnnnnnnnnnnnnnnnnnnnnnnnnnnnnnnnnnnnnnnnnnnnnnnnnnnnnnnnnnnnnnnnnnnnnnnnnnnnnnnnnnnnnnnnnnnnnnnnnnnnnnnnnnnnnnnnnnnnnnnnnnnnnnnnnnnnnnnnnnnnnnnnnnnnnnnnnnnnnnnnnnnnnnnnnnnnnnnnnnnnnnnnnnnnnnnnnnnnnnnnnnnnnnnnnnnnnnnnnnnnnnnnnnnnnnnnnnnnnnnnnnnnnnnnnnnnnnnnnnnnnnnnnnnnnnnnnnnnnnnnnnnnnnnnnnnnnnnnnnnnnnnnnnnnnnnnnnnnnnnnnnnnnnnnnnnnnnnnnnnnnnnnnnnnnnnnnnnnnnnnnnnnnnnnnnnnnnnnnnnnnnnnnnnnnnnnnnnnnnnnnnnnnnnnnnnnnnnnnnnnnnnnnnnnnnnnnnnnnnnnnnnnnnnnnnnnnnnnnnnnnnnnnnnnnnnnnnnnnnnnnnnnnnnnnnnnnnnnnnnnnnnnnnnnnnnnnnnnnnnnnnnnnnnnnnnnnnnnnnnnnnnnnnnnnnnnnnnnnnnnnnnnnnnnnnnnnnnnnnnnnnnnnnnnnnnnnnnnnnnnnnnnnnnnnnnnnnnnnnnnnnnnnnnnnnnnnnnnnnnnnnnnnnnnnnnnnnnnnnnnnnnnnnnnnnnnnnnnnnnnnnnnnnnnnnnnnnnnnnnnnnnnnnnnnnnnnnnnnnnnnnnnnnnnnnnnnnnnnnnnnnnnnnnnnnnnnnnnnnnnnnnnnnnnnnnnnnnnnnnnnnnnnnnnnnnnnnnnnnnnnnnnnnnnnnnnnnnnnnnnnnnnnnnnnnnnnnnnnnnnnnnnnnnnnnnnnnnnnnnnnnnnnnnnnnnnnnnnnnnnnnnnnnnnnnnnnnnnnnnnnnnnnnnnnnnnnnnnnnnnnnnnnnnnnnnnnnnnnnnnnnnnnnnnnnnnnnnnnnnnnnnnnnnnnnnnnnnnnnnnnnnnnnnnnnnnnnnnnnnnnnnnnnnnnnnnnnnnnnnnnnnnnnnnnnnnnnnnnnnnnnnnnnnnnnnnnnnnnnnntgagcatccacttctgtgtttgctaggccccggcatagtctcacaagagacagctacatctgggtcctttcaataaaatcttgctagtgtatgcaatggtgtcagcgtttggatgctgattattgggtggatccctggatatggaagtctctacatggaccatcctttcatctcagctaggatatttttaaacactaaatcatcacatgtaaaacttaggagattttaataaaaagtaattacaataaaatttataattctatctcagtataaaaagagaagagcaataaagcaacaatctaagcaaccagtttaaagtaaaacaaggcaaggccaaagcatgtcagtgaaagattaatgaaatataaaacaaacacatgatatagaggattgttccattagtcaaagttctctggagttgcagaacttacagaatgaatctctttgtgtatatatagaacatgatttattagaatgacttaaaggctgtagtctagctaatataacaatggctgcctacgaacagaaattctaagaatccagtagttgctcagtccacgaggctggaagtcttagctggttttcagtagatgctggaatccggaagaagtaacctctaatgccagtgaagaaatgaacttgctagcgaagtgagggtaaacaggcaaagagcaagagcttccttctcccaaatccttagataggcttccagcagaaggctagaccacaataaaggtgatttgtcctttctcaaggtttggattaaaggtgtgtcttcctatctcaaagattggataggaagtggatcttcctccttcaaattaagcacacaaaccaaaccaaccaaccaaccaaacaccttccagatgtctctgatggaaagtttaaacttgatagttgagaaaacatttcttactctctacaacctgttccagaaaaataaggaataggaggatgctttccagctacatcaagtgtaaccaagggtcatatgggaaaggaaaatcatgactgtcagtgtcacctctgaatatggttgcaaaatatcctaaacaaaatattatccaattttacctaggagatagaaaaatctgagcaatttgaattaggtcttgctttcatgttagaaaattcataatgccatttagcacattatcacattataaaaaattacattatcatatgagtggatacaattgcagtgctagttaaaattcactatcaggttgtcatagaaaaaatcaaaataagaatagatgggaattttcataatttctcatactgtgtgtgtgtatgcgagcgcacacaagtgcgtaattgagacaaggtctcattatcagtatcccagactggcgtcagacttgtgatacttctcttgcctcagatcctgagtgctgggattacaagtatgtatccttgttcattttaggattacattgtgaataatctcaatttttacaactcaaaatttgggccaattttcagtgaaaccaattaataaaattgattaatgatttttttggaaaacagcatattcagacctggatctggatttatgtcatttttctacgccaagatagcaagtggaatcagccatagggctcccctattttctgtttcctctctctcagggatcaccatcttgcctaattttcttgtgattccaaaactcttcctacgtgttttgtcccagtatcatggaaattgttgtttcatttgtttttctaggtttgattgcttcagctgggtgaaggatatgtgttctttcatacttcatcttggcgggaagttgagtcaatgtatttaaatggcttaatcatttcttgagcagtcttctttgataactgcactgtttattgcttggcattttctttagaaagcgtacaaattttgcttgtctatttgttttgttttaaaagtaactggtggtaatgtaaaggcctagcccatgaggattttaagggctctgcgataggtcatcctcatggctgtaaaccttcctacccaccctgttaagttatgacccactgatttgttttcaaaattgtaatgaagagcagatcccaggtggacacacttggtggtactgtatccaggcactagccaaaaataaacatttctgtgacattattctgagttacatctatagaaagctccaagctccatcttttggcttgtctgatcaagaaaggcaaaattcatttgaaagtacaagaatatttatgctcttgatatactatgataatttctttttaacaatataatacttttattaattctatgattatattcgatgtgttttgatcaaatttaatcccactcttccctgatctatctcactcccccaacttcacataccccctctttttaataacccggtgagtttaatgtgtgttgcccaaatgtttttgggtgtgggggcatctactggagcatggtggacctaccaatagtcatatattaaggaaaataggctctctgccctctagaagccatataggattgtcaattgctcttcatgaccttcttcctcccccatgctggaatgttgactggcttaggcttgtgcagtcctgtgcagcaaccagagctgctgctgtgttcctgagtgcagctaccctgttgtgtctagaagatacagttttgtctcagtcctccccaacctctggctcttacagtcttttctgtcctctcttccatgatggtgcctgagccttgtagggggctcttgtttttaaggtacagaacattgtctaatattagcacatttatcacagacttgtgaataaactatgtacagttatatagatctggtgttttcagagtagtctataaagaatgtggtttaatttgacactgtatggttctaaacttatttcgtgtgtgtgatcatggattctaattataattccataccaggtgtttgtttgcattgttaagttagaatttggatggtcttcctttcctcagcgaaggaattttctgtatctcataaaattaaagaaaatgctacacttcaactttctttcaaaagatccttctaatgtggccagattattttagaatcatatttagttatccttgccagtaacaataggagagaagaaaagaaagaaatctttggaatcagtaaagccaattgatcatttttggtttcttcttgtgctggtcaatccatttcttcctaggtggtagagctgctgagtccaggcccctcttcactgcagcctacgcaccgagctgatgagcaatagtgactggaagctagtgagaaatacgagaaccaaaaggagattctttctggcctgagttatttgaatctggcttatttgaaaatgagcaaataacaacagaataaagacttgaccacattttccatgtgaaatccagtcttttgctaaaaaaaaaaaaagttttccttattttttatcctgtcttaatcttcaccaccttcataaatacttgaattttgggtaccatgaagatgaaaaagtgattggaaataacacacattctttttttattggaatatattcattgtatgttatatgacaattttattctttcaagtatattatgtgctttgactatttgcccctcccattttttcccattggtccccttccctttcatcccttgtggtaggtctgttctctttagtgtcctttctactttcatggctttatgtaactatatataatgtaggatccgtaaatgagaaaaaaacacatgctatttttcttcccgagtctggcttattcacttaatattatgatctttgtttgtacacatttttcagcatataatttcatttttctctattattaaataagactccattatatatatatatatatatatatatatatatacacacattcacacattataatataattttgccattgtgaatagtataggcatttatatagaaaaattaagccttcaaagggatttaataaacacagacatgttaaatgccatcaacattattagttgaatacattttttcatctttttatggaaaggtggtaattaacagtattcttttttttttttttttttagctgctaactcaggattgttacccccaccaccggcacttcctccgagaccgtgtccaacacaggtaggtgacatatttgatttctgcaaactgttgtccttccaatatggtactttgcattggagtctccaactaatttctggattaagaaaatagcagttcatctctcctaactcaggaatgacttccacttcctcatgtggaaaagggagtttcttttgttagctaacagttacactttcagttctggctcttaagagctgtgtgtggtttttctacacaaagagaagtagacggtgtatctgtaattggggtcaggggacacaggtgttctgtatacatgcagcccgagtagccatatgtttagtggcagtgtaggagatgtgttacttccacatatactgaaaatcagtgagtgttagcccatgctgtggcttgggcccataatacttttcttaaggatgccctttccactcagattaataaactgaaagctggaaagggagagtgtgtattcagaatctgttttccctgtcagttcactgtgccacctttgtctgtgtgctaccatggccttccccatccagatttggaaatgagagggagcagcaaacccatggggtggtatacataatgctgtaggtcacttctagctgctggtgaaaaatgttgggagatggccatggagagtcgaggtttctattttgttgctctgtgtggaacaggccacacttttccatgtcatgagtctcaggatcagtcttggaaaccatttggatagcctttcttcagacaatttctctagcaactatgcaaccaggagatacaaatactgtgaggctttttacttcagtctgaagggtaataaagagcctagttcttcctgatctgcatataaacaagtgaagactcctcttctagaatttggcactggctttaagagaaattgatctgttaagaagtggtaattgagtccttgctacttgtctaatgtcaaaccttagttttagcccaagtgtttcctttgttataatatgttttccttcaaaattagctatgttaattgagcatctgcatcagggcaggcattgcactagtcacttttaatgcagaattttatctccccaaactattatgaagtaggtgctaatattattctttgtctaattggcaaggaacatagcagttttaagcaagttaccaaggggccatacctagtaaatagtagagcccttcccaaactgaagtgtttacgccctctttctctcaatcctgggagtttaagtatctaaatgtacatcaagacgggtggtagatctgtcgtgctcacttgtaactgagactttctccacagcctcttgcagaaggcacagagaaattgagactcccactctgtatctacagcaaacctggacttggtcacaatagcattcattagtaagcattctgggatgcttatctggagagcactgctgctactagctgtccttatctgagctgcttgcccagagcatcttgcctgcttgggagttaatgacagagaatttgacagggagaactgggaattctcaagcttatattaatgaataagtctgctctgttgtttaccagattcctagaaagacataagtgctgagctgggcattaagctccaatttccagatttcagactacaggaccaggtgtgtaaggaatgtaggcagaaaatccccagaccacttccctcctcttacttccctttgttcactgtaaatgggacacatctatataatacataaagtcctgggtaataaacatgtggttgtatttaattttgtgccatgccaaactagaaacagctaaatagccatgtgcatgtgacatcagagtgtttccaaagctacctgggatgaaacaatctgggagacattaataggggtttgtgataaaatgaatttgcaagaagctttacctaactccttcaggagattgacagtgcacaccaacccaccaaaggctttgaagtcctataataaaacacaaaacaaaggtcagttttgtaaaagctgacaagttcctagcttttttgaccttctttttatatcgaaaacacttatttctgttgtaaggacttagtggttaggaaacactgaaacatccacattaaagtcctgccttgaatgttgccaaattgctctcatctgctacctcatttgtatattacgtgattaaagttgccttctacatattacatgaataccctcccttgaagaatttaaagtgaaagctgatcgcttgtgctttggctgggattttcaaattgtcccagttttcagtttgtttcattttcttcctcatgaatctgctccttcttgttcactctctcatgagatcatttttatcgatgcatagcagattttattatagagaacttaaacatttctgaatgctgcttttgctctattaaatggttttgatttttttttttttttgctgtatatggaccatcaatctgaccttgactatggaaatatatccatagaggcttttctgaggtttacattgtagtaacaccaccagacacctagagaagaaactaacgagtctggtgtaatttaaatgattccacttattagtagctctaaatgagatttaaaaattcctaattctttggatttaaaaattctatgttatataatatgagtaagacaagattgtagtaaacaggacaatgttttattttctacaaaggagtactatctttaaaagcatgtaacaaaccaatagtgaaatgcttccacatacaagaaaagtatacctagggctggggatggagctcaggagtggagcgcttggttagcatatacagacgtcatagattatgtccacagcactgaaaaaccaaaaccaaaacagtttttcagcataagatgctatttatttggcttgtcttataccaagtaccacagtgatatgaacatcaaagaaacaaatattgtattgtatttttctcagtataggtaagatataggagtgctaagtaaagaaagaatcaggtattttggtttctcattttctagaaaccagggtgtggctcactccagaggaggtgatctaattttatttcatatttaatcaaattattcatagcataagcaaccaaaaggcaattagactaagccatttcacatagaacagtggtaagtaagagtttaaatgttttagatcacatataaaataagggaaacaccatccacagagtttgcatttgccttataagtcaacactctgctaagggttttgtttttaaccttaaggatgacctgatgcttcaatagcttaagttccttcactaggattctcttatttatttatttatttatttatttatttatttattttagtgaataggaccaccagaaataatttaaatggagaataactacatattttaataatgtctcattattagactgaataaattacccataatattatatacatggtattcaggatgtgatacaaacctttcttttcttttatttgtatttctaaaattttttattagatattgtactggctagttttgtgtcaacttgacacagctggagttatcacagagaaaggagcttcagttgaggaaatgcctccatgagatccagctgtaaggcattttctcaattagtgatcaagggggaaaggccccttgtgggtgggaccatctctgggctggtagtcttggttctataagagagcaggctgagcaagtatcaagccagtaaggaacatctctccatggcctctgcatcagctcctgcttcctgacctgtttgagttccaatcctgacttccttggtgatgaacagcaatgtggaaagtgtaagccgaataaaccctttcctccccaacttgcttcttggtcatgatgtttgtgcaggaatagaaaccctgactaagacagatattttctttatttgcatttcaaattttatcccctttcctcatttccccttcaaaaaacccccatatcctatcccctacccctgctcactaacccacccactcttgcttccctgtcctggcatttccctacactggggcatcgagccttcaccaagggcctctcctctcattgttgtcccacaaggccatcctctgctacatatgcagctggagccttgagtctctccatgtgtattctttggttggtggtttagtccctggggtactggttggttcatattgttgtttctcctatggggatgcaaaccccttcagctccttgggtactttctctagcttctccattggggaccctgtgctcagtccaatgaatggctgtgagcatccacttctgtacttgtctggcactggcagagactctcaggagacagctatatcaggctcctgttagcaagcacttgttggcatcttcaatagtgtctgggattgataactgtatatggggtggattccccaggtggaacagtctatggatggcctttccttcagtttctgctccaaacattgtctctgttatctcctcccatgggtattttgatcccccttctaagaaggaccgaagtatccacactgtggtctcccttctacttgagcttcatgtggtctgtgaattgtatcttgggtattccgaacttctgggctaatatccacttatcagtgagtgcataccatgtgtgttcttttgccactgggttacctcactcaggatatttcctagttccatccatttgtctaagaatttcatgaattcatcatttttaatagctgagtagtagtccattgtgtaaatgtaccacattttctgtatccattcctatgttggaggacatctaggttattttcagcttcttgctactgtaaataaggctgctatgaacatagtgaagcatgtgtccttattacatgttggagcatattctgggtatatgcccaggattggtatagctgggtcctcaggtaatactatgtccagttttttgaggaactgccaaactgatttccagagtggttgtaccagcttgcaatcccaccagcaacagaggagtgttcccctttctccacatcctcgacagcatttgctgtcatctgagtttttgatcttagccattctgacaggtgtgaggtagaatcttatgtttgttttgatttgcattttcctgatgattaaggatgttgaacatttctttaggtgcttctcagccattcagtattcctcagttgagaattatttgtttagctctgtgtcccattttcaatagggttatttggttctctggagcctaacttcttgagttcttattggatattagccctctattggatgtagggttggtaaagatcttttcccaatctgttggttgccattttgttctattgacagtgtcctttgcctacagaagctttgcaattttatgaggtcccatttgtcaattcttgatcttagagcataagctattgatgttcttctgtccaggaaaatttccccagtgcccatgtgctccaggctcttccccactttcttttctattagtttcagtgtatctggttttatgtggaggtccttgatccacttggacttgagttttgtataaggagataaaaatggatcattttgcattcttctacatgataactgccagttgaagcagcaccatttgttgacaatgctgtctttttttccactggatggttttagatcccttgtcaaagatcaagtgaccataggtatgtgggttcatttctgggtcttcaattctattttattgatcttcttgcctgtcactgtaccagtaccatgcagtttttatcacaattgctctgtagtacaggttcaggtcagggatggtgattccaccaaaggttcttttgttgtcaagaataggttttgctatcctgtttttttttgttattccagatgaatttgcaaattgctctttctaactctatgaagaattgatttggtattttgatggcgatcacattaaatctgtagattgcttttggcaagatagccatttttactatattaannnnnnnnnnnnnnnnnnnnnnnnnnnnnnnnnnnnnnnnnnnnnnnnnnnnnnnnnnnnnnnnnnnnnnnnnnnnnnnnnnnnnnnnnnnnnnnnnnnnnnnnnnnnnnnnnnnnnnnnnnnnnnnnnnnnnnnnnnnnnnnnnnnnnnnnnnnnnnnnnnnnnnnnnnnnnnnnnnnnnnnnnnnnnnnnnnnnnnnnnnnnnnnnnnnnnnnnnnnnnnnnnnnnnnnnnnnnnnnnnnnnnnnnnnnnnnnnnnnnnnnnnnnnnnnnnnnnnnnnnnnnnnnnnnnnnnnnnnnnnnnnnnnnnnnnnnnnnnnnnnnnnnnnnnnnnnnnnnnnnnnnnnnnnnnnnnnnnnnnnnnnnnnnnnnnnnnnnnnnnnnnnnnnnnnnnnnnnnnnnnnnnnnnnnnnnnnnnnnnnnnnnnnnnnnnnnnnnnnnnnnnnnnnnnnnnnnnnnnnnnnnnnnnnnnnnnnnnnnnnnnnnnnnnnnnnnnnnnnnnnnnnnnnnnnnnnnnnnnnnnnnnnnnnnnnnnnnnnnnnnnnnnnnnnnnnnnnnnnnnnnnnnnnnnnnnnnnnnnnnnnnnnnnnnnnnnnnnnnnnnnnnnnnnnnnnnnnnnnnnnnnnnnnnnnnnnnnnnnnnnnnnnnnnnnnnnnnnnnnnnnnnnnnnnnnnntttgtgttgtttaggtatcagagtaattgtggcttcatagaaacaaattggttagtgtttactctgtttctagtctgtggaataatttgaagagcattggtattaggttttctttgaaggtctgagagaactctgcactaaacccatctggtcctcagctttatttttggttgggagactattaatgactgcttctatttctttaggggttatgggactgtttagataatttatctgatctggatttaactttggtacctgttatcggtctagagaattgtccatttcattcagattttttagttttgtcgaatataggcttttgtagtaggatctgatgatatatttttttgtatttccccagtttctgttttgtgtctcccttttcatttctgattttgttgttgttgttgttgttgttgatttggatactgtctctatgtcctctagttaggctaagggtttatctatcttgttgattttctcaaaaaaccagctcctggtttggttgattttttttgtatagtttttttttttgtttcttcttggttgatttgagccatgagtttgattatttcctgctgtctactcctcttgggtgaatttgcttacttttgttctagagcattcaggtgtgctgtcaagctgctagtgtatgctctttccagtttctttttggaggcactcagagctatgagttttcttcttagccccactttcattgtgtcccataagtttgagtatattgtggcttcattttcattaaactctaaaaagtctttaattcctttctttatttcttccttgaccaagttatcattgagtagagtgttgttcagcttcctcgtgtatgtgggctttctattatttatgttgttattgaagatcagccttagttgtctgatagaatgcatgagattatgtttgattgtcttttcctgtaactctttaagggatttttgtgtttcctctttaagggcttctagctatttatctgtgttctcctgtatttctttaatgagttatttgtgtccttcttaaggtcctctatcatcatcatgagaagtgattttagatctgaatcttgtttttccggtgtgatggggtatccaggagttgctatggtgagagaattttttgggttctgatgatgccaagtagccttggtttctgttggtaaggttcttgcacttggctttcaccatctggttatctctggtgttagtcggtcttgctgtctctggcttgagcttgtccctcctgtgggcctgtaagcctgggagacctgcggaatagccctagctcctgggtgcagatggaggctggaaggaccctgtcccagctgctccactgctcctgcggcttgtgtattcctggctggactagtatattttcatggcaaatttcttatggcaattgtgataaagccatgcattcacatgaccatgtttaataaggaaaaaaatggatgtgtatgtcaaatactatcctttaagttttgtatcagtattttagttgatgaattagggattcctctctcagagcaaatgctcctcatggcaccagaagtgaaggcagggaaaaagctgccatcttaatcttttttatctctagactaagaaacttaggcagtaaggaaggtgaacagtgaggtgacttttaaagtaacaggagaacctttctgtttaagatgtttgaaggatacagagctctactgtacaggaaaatcctaatgtaagaaacagctgtgcaggaggtcctgagacatacatacatacatacatacatacatacatacatacatacatagatgtgtgtctgtgtatttgctcttgtgacttctgtctcacagtgaaaacccagttttagaactatattttatcattaattatgtatatctatatgtgggtttgatcaagttcccacaacgtcaagaacagggtgagggatcatctagagctggagttattggagactgagctgccatgtgtatgctgggacctaaacttggatcctctgcaagaatagtacacagtcttaaccactgagccattcaactttcctgcctataaaatccagttataaaaacttagttatcttaatccagacctgctatttcagaatcagtagctgctttgaaggcatagtaaccattaagtatgattaagattgaaatacagctgttaggttagttagaaagctaagtaaacatccagcttgttcagctacaattatgaaagaccaaggtatattttatagtgatacagtacactggagttagttacctgcactggatgactgagataatgtaaagaatccaggcatccttagacaattttctgttgtcttttcttcctagttagagattggtgggtatgtggggtgacaccgccagcagcaattataatgttgatgagaatctaattattcatctccacaaacatcaagttgtgagtgatatgtggcaatacactttacttttaagtctgctggaacatttcctgccagtgtgattatatttgtggagttactccaggatggctgtgctgtgctcagcagcagttgcacccacgcatccatgggcgcttgtcagaaatttcagatgttcttgaagaccgcccacagagagctgcaggctggcaggctgcaagcaggaaaccacctttgtcttgggcttttcagagtccttctcagccgcaccattagccatttcaagttctgccaaagctggaacaagacagagaaaaggctagtcagatacacagcgagacaccactgcctactccttcattttaccactcttcaaattgacgtatttatcagctttcaaaagtacattccactgcttaatttttagtcttcaacacataaattaatatgtattaatatctatcttttattcaataatgcaaaaggaggattttcactatctctgggagcaatgtcatcccaagtgacatagcttcatctaaaccacacacacacacacacacacacacacacacacagagtatgtatatgcacagacatatgcttatatgtaaaataggtgattttaaataaacatgagattatatgattccttaaggcttttaaaaacatccttagtgttatttatcccactcccacgtcctcctccccagataaggcccttacctcacctttttctcatttcctccttcttagcactagtattctactattccctccatagatctcctccccacctcagtgttcctttttactttctttgtagctgtagttactctgtgttatatattcacatccaaaaatttggaattaagattcacaagtaagagggaatataccgtgtttgacttttgatctgggttatctcattaagtacaatgttttatagattctcaaagcagtattctgaggggtaacagcaataaggctattactgttattcttggttgcctcccagagactgaaggtaaaattctattgctgaagacactatttactttgaatatagaacttagaggaattgagctggttctgacccagaagcctcctccctggagactagcattcctagtaatagaaactgccaaggggatcagtagtctgatccatttgtaatgcggatggagcacaacaaaggcaaatggcaggatataatagtggcattatttcctgggggtagccaacagcagtctaattggatataatgccttctcggtagaagggaaatcatgcctgacactgtgaacctagccagtggttgatgaggccacagaacctagagatcctactacttcaacatacctaaaccagtataattttaactacattctaagaacttaccctttcaaaggaacttttttttttttcagcagagaccattatgggaagccatactggtcaaatgtagagaacaacttactgtgtgatgtctagtccaaatacatctatagtacaacctcccacactaattaaggctggggtgacagtgcggaagggggagaaggaagattgtaagagccagaagaccaggatatcggcttcatggtagtattttctagatatggcagggaagctatacccttgaaatctcaccaatgtgtctgcctaaacaagacctgaaaaatgataacaccagtagacatgccaacatgccgccatgggtggggaaatctcacatggccctattcctatataaagtactatagtaatgactccggggggtgggggggggagaaagagagagagagagagagagagagagagagagagagagagagagagagagagagaggaatggagggagacagagacacagagatattcattgattgattcagtcttctccagggacaagcctcctaatagattatccagtcccaagtgtttggccctaaacacagggacacatgagcaacactaaagggactcagcagattgtatttataannnnnnnnnnnnnnnnnnnnnnnnnnnnnnnnnnnnnnnnnnnnnnnnnnnnnnnnnnnnnnnnnnnnntgtaaaataatgattaaagaatcagaagccctgggtttgaaaattagttggcaggggaggagttagagggagaagaggaagagagaatgttacatatgaaactgaaaattttaaaagagcgatcttttatttatgagaaactacttaaattattctgaagcgaatttacaaaatttgttacctaagatgccacttttcattttcttcccaagtgtgactgttttgtgctgcaatgtaggccagcactatgttaatgagaacttcagtgatcagagaagatggaaaacaaggatttatctttatctaggatgatgctgaacaactctgttaacagtctactgtgtaactcattgaccttggaagaactgtgtaaattatgcccttggacctatttctttttctgcaaaatcagttgattcagggaggtgggtcctagtatggaggcctctgagtctgcatactaaattgcattcaaaatgtagatgagaagtcatcaagcacagttgaggacaaaatggcttgagctgggttttccttctctcatcgctctgtgcaccgacatgctgtaagaaaatcagatctttcgtgctctgttaagcgtttggtagtatagcgtgtaggaattggtagaagcttaaagtagctggtgtggcaggaaaaatgcagttttaagaaaaatatcttttgtaatcaaggattgaagataacagggggaaagcctcctggcttatcctctagataagatgtctagaattttaaaacatcatttggaactttgccagaacaaaatgactgttgggagccactttaagagagcatgctcccagaaatggagacattgagtaatcacctagttgcagtaattctagcagttgttatgttcaaataaacaatttagagaaacaggttacctagttgttatccacttctctggataggcaaacacttagcaccctcactcttaaatgctcgctcgtttttctatggtcacaattgtagactgtaggttattctccctctccatttaaagtacatcaagtccttattatgtgccatttcttgggctactgtttttttttctagtttaggttcctttggagtgactttgctttttcttcaggggaacttgaaaaactgtactctcaatgttgtttcaacgtcactgtgatatgactagtcatagatttaaatttatgccaggtgacagtgtacattttccatctgaaaaatcatgtgtttaattttagaacaccctgagccatatctccatgggttttgcttatttttctgtttattacttcctgaatgccacttggttacatctttcaacacatctattatttctagtaatgggctggctccaggtgaaatgaccattttctgacttaatactgcatactgcataactgtgtatagtcaaaaaatttaaaaaagatttatttttttttaaataatgtgtatgagtgtctgtgtggagctatatacaagtaaataaattcagtagcctttagaggccagaagagggcatcagattccccaggggctggaggtataggagcctataaaacaccagatagcaacctgtgcttttatttttctttcacaagttacttacttttatctgggagagttgtaggcagaactgtgcattttaaatttgtttctgttttaacttttatcatgagtgaaatgagctttgttttttgctaatcatctttgtgttaatattaggttttgtctcttctgcttttgattgccttgcagttttttattttcagttttgagtttaaatttcctttttagttaattatttaactagctaattaattaattaattaattaattaattttttacaccctaattgttgttccccttcccggtcatcccctcccacaatccttctcccattttccccctgtccttttcctttgagagagtagggccccctgggtattcctccaaccctgctgcatcaagtctccgtagggttagctgcatcctcttccactgaggccagacaaggcagccctgcacagacaggcaacagctttagggacagcacctgttccagttgttgggctacccacatggaagactcagctacatgtctgctacatatgtgccagggggcctaagtccagcttgtgtatgttatttggttggtgatgaagtctctgagagcccccaagggtccgggctagttgactgtgttggtcttcctgtggagttcctaaccccttcagggcctccagtccttccttctattcttccatgagagtccctgacctcagcccaatgttctcagttctctgagcgctttctttctagcacttcagggctatcacaaacccatacctgtggccttcaatgcacagccagttcttagacttcaggtataacacctttatctggtgtgaatatcaagagttctcaaagatggtcccagatggtggcttatcccaataccatgctatgatattagacgaatggtctttcatttatgacaagattctgacctgtttagatttatttttagaatgcttatattaggctacaggggcctcaacacatttagcacaaacctgtcatgtgataaagaaatgagtatctcatgcaatttatattattgtactgaaagtgaaaagcataatggttgccggaatgtttttgcccacttataaagttgacaattcctaacttaagccattgttaagtcagggactgtatatttgtttaccaattgtattcctaagtgcacagctgagcactttctgtatcccagttttgtagtactataggcactaaagaaccactgtagcctctggcctcaagggatgaacttggtaccacttccctgccatacacggagtgttttattttattattattgtgtgtatggtatgtttgtgtgcatgtgtgcaggtgtgtgtgagtgtgtgtgtgtgtgtgtgtgtgtgtgtgtgtgtgaatatgagtagatataagccatggtgtgtgtgtctgggggtggggtattggttctgctcttcctccataggttttattcagtaagtgaactcagctcatcagccttctaccgactgaaccatcatcttgttgaccactcaaggcattttaatccatgtcattgtgctaaacacaaatgtgaggctacttagccacatcaaaaaccttagtttggcttaccaagctgtgacttagctaatagaagtcgtttgcttgctctttcctgagtatgtcctaagtctacttaatgtgaacaccttcatgttcaggtctttgtgtgtcatttcgttgtaattttaccacaaaggaagttggggtttagcaattagaagtgagccccttacagcctcgtaggtcattggtgacagaggcttctcctgtccagagaaagtgttagaaattttatgatgaatgtttagatggggagaaaataatttgctttatgtcaccaattaactgttaatcaaaaggtgacaagaatttccagtacctgctgctactggccattttccaaatgtgaagttttttttaaccttcatctagaatgcttacagtgccttcactagtgcttataacaccatcctgccccctccaaagcctctaatgctggtctgtactccatatttattgtagcaaaaggatacctgtaacctttattgtgctttccaacaggaacaaaaagatgcaacttttgtatgataaagaaatctctttttgtgtactgtagaactgtttttgagatgcctacgaaccatagagaacatggaaacttccttagtgctatacaaatgctaactcatttgatccttctaatgggtgtggctcattttgaagataagtaaactaggagagaactcaggaaattatgcaaggtcactcagagaaggactgtcacaaagctgtgattctaagtgtgctgcctaccccaagtaccagcttcactgtgatgctataatgtatgaattagatatttttctgttgctgtgataaaataccctgacaagaagcaacttagggaagaaagggtttattttagcttatgattccagagggttagggtccatagtagtggggaaaggcatggagcagacaggcatagtggcaaaaggaagctgtctgatcatattttcatccatgcagaggaagcagagaggggaagaaggtgggagggaaggagggagggagagagaaagagaccaggaagtggggggcaaggctgaaaaccctcaaagcccactcctatgacatatttcctccagcaaggctcataaccttcctaaatagcctccaactggggactaagtgttcaaatacaggagcctatgtgaggtatttctcattcacaccacttgtgaatctgtgtctcagagctgtttttttacttttaacaaccaaccagacgcatcaagaatatattttatttaaaaaaacactgtaattgaagcaccctaccctactactagtgaccccctcccccattatgcttctgatattgttgtgttgcataaagcttacttttctgacatgctttttcttgtcactcccatctgtttgtgtagtaacttcatcaagctttaatggaatggactgactatagtgccatactttgctaagannnnnnnnnnnnnnnnnnnnttgtgtactttctcatggtacctttctgtaactattctattctatgtgtctcatttaaacccagtgcttcactgagaaggactatagacaataggtagtcactattttctttttgagtaacaagatagctcaactttccccatgggggatgagttacagttgctatctaggttcctgaagttcttgtttctcttctcttcagtttccttctttatcaccagatagtgacagaaaacaggaagtagtcctaggtgtactctggctttaatgtgtaatgacagtggaggacagtagggcttgagtcagggattcagcctgagaaagtaactaagaacatgggcttgggctttgaatctatatcttactggcttcgaaactttgggcaaggtacttagtgttttcctgcctcaatttcatcatcttaaaaatgaatatagtaggagtatctgtttttataactgaaagagtaaaaatgaataggtcacttagtgtctgacatatgaccagccatacacagtcattaagagctattataattattattactctatgccaaatgaaacagaaaggatgagatctagttggaaaatacaggaaactcaggatagccagagtggccacaaaccaaggatgagtgctggcatagatcacgtgaccacttgtaatagaattcgtttctttctttctttttaatggtaattggaaagatcagacccagggcttcacacatgctagaccagtcatttacctgtgagccacaagccctttgtttttgtttcgtttttgctttttttgaggcagagtcttgttgtgtagtcgaagcagacctccaacttgtgatcttcttgtctcagcctccgtggtgctgggattacaggtggtagtagcacatgtacattcaaatcactttcttattcatgtctgtgacctaggagcttcactcttgcctgtatcattctcaggtccagatcatcaccagtcaccagtttctactcatactagaaatgggaaggaggagaatctgttggcaagaagcaggtgtaggccatctttcttcaagcttccctcatggagaacacaagtccaaagagacttctaacacaagtgaaactaaggcaaaggagatgaatgcgtgctaagtagggcgtctgtctgtcctttcagtctttgcccctacagtctcccaactcagcgagcatcatctctgtgtgcaggatttgtagatttctttattttcttgaagatttttgtctgaccaagatgcaccatctttcatactttaccagaaaaactcttgataaatatctttattcatctggcagctttaaaggctcgctgtcatgaaaaagtgctagagaaaacaggataaaacaggtgttctcaattccttccaacgtgcatcgccctgctgacaaactactgacatgtcgctatcccctgtttctggaggattctggggaagcctcagttttcggcctttagtgccttggtaatattccagtgtttctaccatgctgatcacaggcagagtgaggagggagtgtgtgtgttatcagcactgataccaacctgctgtgtgctggagtgtcacttgcctctgactccttcctgggggttcttcccagcaggcaacacgagcatccaccccttgggatcacattatctgttttagtttagggtactgtttttaacccaatccctgaacatctgctaaaatgtttttgcagttgttgcttgcggtgaaacttttcttctgtatacgtttagcttatgccactaggtggcactttagggacattgcaggaaattggcacaactggatttatgttttaaagtttttgacatataataaagaaatatcaaaagatctacattgagtgtacaactcaatcaattttgaaaaggagaatacacacatgtaatatacacacaaatcaagaagtggaatataatcaacacttcagaagtatcctccaccccatgctgttttgatatacttatgtccttaggattaacattgttgtgacttctagcagcatagattacctctatgttttctacttgtataagttgagttgtgttctgtttatttttgtctggctgctattgcttaagtgatttttgaaataacatatatgatcattgctgtatagtattctactatatatgcaaatattgtagcttgctcttgttgatggatattgggaagttttcagattttggcaatgaggagtagtgcaactctgtaccaccgtgtctaagctgttgagtggatctatttttattttggagggtataaagcatagaatgttctgggttataaaatgttcatatgtgtatcttcagctttcatagaaactataaacaaatttacaaggtacaataataccttattagtggccctccatttccacttgctcattctcttttttttccagatttatttagttttgactttttgagacaaggtctcagtatgtagttctggctggccaggaactcgctgtgtagatcagactggctttgaactcacaaagatccatctgcatctgcctcctgagtgctaggattaaaggcatgcttcaccatgcccaaccagatctatttattttattttatgtatattgatgtttcttgcattcatgtctgtgcaccagatgtgtgcctggtgcctgcagaggtcagaagaggatactgagttccctggaactagagttatagatagttgtgagctgcctgtgtaggtattagcaggtcctctgccagagcaacaagtattgctaattgctgagctatctcactagccccctcttgcacagtgtcataggtgctaacttattttatagctgcatcccaattcttagatagttttctctcttcttctttttcactttccttttttggagttccttgttggcaagctatttttaactgatattttaaagccatatttctctcatagataaagttcatccagaaaggctttgtcaaccactctttggacatttgtaatagcttgactgtgaactaaaagtagtttgaaaagatactattctactactccatcactcagagacagcaatggggagaagcaaagaagttttttcaagacctcatcatgagatgcctttgaattgcgggcctgtttggacaggcaagaaagagaattgcataaggcatccttattcaacttactcctggggaactcaactctcagaagaagtctgccatagacaactgtgtctctggggagcatactgtgtattctactgtaggtgcgtgatagaatgatgtgtggattcagctcagacctctgtcctgtgaatagaaattgtaaacagaaaaaaacaaacctcagcgatggttaaaagattttgatttgattttacccccaagtaaaacactttccttagttgtatgagcaaatgtgtttcatggatactgtccataatccagtggatttccacagtccccatgaggtttgaccatatgactgctgaactcagggtgtagtttacagttattgatttctgtcactgaactgtgtctgggaatcttggcagtgttttctctggtgtcttccatggattgatgtgctgcgaggaagagggtgcttcagaggtgctcagtgcaaactggctgagtttgaatcaactgtattctcgtaagttctcccaccctgtattgataggaataatatccagtggcacagatctattttgcggatagttcatcacttttactctaaactggagccagcatgttctcgctgttggttttcatctgttctacaagggagaaaatgtcccttgcattgaattggctgctatttacaatgacaggaactatgcctaagagatcaattgtacctttagtcctaattatagcagtttctgccgttattgaacagtcattatgtaattgtgcttagcatcctggatagtctccgtaatcctcatagtgctgtgaattagatagattatcctcattttgtggatgaaaagaattacagtttagagaggtcaagtatgcacctagtaaggccccaaactggatttgactgcatagtatgtacctagtacctgctgtgttctgtgatcacagttgccttttgatcagtgttgagtttgttgctgcctcattccttttgttgattacaacaccccttgcttgatgtaggctatgtacagggtaaatgttgacaaaacaaggcacacattgtgttctcaaggggcttacagttcacttctatttctctattttgcatgtaattgggttgtggattgtaggaagctctggacactggttgtagaacaacagagaactagggtgctgcccgctgttgattctgcatcttttgtctaggtttcatcacatggctttctggtaggaccttgttgagcacagatgtggccaggtgaaaatcaggcactcactgacatttaggattctgagatgatgctgaaaatccccagaaggctgctgcagggttgtccatatatctctctagaatctagcgatctagaatctaggatcttcaggattaaacaaagcttgaatttcattttttttcttttttaaaaagaacttatttttattttatgtgcattggtattttgcctgcatgtatgtctgtgtaagggtgtcagatgttggagttacagacagttgtgagctgccatgtgggtgctgggaattgaacctgggtggtcctctggaggagcagccggtgctcttaaccactgagtcatctctctagccttgtgtttctttttctaacccatgggtatggctattacaaaaatttcaaagtcaccaattattcataccttggcaaagttctgcagttaaacttaaaaaataaaattggacgtttttgtttcaaaatcaaattttaaactaaattttcctgctaatatgcatttatagttttatgacttgctctcccattccatgtgtaagtagctgagcaaacctttcaagattacctgtggctcagtcctgaccagcatctcagagacttgattttctcatctcttaaataaagaatttgatctatcagtaccaaattcttaaataaagggttggtctgggatggctgcataaaaatcacacaggggcttgttaaaatctgtttctaatgttctatccctaggagaactctgatgaggaaagtctacagtactgtcttgatatttgtagtttattaaacttccctagatgattctcttctgtcagctgtatttggaagctactgggctggaagatttggaatgtaactgtgcccagcacaggctctctgtggttgaagtaaactggttatgagtcagttgatggaaaaacctttgcctggtagagggatcatattgtgtgtagcaaacccccatatagtgggggttccactatatagctttgagttaggatgagatacaagctgaattactccacacaggatggaatggtgtggataaaaacctataggcaggggaaaaaaatctgctcaaggttttgcaatagcccaggtgggtaatgtggaacaagaaatggattgtgttggattatgttatttaaaaatctatattttatcaacgtcatagatggtttctaccctgttttaaagctttgtgtgtgtgtgtgtgcacatgtgtacatgtgtgtatgtacatagttttgttgtccatgtagagatcagaggacaattttagggagttgattctctacttctaccatttaggttctgtgaattgtactcaggtcgtaaggctttgtggcaggtacttttacctgctaagccaccttgaaggtctctcttatgttttttaccaaggatggaatgtgggtacctttattggggttactattgctgggatgaaacaccatgactaaaagcaacttggtggggaaatcttgcttgcacttccacattactgtttgtggtggtttgaatgagaatgactcctgtaggctcatatatttgaatgcttggtccccagttggtggaactgtttaggggaggattagaaggtgtggctttgttggaggaggtatatcattttgggtggactttgaggtttcaaaagcctatgctgggtctggtctctttctctttgcaatttgtggatcaggatgtaagctctcagttactgctccaatgtcctgtctgcctgtctgctgccctacttcctgccatgatggtcatggattcaccctctgaaactgtaaactaagcatccaattaaatactttgtttcacagcaatagacactgctcattattgatggaagtcagagcaggaactgggagtcagctggttcagaagccatgaaggaatgctgctttttggcttgttccttatggatttctcagcctcctttctaatagaaatcaagaatactagctcatgtgtgacactacccacaatgggcttggccttctcacatctgtcactaattaagaaaatgccttacagggttacctacagtcctatcttactgaggaatttttttttttcaattagggttccttttgttcagatcattctagcttgcatcaagttgacataaaaactagccagcacatgggccatgatattaaaatcaaatagcatggtcttcattccagtagtacccagttcatgttctgtgttctaaaagtatattccacagagcattccttctgctggatgctaacaggagtaacacaaaaggaaggaaatgaagccagtgagtataggacgtgctatggtcaagcaaaggcaaatggtttcttttccctgcagcatttcagaatgtacaatgtgttctgtgaagcttcaaggaggagatgggtgagacggtgctttccaagctgatctttatatattttccttttatatcacgagggctggcaactatggctcagagccaaatttgtccttcatcattttttttttgtaatactatttcttggagcacaactattcccattcattatattgtctgtggcaaatagaggctgcccatcttccaaacctaaaatatttactgtatgcccctttatggaaaaagcttgcatgtttctgctctagacagttcatggattaatcttctctgtgtagctgcattagagagctactgccccagggaattatgtggcgtttttctagcactatgccgtgatgcacctgcttaattatattcagtttctgtgtgcccataaatttttccctcttgcttggagctattttctctcttagctatttacccatcatcccaggtcaaagctggagatccttatctttgtgtgtttttttttttgttgttgttgtttcacgtaagtatatttcatcagttaccaagcatgtattcagtttctagtctaaatagttctcatcactgcatgttcccattcttgtccacctggcttattttattgtttattttagtttcttaagatagggtctcaatagatagcccaggcagtctttgtccttgcagttcccccgcctcaaatcacaggtgtacatggtttgcataagaatctgctctagtccgggtttcttcttcagcattataatagaattcccttcacttcgtgtgggttgcatctagtcctttccactcactggatggagaataagcttttgaaagtgcataggaaattaggtcactctctacataaaatctgtcagtagatccaacgccctcaggctaagctccaaattcttaacattcacatatatggggctaaggtctggtcaggaaaacgggaagactatgctacttcttagtagaaatgatgtaatttacggagttaggaatgtaccaagaggattagctatttccatgcttctaccagctgcaaggtagggaaaagcatagaagtgggaaatagtatcaaatatgctttaggtggtgcaaggtcatggagccctgccagcattcttctctccatagcctccctccccttacactaccctaaccagatcccaaattctgggacattagagcaccttcaaaaaagaaaacggaaccaactaacatgtgtaactgtctctggatgaggaatttgggagtgttttggttgatggttctgactcacagtctgtcatgaagctatcgtcaagaaatcaaggaaggaaagcaattggggctaaaggttctccactgctaaggtggctactgactggaaacctcacttccttgcttagattccatgttaggactgcttaggtacccttcataacatggtaagtggcttcctgcaggacaagtgatagaagagacagaaaggcccacataaaggcaaaaccaaacacggggcagaggggaggatgtttaagaacacttcaagtcccctcttctgagagcatgttgtgtcctacctcatgtcagcttccctgtaagcagagcccgaggtgaagaatattagaaagtgatttattaagggagtgcttttcgggaaacaaacaaagaaacagaaagaggagatggaagcatgatgaagggaaaagaactgagcctaatctacacagaaagattttagtgcataagttacaactcagctctcctctttgaggcagaggcaggaaacttgcctttatagctatctacaagtgagttactcattatctgtagactgctgggggtgagtttgggaggcaggcttcctccattgagaagatagcagatataagatcttagtagctagcactcagggcagctagctggatgggtgtgtaccatctatgtaaaggtgatctaagcaggacaccatggaacttttgacagctatttgcctccttcctttagctcatacttttaccatggcccctggcataccagaggcaaaaaaaaaaaaatgtctatagctgactaaatgaatgcatagaagcctctctgcggctcttctggtaagtcagataagcaaaggccgtatctcatcagccatgggaatacataaagcaacaggttagtgtttcacatcctgttatctaatgaggctgtttcattgaaaaattagaatgaaaatattttcatttatattagaggaagaggaacattaatattaaaacattgtatagatgtggtcaaaacaagtggttgggaaggtgtaaagccccattagagaaactactgctggtttggtggcttttttgatacatttttattttaagatttatttatttttattttatgtgtattagtgagcacaatactggcattgctggtgcctgtggaggccagaagagggaatcagatcccttggaactggagtcatggatggttatgagccaccatgtgggtactgggacttgaacctgggtcctctacaggagcaaccaagtgctcttggccaccgagacacctcaccaactccgttgcagttgttttattaaatgaacatgatgtgcctgtcatatttcttgctaagacactatgcttatggccatagattagtggtgctgtcacctttgaccaacgaagctacattttgcatggagggatggttaatacagaggcttattaactgttcaaagtgctgaaaataagctactgttatatgtgcagtcctaaatgggacacccttatcaccccctacaaggcttatgaaacatcacagaagagagggtggaaagactgtaagacctggaggaagtggaagactggtgtgagatgctgacttccagacatgacatgctcattgcccttctgaactcacagaatccgaatttgtaattacctgtacaagatcagtatataatcggtcccaacaaaatctggcatggaagggggaggagctcatgaagctccacccctcccttagcatctgtaggcaattaatagtggctacaggagaaagagattttcttcagtgttgtagccactagtaaggtgcctacattcctgtaaacaactctctcgcctgtgcgtttgcaagcaaccctagtgaaactcattgggtcaccaaaaaaatcaaaacccaaaacaacaaaaagacataaataaggaagaactcataagggagaggaaaggatctgtgggaatgagagggggacatgagagtgtgacagaggaaatatgatcaaatatatacatatatatgaaaaatccataatgaaacctgtatgtataattaatataaactaaagatgatgaaataaacatgttatatattatatgttatatatatattatctataaattcatatacatatgtatttcaagcttcagtgacctagctgtctgcatactcactgactgtatgttgttttacatggagtcatgaaggtacgactgctgtttgtaatatcagttataagctaaatggatgcttgtttcattggaattaaaaggtggacttcagtttatacaaccaagacttctgcacaaggccatactgttgacatagtagagtcttccccacctccagtttcttaaatgcacagaggaagaaggaagctcctgaggccctcctgcctttatggatgtgtaaagaaatagcaaaggaaccttcccccactttctgctgccacccagctgctaaacctgatgtgaaatgtgaagcctttgctatttttatgaagggaaatggaatagcttattgtgatgaggcagttttgcatgtctaaatctcaatttctcttaccatagaattagtttttttcttcctgtaccaccttctgacactgcctctccaatttctacattccaacctttgtgagattcatccctttgaatactcagtagatgaacccatttcaaatcagtcctggggtaacaaacatggtagggaggtcctggggtgcttcccaaggacactgttggcaagattctctctctgagctaatattaagcagttgtctgtcttcagccatagggcaataatacccaggtcactacatacaatttcaggaaggtacatttgtaaatggaaaagccttactgctgcctccccggcttcctaccagattgctgcttatttttaggtggctataacaaagtcagtctgctgcttttgctgggctcctaatcctcatttatgttgaaaaggtcagtttgtcgtctccttcagtatttccacgaggaaacttcacccatctccacagggaatcggtggaagatacaacctctgcttgctttgtaatggaagggaactagaaaatcaacaggcagtatacctggaccagctactcctctgctgtgatttgtccctgcacacctgtggtccctgcaggggcctgcatgcatagactcggggccagagcatatacctttagggaataaattgcaagtggcaggtaggaagggacctcagattcaagatggggtcttcaccagaagctctgtatttgagtgggtgggaagctctcagcttctaggaaatgacatttcactcatggatcttggcgggtgattcagaactcccagggacaagggggtgaatgctacactctccagactgttgacaatgtatggctcctggagagcttcactcatacttaacatgcctctaaacaagctctccttattcttccttgtggtggtttgaataagagtggcccccagagactcaaacattaactagggggtagcattaggaggagtggccttgttggaggaagtatgttacctggagtgtactttggagtttcaaatacccagactaggctctctctcttccagttgcctcctgattcagatgtaaaactctaggctccttctccagcaccatgtctgcctgcatgcagccatgcttcctgccatgataataatggactaaactctgaaactgtaagccagacccaattaaatgcttttcttttataagagttgtcatggtcacagagtctcttcagaggaataaaaccctaagacactgctccttctacacttcctgtctgagagactggcctcaatcttctgatattccaggctacagttctgattgtctgagtatatacacgtatcttagctaggatttccattgctgtaacaaaacatcatgaccaaagagcagttggggaagaaagggtttattgggcttatacttttacattgtagtttgtcactgaaggaagtcaggacaggagctaatacagaacaggaacctggaggcagatgctggtgcagaggccatggacagatgctagttactggcttgtttatcatggcttgctcagcctgctttctgatagaacccgtgaccaccagctcagggatggatccacccacagtgggttggccctgtcctatcaatcactaatttaatcagctaactctagtttgtgtgttgaaataagactggccagtacaatagaccttcatgagtttactttggacctacctctctcctcacccacacatgtatctcttgtagctgactgtatactacatctcaatcagacctcagctgcaatgtcacctcctaagtcttaactgtcctacaagaatgagtgctcctataatccccactcctctaccacactacattgaaacatgcatctctgattatttatctacttcttccactggaccaccagatggttgtaagtagagctgatccttgtttctctttgagtgccagcagagctagccagcagtggctgtctgataagtaatgccttgcaggaacaacactgaggcctatgagtgcctgaggctgtattgcaccatggtaacgagcctagctttggaacttgaaaccatggtaacaagcctagctttggaactcaaaacctggcctcagaccctgttgtttgtactgtctttgggtgagtttcttgacttctttaagtttgtcatcagcaggctggggataatccctatttcttaagggtatgatgatgtgatataataatttatgcagaacacttgagaaaggtctgtatgacacatgcatagaattcagtttgtcctggagtctaagcatagcaacagcagcagcatgagtaccacagtcatctctaatggaaggagaagctgtgagaagcaggtggaacttgacatcaagcatgttgaatgcgtgtatctagatgtagaagaggtaggagaggagttgttcaggattaactgtaggaacaagggttggagatactgtataagagtgcttgcctcccaagtgtgaaaccttaggttcaatctccactactgcaaaatgaataaataaagaacttggccagtaaggtggctcagtgggtaaaggtggttgctgacaagcctaccaacctgagcaggatccctgtgacccagatgttgaggaaggagaagtaactcccacaaaaagtcctctttgacctccatacatgtaccatggcacacacgtgcatgcacacacaatacatatattaataaaaaaagagtaagtaagattcaggagcagatggtgttaccctaggaaagaatgaacagggaaaaattgcagcaggggaactaaagacagagaaccccgagacagtctacgtttcaggagtgagaacagtcagagtggaaaagggaaagagaaggactacaacttggagagtgtcacttccccaccacctgagagcaccaggggtgccattttggaagggaggtgaatggggagaatataaaggcagccagagtctgctgctagccttagcttcctaggagccagtctgttcacgggaaagaaggcacactgtaggaggctagagatggccaagcaaggggcagagtggcagttgtttgtgctacaatctgagggttttttttttgtgtgtggtgtgaattagattttggataaatgaaggactggtaccagtacaatgcagaaatcattttgctcctaggtagctggtttttctcatcatgtcaatattttgcatcactggttaatagtaactgaaagcaaagtgctctaccacagctgaaggtacaaagccttggggacatagagagccttatgtaccatttaccctgtgttcctcttggctgtgttctatgtcgtgaagtgcttgggagtatccctcatcagtctttgtgcacttaatagtcagcctttctgattagtcattacatatttccttcccttttaaaggtaaatggctatgtttattagagtacttcaatttttaaaagatttgtgtgtgtgtgtgtgtgtgtgtgtgtgtgtgtgtgtgtgtgtagaagccagaaaagggcatctaatcttatagagctgtgttgtgagctgcctggtgtgggcgctgagagttgaacttcagttctctggaaatgcagcccttaactactgagtcatctctccagcccacatagtgtttctttattaggaatttaatattgaaaattatgggtctattatgaactgattgtttttctcagtattccttaagtcctttcctaaccctttctcgtttagtatttttttatacttttttaaagtgttagtttttttttttttaagaaatctgtatgtgaaaatatatgagatactcacggttccctttcttgatactggaaggagacgtggaagggattagcaaggtctatggtggaagatttttcccaaggataactgcgtatctgtggtgtggtctagaccagtatgacttggtcttcctgagtaactcttttccaaagtgttcttggtcatatgtttacacagttgggttttacatacataccttctctttgatcttgttgcagtctgaaccagtgtctgaagctgatttacactctcagctgaacagagctccttcccaagctgcagaaagcagtccaacaaagatggtaagagcggcaaaaggatgctgcggtggtagcataatgacttacttcttacagaaacttgaaagtttcctccaagatgaatgtgaccgatccacagttctgaagtgtgaattctttctgaagattaggatcctgaaggttctggggctgggctatggatatccctggtagtttgtactctcctcaacgttctaactaagcatggctgccttgcttttgacaagatcaaaaaatgttttggaggagcgggagagatggcttagcattttaagagtgcttactgctcttgcatagctagggcctggattcagttcctagcatccatatatggtggtacactactttctgacatctgtgctcattgtacaagtctggtgcacatacagacaacttgaaattaagtataaaatgtggggagagctgggtgactctggtagcctccatacatctgctaatgaggcagactagtagaggtggtatggctttgcagctttggacttcacttggtttccagtgtgcacacactgctctcctaagagtgcagccagcagccgagaaccctcagttgcatcaagtttcatgcatacctcacttcaaacaatggcacaaattactccgggcttttagtagccatttagtagttacacatttgtggtcaattttctttgaaaaatgcccagaacatatcagggatgagacacggggagcccatttgtcctgaactagttttggatgcatgtgcattaaggcaaactgtatcttctgcatgaagttttaaggaaaaccttctagttaccattttatgtctatacatgcatggttggatgtgcatatgattaaaataagatatatcagaagaaaagacatgcatagtgaggaaaaggcttatataattaaagtctgacaatcaaatagaatcctccacattacacctttcagaaacttgctctttcttctggtccccctaagagaaagccccaaacaatagcccactgatttctgcagtgtatccaatcctatccattaatgagactgacttgttgcctacagaggcagattgttcggtctgttgaaatcaagcatcttgctgctttgccattcatgtgctcgttttgaaattctttgaataagacagcaagaatctggaaccatgtagtttcagacagcaactccaggtaacagggagaccctattagtaccccttgtgctgggtaggacagcctccctttcttggcaccatgatttctttcttttcttgttttgttttgctgtgtctgttggttctctccatcattgtccccaacctgtgtcaggcgccttgcccttgcctgaccaccccattggcccctgctctttcccagctggcactactcactatcgtgctccccacttactttctcacgatccttttggtcttcagtattatcccttagatcactctcttagctaagagacctgaccttgggcttggaaggtgacatggggtcctctaaggaagcaggtcaactgtttccttgaacacactggctttctgtttgacttcatatagggatcaggaatagaaaaatgatgagcatatgactaaggccaagatagactttaaaatatattcttcaaaaaggctcagggtgaggcaagagtcagttttgtcttcaattaagagaccttgtagttttataactacaagagtacttctcaaccttcctaatgctgcgaccctttaatacagttcctcatgttgtggtaacccccaaaccataaaattattccattgctactttataactgtaattttgctactgttataaattgtaatataagtatctgaggtgttgaatatctgatatgtgacttccaaaggggtcacaacccagaggctaagaactgctgttatataaaatctatgtgactttaaatgacgagaaagtatagattgtttacaacattaaaaaagggcaagagtaatatcactagaatcttattttattgtccttcttgataacagcaagggtagtagattcccagtgtattttaaaaagacagacgggtagggtatttgctggaacccattgccatcagccctccaggacttgctgagccaagaatcagctataggtctgtggtgtgtggtttgaatagagacgtcttttgatcttgggcacagaactgtgaatagtggcaagagagatggaaggatcataaaaaaagtttttgagctttttaggtttatttttaatccacaggatgcaccacatgctcagcctccatcaaagcctattcgcaggaaattccgacctgaaaatcaaacaacagaaagccaagagcctgctgctgcagttggaggggcagtttctgcagcaatggtgaagccccatccaacagtacaaaagtaagtggcaaaaagatgagtgaagaatgtggggagtttcctcttacatctgcatgcatatgtatttgttagaaatgtgtttgcatttctgttcctagccacagagtttgatggttgtcatagtcatctcggccttggtgatggtgattgtggtggcattaaaggctcccagtctgatagtagactttatactcctgttagcctgacccagaggagcaggcaagtcctaagcgagtgtttggtttggtttcccatctttctctcttttctttccttcataaccctttttgtgttggtccagattttcctatgaagggggtcagtatggcaaggccattttctctcatttcatgcctgatcttaagttcctttagggcatatggccagctcagcgatcacagaccccattcttggcagaattggggtatgaagtatgatttgaaaacatctttatgtgccagctgggaaagagcaggggccaatggggtggtcaggcaaaagcaaggtgccaagattcgagaaaaaatcctgacacaggtgggggacaaagacagggagaaccaacacacacaaatatggatggaagtgtgatagtagagttcctgttattaattacctcagtactgaatcatgcagtcagatcttccatacctcccttaccatctggaacagatactggaggaattgtggagacaccatggtcaggaccaaagatcgagacactttggacaaaccaccctccttagaaagctgtctttgagatctattctgtagtgacgttaggtgaaatattgaaggcaaaatcccactgctgttgcttgacttgaagtgatccatgctggccagtatcgcaaatgcttgtgctttcttgtgatctttctgtagagggtttcagatctcaggggctctggagccttccttctgccacaccactgtggaaagagcagcaacgggtgcagtacagggagtgattttctgcatcatcgtcaccttcctagccaggagcgtagagttctgtcaggcacaaagatggctatgttttccttcttcatttcagcttcatgttaattccagtcagtcactggtggccacattaccctccaaggtagattgcaggcatctggtgaacttcacacagagagatgttgctttcctcttttgttaaatcagctttgttgaaatataatttgcatagcatacacttaggtggcttttagtatattcacaaaattcatgtgatcattgccacagtgtaattttggaaccttctcttgttatctccaaaagattcaatgcccagtggaagttgttccctaagatctcttccctgcccagctcctggaaaccactaatttaccccctctctgtactttgcttacatttttacattgatacagttatgcattatgtggtcccttgtgtttgactttttacttttgttagtgtttgcaaggttcatccatgttgtagcatgaattagaacttaattttttatgtggaatactattcctgtaattctttaagggatttttgtgtttcctctttaagggcttctagctatttatttgtgttctcctgtatttcttgaagggagttatttatttcctgcttaaagtcctctatcatcatcatgagatgtgattttaaatccaaatcttgcttttctggtgtgttggggtatccaggacttgctatggtgggagaactggattctgatgatgccaagtagccttggtttctgttgcttaggttcttgtgcttgcctcttaccatctggttatctctggtattagttggtcttgctggctctgactggagcttgccccttttgtgggcctgtgagcctgtgatcttaggtgtgtcctggggagaccagctctctccaggcaggatttgggtacggagggctgtggaacagccttagctatggggcgcagatggagatcaaaggatccttcctgtcttcagctgttctgctgttcctgtgccctgtacactcctggctggtccctctttgaacagttattggagcaaaagtggtaatctcacctctgggcttaggagtgagagcactcctgggagactagctctctctgggtgggatttgggtgcagtgagctgtgggacagccttagctctaggctggaatattattctattctattagtgttccacatattattcagtgattcataaatcagacctttgggttatttgacctttttgcatattttaaataaatagtgttatctgtgttcatgtttctgtgtggactttatgtttttgtttttcttgggaatacatatatgggtaaaatttggacttacatggtaatgctgtttaacacattgaagaagtgccagattctttttcccactgaccaaccattccatttttatatcttcagcaatgtctctgaggcttctagttctctacttctttatcaatatttatctaatttctgtaaaaatattttttgagattataatataattgcattacccttcctttcctttcctctctccaaacacttccatgtggcccccgaccttgctctctttcagactcatggcctctttttttcattagctattgttacattcatatagcattcctaaatacataaccacaacctgctaagtctatatggtgttactggtatgtatgtttttagggctgaccacttggtattagataaccaattggtgtgctcttcactgaggaagaccatttctcttgcggcattccttagttgcctgtagttctttgtttagggttgagagcttgtgatcttttctgtgcccatgttagcatgtctattggtattgtcttctttcaggtcatgtttaggcagtcatctattctagtagtgactgtaatgtagcatcttacagcagttttgatttgcatttccttaatgattaaatattgttgagcatctttccttgtacttattggccatttgaatatagttttggataaatatttactcatatcctttgcccacttacagttgagttatgggaccttttatataatctgtataaatcacctttgtcagatacatgactttcaaatattttctcctatcctgtttgtgttttttccctctctctgtatagtttgaagtaccaagtttacattgtgtgtgtgtttgagaaaggatctcactctgtgaccctgattgacctgtaactcagtttgtagaccagtctggccatgaactcacaaagatctacctgcctctgcctcctaaattctgggattgaaggtgtaatctccatgtcttacttggtacttagatttttattgtcatatttacgaaactcttgcctagttcaagttcacaaagattatttacttagaaaagtcttgtcactttatagttaatgctgactcttatggtctattttgagttcattttgtatctcatgtgaagatgaggttcaaattcattatttgacatagtaattatatagttgtccctatagtatttattgaaatggtgttttcttctattcatttgttctgtgaatgtctgtcagcatgctagtgtggggatcatgtagtgtttagctaagagactagtgcacaggtaacagtgtgtatagtcaggacctaagtgttcacatgagaggattttatacagcttcttagtttagtttcaagaccagtttattttggcacaatagaatgaaatttaatgttcataatttttcaaggcttggagcaaaagacagaatatacaaaatgtttggcctacaggtctttcccaagccaaagttttgagagggatgtaagctcagattcccttagacatgtgctatatgtatatagttacgtcacccctcccctacttttttcttgttcacaatgttagttgctaggtactatctttgaggcaaatgaaaaaaaagagcccctaacgttttctataagcctaattctccaatagaacatgaagaaaggctaaaaataaagtagaactagttgtaaacctgtcatcagcttttatagaaattaacataaaaagggaaccatggtcaaaaacaaattcagcttttgctcttacattgcccacacaaagaaatagtaaactgctgagtccaggttatgtgcactaagcatttcataatgtgtcattattaaattaataaggacaaacatgaatttggcttagaaacagttgggcctagttgtttctttgcccaatctttcttgtctactaaagatgaacctttggaaaataggattattcatgcagtgtggagacagaggacaccatatgacagtaccatggccttgggccagactctgtagtctgtattctttgctctaacttcagagtgtgttctagcagctagtatagactgtttgtttggctgcatgatgttctcaatgtggttggaatttttttctttccctccttatgcttgatatattgggattgtctaagggattgatggcttgaatacctggtagaagtcctccatttccaacaatagaaaaggcaatacaactttgggactcagaagatgcacccaattttcttgggggaaatcaaagcccagggataaggctaagaagatttatccttttcctaaaggcagtaagtatctcatgtagtcatggctggttctctgtgtatctaaggaggaacctcttgtcactgcccaaatgtttgcatgacaggtgtgagagccaaaatatacaggctaatatatatattttttcacttagagaatcctctttatattcttttttggaaggatttttttttgagatggggtctcgaactatagcttgggctggctacctcatagcctaggctagcctcaaacatctggaaatcctcttgactcagccttctgagttctgtgtcataggtgtgagccactaagcctagcttatatcctttaaaataataaaatatattttataaaatatatgtttcagattctcaaagaataagcaaaaaaatatatttcaaaattcagatttgctacttgagcagaaaatacacttcagaagagtaggattgctctgttaggaaaccaggcatcttgtcttctgttattgattttgttgagatttgcctttattcatatgctaatggtgacttgtcaccaatgtatttatatttcaggtcgcatagaaagggagaaagaacaaatggaaagaaaaatccccagcttattgctaaaatctttctgatctcactggcttaaagcttagtcgcatgttcttacctaccaaggcaacagagaaatgcagtttatggttgggtaatgtgatgatcagtattacctgttaacttgacccagcccagaatcacctgggaggaaggaagaggctcttaagtaaagacttgtctggatcaggttggcctatgggcatgtctgtgagggaattgtcttgatttttaatttatgtaagaagatccataccactgtggctgcctccattacctaggcctgcggtgctgagaatataaataggtttgcatgcatgtatttctgcatgctcttgactctggatatcatatgacttgctgctttgagctcctgctactgtgacttctttgctatgatggactataacctggaattgtaatcaaataagtccctttcttatctaaactgcctccttgtcggggtatttcatcacagcaacagtatgaaacataagagtagggcaggtggccacatagccagttgaaatagaagggttatagcatatggaacacgagggcataaggagagcttagttgtagagagcttgcctagcatacacatggccctgagttcaatccccataaacaccataaaacaccagaaaaactcttttgagaggtgttctgcctcagactctcatgctgacagtgctgcacagtgcttctgctccatgtgataaggtggaattcaatggaatgaaatgaagccaggatctactggacaggcttctgcctttgaaacagagccagttgtattccagattggaacatggaggaaaacattaggggaatttgtaggggaaaacttcagaagcaattaagaggcaaaataaacacctttcctgaactgtaaacagatgccctagaccaaacattggtgtctaaattgggacctgatatttgctttacttaggactcctttggttaaaaatgagaaacaacaacaacaacaaaataaaccaaaaatcaaaacaacaataacagcaatacaacaacttggagtatcttagcatattctttgttgacccataaaaaactttaaggaaccacattcattttaacgatgtaggggtggtttatagaaaataattccagcaaacctttggactcctgaaatttctctagtcttctgaagggtatttgtcacttttttttctgtgaagaagtctaccactttcagctccccagattaattgccttgttaagaagggccatggttcaggaccaacattgtaaaaatggctatcttgccaaaagcaatctacagattcaatgcaatccccattaaaattccaactcaattcttcaacgaattagaaggagcaatttgcaaattcatctggaataacaaaaaaccgaggatagcaaaaactcttctcaaggataaaagaacctctggtggaatcaccatgcctgacctaaagctttactacagagcaattgtgataaaaactgcatggtactggtatagagacagacaagtggaccaatggaatagaattgaagacccagaaatgaacccacacacctatggtcacttgatcttcgacaagggagccaaaaccatccagtggaagaaagatagcattttcaacaattggtgctggcacaactggttgttatcatgtagaagaatgcgaatcgatccatacttatctccttgtactaaggtcaaatctaagtggatcaaggaacttcacataaaaccagagtcactgaaacttatagaggagaaagtggggaaaagccttgaagatatgggcacaggggaaaaattcctgaacagaacagcaatggcttgtgctgtaagatcgagaattgacaaatgggacctaatgaaactccaaagtttctgcaaggcaaaagacactgtctataagacaaaaagaccaccaacagactgggaaaggatctttacctatcctaaatcagataggggactaatatccaacatatataaagaactcaagaaggtggacctcagaaaatcaaataacccccttaaaaaatggggctcagaactgaacaaagaattctcacctgaggaataccgaatggcagagaagcacctgaaaaaatgttcaacatccttaatcatcagggaaatgcaaatcaaaacaaccctgagattccacctcacaccagtgagaatgnnnnnnnnnnnnnnnnnnnnnnnnnnnnnnnnnnnnnnnnnnnnnnnnnnnnnnnnnnnnnnnnnnnnnnnnnnnnnnnnnnnnnnnnnnnnnnnnnnnnnnnnnnnnnnnnnnnnnnnnnnnnnnnnnnnnnnnnnnnnnnnnnnnnnnnnnnnnnnnnnnnnnnnnnnnnnnnnnnnnnnnnnnnnnnnnnnnnnnnnnnnnnnnnnnnnnnnnnnnnnnnnnnnnnnnnnnnnnnnnnnnnnnnnnnnnnnnnnnnnnnnnnnnnnnnnnnnnnnnnnnnnnnnnnnnnnnnnnnnnnnnnnnnnnnnnnnnnnnnnnnnnnnnnnnnnnnnnnnnnnnnnnnnnnnnnnnnnnnnnnnnnnnnnnnnnnnnnnnnnnnnnnnnnnnnnnnnnnnnnnnnnnnnnnnnnnnnnnnnnnnnnnnnnnnnnnnnnnnnnnnnnnnnnnnnnnnnnnnnnnnnnnnnnnnnnnnnnnnnnnnnnnnnnnnnnnnnnnnnnnnnnnnnnnnnnnnnnnnnnnnnnnnnnnnnnnnnnnnnnnnnnnnnnnnnnnnnnnnnggtgggtaagggggacttttgggatagcattggaaatgtaaatgagctaaatacctaataaaaaatggaaaaaaaaaaaagaaaaaaaaaaaaaaaaaaaagaagggccatggttgaactggactcataactgaccagttctctcttttacctaggagagagaagctgtttaggtaaggatgctccagccgccattcaagtgtgaagctggaagtgagggcttcttcacacaagcatgatattcagtgtaatctttgtacatatattgaatattatcttggaacatttattgccttaccagaagagctagtaattaatgttctttggagtagaaagacatagttgagtttctaaacattaataatagctctttgttcctgtagggaggaaagggttaattttacttcatcttaatttattaaaaacccacaactgaaatatatttcatttcaaggatcaatggtttgagaacttgaaatagtccttgctcagaaatagatgtgattcaagatgttaccagaatagcaagatctgtagatctgccactgaatccaaatctatgtacatgaacaaatatctgaatagtaaatacctcaaagtaaaagaaaaagccttctagaatgttgttcttttggaaaaaagcactaatttcggaccaaggcacagtttttctctagtagacatttaaatttaagtttgttgtaaaggaaaggaatagatcctgtatcaaaattcaagctttcttcttatgctatttatattttgtttctgttatgttggtgttgttctcaacattttactttgtaatatttatttttatcatattcttgaatatattattcattcggtaaagagttatgaattaaaattttactttatatgtggaacctggataactttctctctctctttctctctctctctctctctctctctctctcacacacacacacacacacacgcatgcacacacacatgcatacatgtgcaacatttgtaaagacatttgtaaagaaaatggaacctaatgtggtcataaacaggacaagaaagggtattgagttatgaatattggccaaagtgcaaatgtatttgaatgaaaatgtcattatgaaacctttcacttagttagctcagtgaatatatgctaatgaaattcttttgtaagaagtgagggagatggcttagtgggtaaagcacttggctgtataagcgcgaggacctgagtttaaatcccagagcacaactgtaaatgcagtttctgctttataataaagtccacttttgaagcctcttccctgcctctatgtggctgagacaattaccctttaaactttctgcagaagggactaatctacagattagcagggtggctagcatgatatccctcaggagatagtcatcctatctgtagggtagatcagtactagaacccgtttgccagtgattaaaaatatggttggttttttttttttttctagaagagtacaaatcacctttttgttgtgtttcttgctgtgggaaataagagtttgtaagttacacttgtgatgaccatgttgatttatcattcccaccatggacagttttaaaagatcaagatggtactaagaagacttatggcctaacagtgtaaatggatactttaataggcccaagtggaacacatgatctccctagttacaaccattctttaaatttagtactgacttagctaaggtatgctggtacaaaaacattcttcattttcttcacgtgcttcagatatattgtaatatatagtacaattcacatgccctctcataaagaaataaaggagaattaggcagtcttgctaaatttctgcttaagagaaagttcctctcttttctaccaatcttgtccactcaagtagattccattaatgcctatacaaaagggtcatttggctaataagacttatcagaaaaatgtgtattaaaatgtcttgtagccgggcgtggtggtgcacgcctttaatcccagcactcgggaggcagaggcaggcagatttctgagttcgaggccagcctggtctacagagtgagttccaggacagccagggctacacagagaaaccctgtctcgaaaaaccaaaaaaaaaaaaaaaaaaaagatgtcttggaataatagaacacaaatgtttgaaaaggttcaattcacaatctctattcaagttataaaatggggaatggcttcaggtataaataattcatcctgacaaatttgtttcattttggcatgggcctgcctgcctgctggcttgctggcctgagaactcgagatgttatttttggagccctgggatgttaacctttgtcagtttagctcctctcatgaatctgagttctgacttgcaagaaagagtccagacctctgagtttcttttcatagaaatgtttgcactattttacaggcagtcttccaagcagaagaaggctattcagactgccattcgcaaaaataaggaggccaatgcagtgctggcccgattgaacagtgagctgcagcagcagctgaaggtaaggagtatgtctcccatttggatcccctcactttactctgatgtttggttctgattcggttcgaccatcagctccccattcctttcactaagacctgcttttgttctcaaagctcttttggctggtgaagaccaagtgtatttgcatttcaagggttggctcttgaatgattagactaggactagtaacttcaatctaaaggctacataccatgtatgagttaaaaggattacaaactctgtattccttgttgtccaaagcttctgggtaagttcataaatatgtagatcatctaagaatgatgctcacttttgtggaagtaggcagcctggttaaaccccttttctggtaccttggaaatttccatttcactttctcaagggcatcagccctggttttctcacctgtttctctccatcatttctcctctagtcatatagcacaaatgtggtggtaaggtattttgtcctggctctggagtttgaagccgatgtgtcatcagagccctgacattttcgaaagcttcagagatgacatgtttattgcttcccaactccaagtattatctgccaatccttgacgttccttggcctgtacagaaaggtccaatctcctctgtcatgtaacgttcttcctgtgtcttgactgtaatgtgttcttattggacctttctgattaaggacaccagtcattggattagggcccaacttaatcaagcatgatatcaacctcatatgattctccttgcatataaaaatcatgtttacaggtcctgagagttaggatttgaacatattttggtgggatatgatttactgggtcattttcaatctacatgtaagcatactccagcattagtaatcttagggattattctcattcactgtctcacattcctcttaagggctttgcttcttctctctctctctctctctctctctctctctctctctctctctctttctctctctctctctctctctctctctctctctctctctctctctctctctctctcgtttttagaagaatctacataaatgaccattttttctaaaattacttttcagttttttttaaaagacaaagccttgatacatagcccaggatggcctagaacacagaatcctcctgagctctgagctgatgcgcatgcaccagcatgctgatatggagacagtgcttgcgactgagatactgtgctgtccctccttggccctctactccatggtactgcttcagcgtactctactctcttcccattcctgacttctctaccaagatcttctactccagaaaatctaaatgcatagaaaatttggaatatttgtacagccactactctgccactagcagtattttatacttgttttattatacatgtgtcagtttgtctatcagctctattcatcagtttactttcgacatatacttaaataaattactaacatctgtatatattccttaaatatctcagcatatatattgttagctagatttcagtttttctatttatttgagacatagcccttcatcctggaacttactatgtgtgcagaacagtctagcctcctcatacagttcattttttttctacaggttttccttatgtcttagggtttctattcctgcacaaacatcatgaccaagaagcaagttggggaggaaagggtttattcagcttacattttccacattgctgtttatcaccaaaggaagtaaggactggaacttaagcaggtcagaaagcaggagctgatgcagagaccatggagggatgttacttactggcttgattcccctggcttgctcagcctgatctctttttatagaaccaagactaccagcccagagatggtcccacctacaaggggcctttcccccttgatcactaattgagaaaatgccttacagttggatctcatggaggcatttcctcaactgaagctcctttttctgtgataactccagctgtgtcaagttgacacaaaactagcgaggacaccttatgatgtgaaatttaacacatacaaatcataactgtattcttgctgatcttgtaacaaattggatatacttatataatccaagttctacagatttagagactgttgccatccccaaagagggtttctcatttcccttcctattctacttctaccccactcactgggcaaccagtattctgatgttttcataccataggtttgcctgttatggaactgtatatgatgatatcctataacaaatacttttgtataaagtttttgagattcatttattttgttgtgtgcacgaggaatccactcctttcactgctacctaataccgtactgagtgaatatgctccagtttcattattaggtctattgaaaattggagctctttacagttttagaacatagtgaattaaactgcctcactgaacattttttaaaattttattttattagttattttctttatttacatttcaaatgctatcccgaaagttccctataccctccccccatcttgctcccctacccacccactcccacttcttggccctggcatttattgccctttactggggcatataaagtttgcaagacctaggggcctctcttcccagtgatggccgagtaggccatcttctgttacatatgcagctagagacacaagatctggggggtattgattagttcatattgctgttccacctatagggttgcggacctataggttcagctccttgggtactttatctagcttctccattgggggggggctgtgttccatcctacagatgactgtgagcatccacgtctgtatttgccaggcactggcataacctcaaacgagacatctatatcagggtcccttcagcaaaatcttgctggcatatgcaatagtgtctgtgattggtggctgattatgggatggatcctcaggttgggtagtctctggatagtccatccttttgtcttagctcaaaactttgtctctgtaactcctttcatgggtattttgttccctgttctaagggggaatgaagtatctacatgttggtcttccttcttgattttcttttttttgcaaattgtatcttgggtattctaagtttctgggctaatatccacttatcagtgagtgcatatctagtgacttcttttgtgattgggttacctcactaaggatgatatcctccagatacatccatttgtccaagaatttcataaattcattgtttttaatagctgagtagtactccattgtgtaactgtaccacattttctgtatctattcctctgtttagggacttctgggttctttccagcttctggctattataaataaggctgccatgaacataatggagcatgtgtccttactaccagttggaacatcttctgggtatatgcccaggagaggtattgctggatcttctggtagtactatgtccaattttctgaggaactgccagactgacttctagagtggttgtacaagcttgcaatcccaccagtaatagaggagtgttcctctttctccacatcctcaccagtatctgctgtcacctgaatttttgatcttagccattctttgaacatgttttaatatcatggttttacttagtctttgagaatttcatgcaatgtattttggtcatatttacccctttccttacctcatgtctttttacaataattcactgagtctaacttgtgctgcccctatatgtatgggtgtgaggtagctagctagccagtcaatttatgagggactacacccctaaagaaaactgactctcaggtagcatccatcaactgccaatagttcccatgtatgcaggtaaggtcccggccttcccctatgcttggatgctcatttgcttgatcttgtgcatgcagttatgacttctgtgagtttatgagtagagtagttcagtcatgctcagaaaatgctggtttgccctaggcctctttacagcctgtggctattttattcttttttgcccactctccaaaaatgttccatgagccttgtagggagggatgacatccatgttccacttatgacataatactctgcagaaatttcagacatgtttttgtttggatatatattctcatttattctagaggacctagattacctaatcaggattcatcggtaatcccagggcttggaaggtagaggcaggtagatctctgtgacttgaggctagcctggtctacagagtgggttctaggacagccaggaatacacagagaaaaaccctgtctcaaaaagactaatatgccgggcagtggtggcgcacgcctttaatcccagcacttgggaggcagaggcaggtggatttctgagttcgaggccagccttgtctatagagtgagtttcaggacaggtctacacagagaaaccctgtcttgaaaaaacgaaaaaaaaaaagactaatacatatgcgcgcgcgcgcgcgcgcacacacacacacacacacacacacacacacacacacacacacaaacacacacacagagagagagacagagagagagacagagacagaaagagacagagacagaaagagacagaccccaagtgtcttagttacttttctgttgctgtgaagagacaccatgaccaaggcaacttataaagggcagcatttaattataggctttcttgcagtttcagagcgtgagtccatgaccatcatggtggggagcatggcagcacgcagactggtatggcagttgagcagtagctgagagcttacatattatctataagttgcagacagagagagggattggttctggctggacttttgaaagctcagaacccatccccagtgatatgtctcctccagcaaggccacacctagtactccttcacaagtaatcccaccaaaatttgtcagtatttccttctagtgtttgtatcacctatttatttgataattacgtacctttatgaacaaatacttcaaaatttgatagaatccaactgttatttttcatatgtttgttactttcaatgtaaggaaactatatatctatagattataaaataattttaatatattttcttctaacaggtttattgtttttttttcttttacattttcctcccttcccttctccctcttgctctggcccctactcgctctgggccctgctcacgccagcccatagatttcttatttgtttctcattacagtggttgtgagccaccatgtagttgctgggatttgaactcatgacctccagaagaacagtcagtgctcttaactgctgagccatctcaccagcccttctttaacatttttatgttaaatttgtacatgatgtgacattagggtcaaggttcatttctccccactttagtatttccttaatccagcaccatttgatgaaaagacttttcctcccttggatcgattactttggtgccattatcataaatccaatgatctgtaatcatggggggctcagttctgacatctaagtctgttctattagtctttctatagatctttgtgttacattcttgattgttgctgccttattctgtcttggaatgtggtaatataaaattttcagcatattctttttcatgattccactggatattgtaagctgtttctctcatgcaaatttgaagattggtaggaaaatgccacaaaataagaactgttaggactatgggtagatttgcattaactctatcaattagtttaagcagaggagtcgctacaactattttagccatctaaaatcctctgagggtttctaagatttgagtatgtactctttcgaattttgtccaaaatctttgtgatacgatttcaagttagatttaaaaaaacaattctgttgttcagttgaatttctgaaggtcccaggatataggatcaatatacaaaataatcagtcatattcctgtgtataagtcataaattattggtaatggaattgtttttaaagtaccacttgatagtagctgggctccttccccaaatgaaatactttggtacaaatctatcagagtaaacctaagatttgtacactggaaactaaaaatgccgccgaaacaaatacagggggacctaaggaatgcatatattttcttatatatttggaagagtcaatagaatagagatgtcatttttctccccagtgatctttagattcatgacagtaccaattaagatcgcagcaggattttaaaaatgaatacaaacaagcagatctaaaaattttatatgggagggctgaggaacttggaattacaaaactccaatgtgagatgcggaaccaatgaagaaatcactgtcaagctgcagtaatcaagacagtagagttctgagaatggggcatgaatcagaatcctgaaagagatcatctaaataaagccatttgataaataaagccatttaataaaaagacagtgatgctaaatcaactcaaaaaaagtcagtctcccaacaatatatttaacaattggccatccatgtgtaacaaatagggaatcttgatctaagactcaccccatgtacaaagattaacttgtccatgtaaatggaaatcataaagctataaaacttttaggaaaaagtaaagaagaaaaacagttcatgatttgaagttaggtatgacccccccagtgtaaagaaatgattaaaagcataatctagaagaatataacttagtttattggccttcattaaaataaaacaccttttttctgccaaagacactaaaaattacaagacaagttacagatggggagaaaatattttcaaactacatatttgtcagagaacttttgttctgattaaaagtaattttaaaactcaaaaataagtctttgggaagacctactactgtctgcattataaagaaacacaacagtaaaatgactcctagtgacacatttctatatccatagatcagtcaactcagccctcatcagggaagtttctttttggactagatgggaactaacacagaaactcacaactagacaatgtatagaaagaaggaggatgggaacactcaatcctaaataggatatcttcatcaaaatccatctttccagggtgcagggatctatgtggaagaggaagtggaaagattataagagctagaggtagaggatgactccaaagaaacaccatcttccagacacaagactgatacccacatgaactcacagagattgtggcagtatgcacagggcctgcacatgtccaagccagacaaaatcctagcatgcagaagaggaagtagacacaaagttctacccctaattaagaagctatttgcaattgacaccttctggtaaagggacaatcagctctctctagtggagtctcactgagtatagtgaccacacttcagggaaggccccatacccaggagtagttgcccaacacaaggtgaattcagtgtacttttaaaaatttgctttgctgtttttattttattgcttttctttctctctttctctttctctttctctttctctttctctctctctctctctctctctctctctctctttctctctttctttctttctttctttctttctttctttctttctttctttctttctatctttctttcagcttgtttgtctgttttgattttcatttttcttttccctgtgtgagagactgagagaacatggctttggatgggtagagaaataggatctggaacgagttggagtgcaaaatctatgatcaaaatatgttgaatgaagaatgtaaataaatttaaagatagattaagaactttaaaaagccaaatatctcattttaaaaattggcaaaggactggaacagatatttcaccaaagaggatataaggatggcatctatacacataagatgatattctctgtcattagccacttaggaaatgacaaggtaatcgtgcattgcatgctgctgtacacttcctagaactgctaaaacaaacaatggcactgtcagtggaccgcaactggagcctcatgcgctggtggtgggaccacaaaatagaaaaatgactcaccctgcaaagtcattcagtaagctttggaagtgatagctatctttatctcccttttacctcttttttttccatttagtttggttttatcctgtcttctatccttttgtttttaggtagattagctttattcagtgttctttttgtttcttttcagttttgttttattgagatagggtctcatgtagctcaggctgatatcagaatgactaatgtattacagccttgaactccttttcattatactttctttacctcctaagtgctgggatcccaggcaacatgccactatggcctatttatgtggtgctagagatggaatctggagtgacctgccttttaggcatgcactctaccaactgaactccattctttttgcacatcattttcacaaaacttatttgctcccttggggcctttgaagttgcagtgtagtcaccctgcatatctttgcccaatgtgttcaagtagctttcttctagcttcattcatgtctctgaccaagttgcatcacctctaagcagtcttccctagtcatacttttctgttttcccctggtctgctaaccctgttgttctctaatgtaacatattgtttatttactttcagagctgtcttctttgcccattttattgtctgtctgttcatttgaatataagccatataagggtcctggcctacttttttcttgggctttgctgttatgatagctagaacagcatctgacctagagctaatagatatagaagatagtttgccaggagtgtgaatgaatgaatagttggttctatacattggttttctaatatatgttggttctttggagcatttcagaattgagcctttatataagaattctttcccacattgaacaattccacttaagagtacctttatgtgtcctctttgtctctgcaaaactctgttttaagactgaatgtttcaatttcaaaatagcatattctgttttttactcagtgtggtggcttgaataagtatggcctacatagattcatatgtttgagtgcttgaccatagggagtaacactatttggaggtgtggccttattggagtaggtgtggcattattgtaggaagtgtgtcactgtgggggttggctttgaggtatcctatgctcaagctatgcccagtgtggcacacagtctccttctgctgtctgcagatcaaaatgtagaactcttggctcctccagaaccctgtctacctggatgctgccatgcttcccaccatgatgataatgtattaaacctctgaaactgtaagccagccacaatgaaaggtttttgtatataagagttgccttggtcatggtgtcttttcacagcaataaaacctgaacaaagatagccagaaattatgctaagctgtattatgtgcaagagcctggacaagagactttggtggcaggataaccattctgtctttttatccttcagccctagctaagtattgtgccagaaaagaagccagagattgcaactagaaatttagttgagatgactcatgttctgtattgggagtctgcctttttcttttagttttctcctgttgtctttttaatatttaatgccattctctactatcttctgagcctatcaaagcagaccgaggctaaggcagggttgcaaagaaaattttatcaggtgtgctatgaagtaggttagttgtaccatgctcgaagtgccatgtgatcatgctggaacttagctgcccattcctgtagctgagatggctgttttgaggcttccactctatgttaacacatatcagtgctgagcagtacagtggctgaggttagtgactgggaatcccccactgtctaatccctagcattgaaatcagtgccttttgggccacttgtctccaagtgtttgagggttggttctatatttcctttgaacgtgtaaagaaatagagatgagcccacgaaatgatgctttttcttctttttctttctcctgttttgtataatttaggaagttcatcaagaacggatcgcattggaaaaccaattggaacaacttcgcccagtcacagtgttgtgacatcctagaggcttgagtgacagcaggtgaccttgtctgccaagatcttccttttgagtgtttaagcccaactacttgtcatatatgtctgaatgtcaaaagctgtcagcagcacaacacaatctatatgactttctcttttgcacttcacttgtgtattttacagtggtagtaaaatatgtcttcaactgatcattgcacttaaaatattaatacttcggaggataaagcagaagggtcataagctcaaggccatttttagaagcttgttgggacactgtctccaatagaaagtgaaaagagaagtgtgtgtatagctcagtggtagagtgcttgcctgatatacaggaagcctcagtttaatcctaaatcccatttcaaaaatatacttatcattggaatttatctcccattttaaccacttttagatactgctccttatttaagttacccttttagcagataattcggagcattatttatttaaagaatttataattctacagtacctattaatgctgtacttccaggatgctcatgcccattttattcttatatgtatgctacatacagtatgttggtttcccgaatagtgtgcattccagctggatagtcttaggcatgatgataataaaatcaaaagctggaatacaattaaagcatcagatttacactggcactgtgccctctaccactatatgccaaaaactgcttctgtagtaccattttgatattatgtcagttatacataatatctgactattgttttctattaaatatcagaaccttactgggtctttacacctctgtgaagtagagaattttggcaatgaactgtttaacttggccaatctaggccatcaacctagataacttagtccttttcatgtaaatttttgtgcaagcacaatctactttaactgccttgcctgaccaaattaaataaatagttgccagatctctgcttttatcctgcatgggataacatctttgtaaatgtataagcttggaaaccacccaacaaatattagtagctggatagctacctatttgttgttgaatccgggtatccaggctgagaagggaagaaaaatagccactaactctgcaacaatccttggctgttgtcattgttgtctttattttaggctggatttcagatgtgttgcttctgaagacacaatgaaagaatgcaatcttcccaccagctacatgactacttgttctctgtgaagtgtactcttgggaagtattaactttatatacagttcaggggatctcagctaactctagtggaagtgatacaaagcaagcttaaattacagaagcaactatcctgtcgaaatgtcgtaatacagtccagctgaaagtaggaaatgactgacctgtagggttatagggtccctgaatcactgatcttcaacagggcattttaatattagcattagtgtgcacagggtacttttgaaatggttttggatagatttacaatatgtaagattaagctgttgatttcaatagagctgagagcttttagtaaaaataggcatttatttaatatttccctgttcctttggcaagctttatcagtagcttaacaacagaagagaagagttcaaacagatgatgttttttccaaagaaaaacaaattgttgactctcttccatgcatattttaaggatttgaatctgatttgatttggaaagtcatgaaacttgaacagtttctgcatttcttttttcctttggctgccttttgtttgtttgtttgtttgttgttcttgtggggagggctcaggaatgatttaaccccccctaagattatggttgggtcagtacagattccaggtgacttcctttttccatgtgccgggatgggagggctgtgttatgattacagcatgtttggcattttgtacattcaatagaggaaagactaacatatgcactttatctcaagatcttccagtgcatatacactcacgtgggagagcacttcatatccaccaagcagacataacctaaggaatgttagtccactgagcagttaaaaaacactgacatattgcttccctcatgaagtaaacgatacagggaactggttgaagagattggaattttatttagttggctttgttttccttaaaggataaaacttgcattggacaatcaaggacaatgaagcctcaccaatatatttcttgtggtgctgggatcaaacccaggacagcattcatcctaggcaaatgctggaccataccctcagcccatcaccaatattttaactgaggcattgcattaaacnnnnnnnnnnnnnnnnnnnnnnnnnnnnnnnnnnnnnnnnnnnnnnnnnnnnnnnnnnnnnnnnnnnnnnnnnnnnnnnnnnnnnnnnnnnnnnnnnnnnnnnnnnnnnnnnnnnnnnnnnnnnnnnnnnnnnnnnnnnnnnnnnnnnnnnnnnnnnnnnnnnnnnnnnnnnnnnnnnnnnnnnnnnnnnnnnnnnnnnnnnnnnnnnnnnnnnnnnnnnnnnnnnnnnnnnnnnnnnnnnnnnnnnnnnnnnnnnnnnnnnnnnnnnnnnnnnnnnnnnnnnnnnnnnnnnnnnnnnnnnnnnnnnnnnnnnnnnnnnnnnnnnnnnnnnnnnnnnnnnnnnnnnnnnnnnnnnnnnnnnnnnnnnnnnnnnnnnnnnnnnnnnnnnnnnnnnnnnnnnnnnnnnnnnnnnnnnnnnnnnnnnnnnnnnnnnnnnnnnnnnnnnnnnnnnnnnnnnnnnnnnnnnnnnnnnnnnnnnnnnnnnnnnnnnnnnnnnnnnnnnnnnnnnnnnnnnnnnnnnnnnnnnnnnnnnnnnnnnnnnnnnnnnnnnntttaattgccctattgctcaatggtgttcaagcatggggattctccagtcctacagatgaaagcaaagtaggaaatgatcatgggcttattggggcttttagcatctctagtaagtagcatacagctttggctggctttctatccacaaacctaaagcagagcttgaatgataaatagcaagaatggatgtgtaatgtgacaatcaaggcagatatttgttctagttggaaagacgaagcactttataagcatcagacaagtgtttgggactaattgagaaacaagccagcttagatggaagctgtgctgtgtgactattagaactaggcaggaccagtgctcctcttttatagctagcatgggaaaatcccatccctaataattgtggactcttggcccaggaatccacaataatagctagtggtagaattgggatgtagcctgattatatagattccaaggtagtcctctgtctatcctaaaagtagattagaaagccttttttatttatcatgttgaattttattgacttaattggtctgtagatatgaaagcatcttctaaggagttttagatttagatatttctctccgctttaaaaaaaaataaaatttgagtggaaataatgttattaaaccattcttctaatgcttcacttttgatgatgcagtatgttcctttaaatcttggcagaactttctaaagctactgctttcaatagattccagccgcatattcccatgggcatattcccatgctttctcaaatagactactgtgataaaaatgaactcaatatgtagtagcttatacttttctccagtatattgttggtcactcacaaatgattcatttgaacacattttagggataagtaatcaaaaccatgaacttttatttgacttcccaccaatgtctaaactattgtaaaatagtatgattctttagccgtgttttgactgtctagtatttctaaatatttctctgtatcctggatggtctcataacgttggccataataggtacataatcagaagatcacttagacaacatctgatattaatgtgattcttgcattcaagacacttgcaaatgtctttttctaagcagtagttagaaagagctcaattatagtattaacaccttaaagccaaaacatttgttcaacacaaactaccatcacacctctgacttgatattatcatgagaatgtggatgtacaagtgtaaaaacaggaatgtactatctctcctgagcagattgcctgatgggattgacaaggaggctcattgggttgtggtttgaacatcgagggtgtgaagaaaatgaagcagtggctaaagaaatcttctcctctcacaaaatacaacactagtgtctttcttttctctttctagctgaatagttctatttcaaatgttcccttaaaactcagacttcaacacatcagttaaatttgtactttagttgtgggtgttagagtttttgtgtcatgactcagtgtggttcacattcctagtgagaagcagagatctggaggtgtgcagtcctcagcctcacagcttccttcccttttcagcaggctgatggagacatgccaccaacatagacaggttggtcaccgatggccattttcataaatatttctgtgggccattttgctttgcttgtttgtgaaaagaattgtctctaattatttgaacctctgaagaattgtacacaaggaggatcagactttaaaactatccatgtggattctgagagctgctgcccagcagaagtcttagaaatatgccttgaagcagccgttgtgtaattatgagctgggcagcccaggtatagttagttttaggcttgtaggtttacttcctagtttctttaaacacacctgatggtaaagaacacattgaaagtactgcaggttgcagttgacagtacccacatggtctgcaaaagcctggctttgctggcaactattggagaatgcttggtttgcatgtcttgtgatttctcctgtattgttcctagctaatttcatggctgtgggaagttagcaacactaggtttatgactctgaagaccagaggacagcaggctttaagagggcttaaattgggagtcaaggactatagtcaggagacccccaggtacctggttcagagcagtccgggatgataggacgagatcctaaagttctttcagggagctctgccatgagagcaaacagagcatatctatcatatgccactttgacgaactaagttggagtttttgtttcaagtcaacttgtgtgataagttctactgcacctatcttgggaagcagggataccctcttctttaggactagagctgccattcttttcatctttagcacaaggaaggtatttaagtgagccagagacaaacagagccattttagtcttcatagttatctgctaagagagataatgagctgactgtctattttaaactcgaaggtaaaaaaatgtatattatattttttcactataggtacatgtaacagtaaaacgtgtaacagcaaagtatatatttgatgttttctgtctttcatgatattgtgctaacaagttgtgctaatatttaactcagccagagtttcactcatttgctaagcattgggaacattctgtgtatttaccttaaacataaataaattcctgagagtgtcctatatttggattgtgatttgtagactcatgctaactttactgcctctttttcacacttgttgaaaaatctgtgaagaacatagtaagttaaggttttccaacttggaaaaatgtacatgatgtgaaactggggtgctatgttaaaaataaatgtatgataactcatggattttgtggtgtcctggtgtcagtattttctgatttctatttggtcttcaatcaggcattgcgaaagaaggagttggagggtctattccattaaaatcaaagtttgagatttgattaatttatctcctggcaagatagcttcttcaatatctataaacagtaaacactactgactcgaaactggattcaatgtgggaccaaattatttgttttatttccccagtgttctttaagcttgtgaatattcctaaattgtgtatatttctgtaatcccaccactttagaggctgaggcagggggatcaaatgttattgaccagcttgagttatatagtgagttaaaggccagcttcagctatatagtgagggcatgtctcaaaacccaaacagtaaaacagtgacacccatcgtggtatccttagctgcaaaggactgtcttagttacctttttttttttttttttttttttgctgtcataaaatatcttgacagaagcagcttcagagagaacagctttattctagctcacgatccaacatagctgagcaatcagggtggcaggagcttggagctattgttccattgcatccataggggagtacatgctgctgttcaggtctctttctccatccaaggaacagtgccgcccacagagagggcttttcctgctgcaaggaatatggcacccagaggcctgactcctaggtaattctaggttctggcaacttaacaatactgaccatcacagggatgataaagaataatgaggaatacatgtccccaaattctgaccaattactcttatacatcagttgtaagttcttatctttaccttcaaagcacaagtctcctattgtctggactttctgccatgttgtcgtgtccatctgttaggatttggacatggattaaaggcttgatcctcagccattggtattattttggaagattctgaggactttaggaaggaccacatccttgggggctgtaacttgtcccaggcccctctctgtctccctgttttctgcttgctgtaatgtaggcggtgtttttccacagagcaccaaaatgtctgcaaccattgttagatctcaaaccccagacaaatggctaactgaggtttccttggcacatcaaagcagacctggccatcaggttctcccagcatctcatagtctttacctgttacagggtggtcctggctaacataccctgtcctctaccctgaactcaccagcccaggtattggctgggcttcactccctccagttcctctgacccctctatgactcagccattttggctgtcagtctcttggccaaggctccccctctttgccatcacttcgtctccctcacacagctctgctttgggtttattaactctggactcttccagatatccctgcctctgactatgcgctcccttttatctatggtaaaccttctcctccaccatatctaggagcagtcatgtttttctttttctatttcatcttttttcattcaaccatgagtcaaattatatcttctgtttatgtaaggcatttttccacagtgatgagactctcctacattgcccatgagtttgttctgtgtgctaaccagctggctgtagatgatatactgcacagccaagtactgtctcaggagctggaaatgagagcaagatgtcgcttcaagaagttcacagatcattgggatggagaactctagatgagacagagtggaatatgttgtgttagggtaggctaattgtagatactgtgaaggcataaactaccttgagttgagatagaagctattttcaataattaagagaaaatgtatgcaattattcatagttctaatattcagggagtgatttgtgatttccccattttctgccctctataaagaaattattttactcaaagactataaactagtgtttttaatatgatctaaacctgctagcttaattatatatatatatatatatatatatatatatatatatatatatatatatatattttatatatatatatgttatatatatatatatatgagagagaatgtatgtattcaggcaatgtacaagaatctaagacacttgtatcttagttagggatttactgaaatgaagaggcatcaggaaaacattgatttagagttgtcttacaattcagaagtttagttcattatcatcatggcagaaagcagggtggtatgcaagcagacatggtgctggagaggtagctaagagttctacatctgggtcagtacgcaacaggaagagacagtgacacagtgggcctaacttgagcatctgaaatctcaaagcccaccccttcagtgacagacttcctccaacaaggccacacctattccaataaggccacacatcctaatagtgccactccctataggtctaagtgggccattttcattcaaaccaccacaacaagagaataaacttttgtaggcagatactatatgggacaatgtgaaagtgtgttttgttccatccccagtccctttgcagggaccctgtgaggattgaggactgtagaggttttgtttttgtttttgttttttgtcaagaagattatcaaagtgcagaaataaagttttgggaaatgaagtgttgggaaatattgttacttgtgaataagagtacatagtaattttacttaacaatttgaagaaatccccaagcctgtcccagaaaatgctccaagtagaatgtctccatggtccaagaaccctgtcgtaccgttttctaatggtgatgtgttgtaggattgtggacagtggtatttacaggcatctgtgggagtgtttccttcatagcattttccttttaaacacagaaggaaaggtatgggattgtaccccacacagatcttcctttgctttccctgaagttctcatagcaaattgggtagaagggattggaacagaaacaggaaaatttgaaaactcagctgtgaggattctgtggcatcatcagtagagtgtacacacacacacacacacacacacacacacacacacacacacacacacagagagagagagagaggggggggagagagagagagagagagagagagagagagagagagagaggtagatatagaaacagccagagtagttgtttaaagcatagactgctaagaatggtttggaaagtggggaatgtgatcattggtgtttggaatcatggaagatttcactacgataagaacagctggcttgtagtctgtatcgttgcttttaagttttctaaagagaatgtccctcctattcctatatcttgagatgactacttccatctttggtacagcattataaaacagactgcatgccttcactcctgtattggacttaatcaaaactacaaggctgaaggaaagccaaggggaagaaagataatgcttgtggaatggaataaaagcaagcaaacaaattaaatgcagacgcagagaactgtgatgcaggctctttgatattcaaatgaaattggcttgaacttcaacccacgtgtgttgaaagcctgtatcctggtctccctggagtttctgtgacccaggtgatggtggagagattactacttttgttcctgttgcttctgtctctaagaggcttcttaggaattagtttcatagattatctacctgcccccctcagtttataaacactaggtatttatgtgtatgtagaggatgaagtaaaatagtaaagaggcaacatttatagaaaatttaggggtaataagaactttgaactagtttatggataggctgatcacattgtacaactccagaggacattgttcatgttgtagtctatatgaacgataccctttagatgcagtgggtttctccatatctctatgcctcatagttcaccttcaccttaccaaaatgtacccctttaccctacatatggatctactgttctgatactgctggctgagggacggtagggaggtgggaactttggtggtcctgccagcacttgtaacccagtgcctttctaccctccttcaccaccttctttctacactggatctagtctaatagttcttagctgggtttaattctgcctcatgtttagagatggttttagtttccataaccgagggatgctcctggcatatcgtagatatagggtggggatttgttaaacatgctacaatatacaggatagccctctgaaaacaaaaagtgatctggccccaaaatatcagcaaattgagaagtcctattcagaggagcccattgaggtccattttcctctattatctatagcaaattacccccattctcactactgtcatggagacttcctcaaatagccaaggctacattgaaaggctatgctaaattagctcattaattcaaatgtaaatgagtgaagtgaattggataaaatgaacagcagcactggtcatccatttcggtgataggaaacaagaagtggtggggatggtggt

SEQ ID NO: 706 - DNA, 2311 bp, Mus musculus
atggaagtggcagcgggcggaggctgcggcgccgggccgcctttgctgctgagcgatagcgagcagcagtgctactctgagctcttcgcgcgctgtgcgggcgctgcaagcgggggccccggacctggtccccccgaggctaccagggtcgcccccggcactgccactgcggccgctggtccagtagctgatctgtttcgagcgtcgcagctgccaccagagacattgcaccagccaaggctgctctttgctggtaagcagttggaagatggtcatgctttgtctgactacaacattcaaaaggagcccatccttcatcctgtgttgagatgtcatggtggtgctgagaagaggaagaggtcttacagccctcgcaagcagaatgagcagaagggaaagaagatcacagaactgtgtggtgcaaagcgggttggttattttggcccaacacagttttatgttgccctgaaattgattgctgcagcacaggctggcctccctgtgagaacagagagtattaaatgtgaactgcctctgcctcgctttgtgatgtcgaagaatgatggtgagatacggtttgggaacccagctgagctgcatggaccgaaggttcagattccatacttaaccacagagaaaaattccttcaaaagaatggacaatgaggataagcagcaggaaacacagtctcccacgatgtcacccctcgcctcccctccttcttccccgcctcattaccagagggtgtccttgagccatggctacagcaaactgcggagcggcacagaacagatgcatccagctccatatgaaaggcagcccattggccagcctgaaggaccctcatcagagggtccaggagccaaaccctttcgtcggcaggcatctcttattcggtccttttcagtggagagagaaccgcaggagaacaacagtaattacccagatgagccctggaggataactgaagaacagcgggagtactacgtcaatcagtttcggtccctccagccagacccgagttccttcatttcagggtctgtggccaagaacttcttcaccaaatcaaagctctccattccagaactctcttatatctgggaactcagtgatgctgactgtgatggagccctgaccttgtccgagttttgtgctgcattccatctcatcgtagcccggaagaacggctacccactgccagagggcctgcctccaactctgcagccagagtacttgcaagcagctttccctaaatccaagtgggagtgtgcaatttttgattcttattctgagtcaatgccagcaaaccaacagtcctgtgacttgaatcggatggagaagacatctgttaaagacgtggctgacttccctgtccctacccaagatgtgactactgctgatgacaaacaagctttgaaaagtactgttaacgaatccttaccaaaggacgtatctgaggatacagcaacttctaaggactacaacagtctcaaagcaagaccaagatccagatcttactctagcacctccatagaagaggccatgaaaaggggtgaggaccctcccaccccaccaccacggccacagaaaacccattccagagcctcctccttggatctgaataaagtcttcctgcccagtgcgccagctgctaactcaggattgttacccccaccaccggcacttcctccgagaccgtgtccaacacagtctgaaccagtgtctgaagctgatttacactctcagctgaacagagctccttcccaagctgcagaaagcagtccaacaaagatggatgcaccacatgctcagcctccatcaaagcctattcgcaggaaattccgacctgaaaatcaaacaacagaaagccaagagcctgctgctgcagttggaggggcagtttctgcagcaatggtgaagccccatccaacagtacaaaagcagtcttccaagcagaagaaggctattcagactgccattcgcaaaaataaggaggccaatgcagtgctggcccgattgaacagtgagctgcagcagcagctgaaggaagttcatcaagaacggatcgcattggaaaaccaattggaacaacttcgcccagtcacagtgttgtgacatcctagaggcttgagtgacagcaggtgaccttgtctgccaagatcttccttttgagtgtttaagcccaactacttgtcatatatgtctgaatgtcaaaagctgtcagcagcacaacacaatctatatgactttctcttttgcacttcacttgtgtattttacagtggtagtaaaatatgtcttcaactgatcat

SEQ ID NO: 707 - protein, 698 aa, Mus musculus
MEVAAGGGCGAGPPLLLSDSEQQCELFARCAGAASGGPGPGPPEATRVAPGTATAAAGPVADLFRASQLPPETLHQPRLLFAGKQLEDGHALSDYNIQKEPILHPVLRCHGGAEKRKRSYSPRKQNEQKGKKITELCGAKRVGYFGPTQFYVKLIAAAQAGLPVRTESIKCELPLPRFVMSKNDGEIRFGNPAELHGPKVQIPYLTTEKNSFKRMDNEDKQQETQSPTMSPLDPSSPPHYQRVSLSHGYSKLRSGTEQMHPAPYERQPIGQPEGPSSEGPGAKPFRRQASLIRSFSVEREPQENNSNYPDEPWRITEEQREYYVNQFRSLQPDPSSFISGSVAKNFFTKSKLSIPELSYIWELSDADCDGALTLSEFCAAFHLIVARKNGYPLPEGLPPTLQPEYLQAAFPKSKWECAIFDSYSESMPANQQSCDLNRMEKTSVKDVADFPVPTQDVTTADDKQALKSTVNESLPKDVSEDTATSKDYNSLKARPRSRSYSSTSIEEAMKRGEDPPTPPPRPQKTHSRASSLDLNKVFLPSAPAANSGLLPPPPALPPRPCPTQSEPVSEADLHSQLNRAPSQAAESSPTKMDAPHAQPPSKPIRRKFRPENQTTESQEPAAAVGGAVSAAMVKPHPTVQKQSSKQKKAIQTAIRKNKEANAVLARLNSELQQQLKEVHQERIALENQLEQLRPVTVL

SEQ ID NO: 708 - DNA, 223156 bp, Homo sapiens
  misc_feature (1)...(223156): n = A, C, G or T/U
taaatacctttcaaaattcaccaatctttgagatacactcaatagtacagtcatgcgttacccaatgacgggtatgttctgagaaacacgttgttgggtgtcttcgttgttgtgtgaacatcacagggtgtacttacacaaatctagatggtacagcctactacacacctaggctatgtgaaaattgtcagaatcaaaatggagtcgcttgtgttaaaaaaaaacacacaaaaacctgacaaatagagctgaggaaggctacgaagagagggttctcacacttgtatgcctgataacaaaattgcaacaaaagactgcaaaaactgcaaacttacacaaatgtcatcacaaccttctgtaaagacatctgaccagcaactgcctgtctaaacttgaactggtgccatccttgttattgatccttgtcaccaaaaataaccatttcaaaacaactatgtaaccttcatttttccttgaaaaatttttgtcttcctttacctccacgaatatgcacaagtttactgtggcatacatattcccattgcaatgccctattcccacatgaacaacattttcttttcttttttcttcttcttttttttttttctttagacagagtctccctctgttgctcaggctgagtgcagtggtacaatcacgacttactgcagcctcagcatcctgggctcaagtgatcctcccacctcaggttcccaagtagctaggactacaggtgcatgacacaatgccccacacccagctaatttttgtatttttttgtagagacagggctttgccatgctgcccaggctggtcgtcaactcctgggctcaaatgatccacccacgttggcctcccaaagcactagcattgcaggcatgagccaccgtgcctggccataaacatcattttcttttagagagcctctctctgacatttaagttgacagctatatggtacagcctattgatcctagactacaaacctgcaagcacagcatgattgtattagtcaattctcacactgctgtaaagaaatgcctgagactgggtaatttataaagaaaagaggtttaataggctcatggttttgcaggctgtacgggcagcatctcttctgggaaggcctcatggagcttttactcattgtggaagacaaagtgggagcaggcatcttacatggcagaagcaggactgagaggggttgtggggaggtgccacacacttttaaaccaccagatctcatgagaactcactcaccatcgtgagaacagcaacgagtggaaggggctaaaccattcatgaaggatccacccccatgatccaatcatctcccaccaggccccacttccaacactgaggattataattgagcatgagatttggatggggacacagagccaaaccatatcattttgcccctagcacatcctaaatctgatgtccttctcaccttgcaaaatcccatcatgccttctgaatagtccctgaaaatcttaattcattccagcattaactcaaaagtccaatgttcaaagtctcatttgaggcaaggctagtcccttctacctatgagcctgtaaaataaaaaacaagttagttacttctgagacacaatggagagataggtattgggaaaatatacccattcaaaaaaaaagaaattggacaaaagaaaggggctacaggcctcatgcaagtttgaaacccagcagggcagtcattaaatcttaaagctccaaactaatctcctttgacaccacgtcttgtatccaggacacactggtgcaagaggtgggctcctaaggctttgggtagctccacccctgtggctttgcagggttcagcccccatgacagctctcatgggctggcattgagtgcttgtgcctcttccaggtgcagggtgcaagctgttggtggatctaccattctggggtctggaggatggtgaccctcttcttacagctccactaagcagtgccccagtggggattctgtgtgggggcttcaaccccacatttcccactctgcactgccctagtagaggttctccatgagggctctgcctctgcagcagtcttctgcctggaatccaggcttttccatacatcctctgaaatctaggtggaggctcccaagcctcaacccttgcactctgcacacctgtaggcttaacacgaggtggaagcagccaaggcttgtggcttctaccctctgaagcagtggtctgagctgtacctgggcccctttgagccagggctggagcaagagcagcttggatgcaggaagcaatggcccaagggtgcacagggtggcagggccctaggcctggctcaggaaacctttcttccttcctaggcctctgggtctgtgatgggagaggctgcaatgagggtctctgaaattcctttgaggccttctccccattgtcttaggtgttagcacttggctcctttttacgtatgcaaatttctgcagcctgctttaattcctcccctgaaaatgggcttttcttttctaccacatggccaggctgcaaatttttcaaacttttacactccgcttcccttttaaatgtaagttccagtttcaggtcatttctttgctcacatatatgaacataggctgttagaagcagccaggccatatcttgaaccttagaaatgtcttctgccagataccctaaatcatctctctcaagttcaaagttccacagatccctagggcaggggcacaatacaacaaagctctttgccaaaatgtaacaagagtagcctttgctccagttcccagtaagttccttatttccatctgagacctcatcagcctggccttcattgtccatatcactattagcattttagtcataaccattcagtcagtctctaggaagttccaaactttcccacatcttcctgtcttcttctgagccctccacacttttccaatctctgcacgttacccagttccaaggtcactttcacattttcaggtatctttatagcaatgctccactcctaagtaccaattttctggaaaaaaaaaaaaaaccaaacaaaaaaaacataatgtaaagaatatctctgcaatgggaataattggattccatgagaaacaataaaaaagaatatctcttgatgtctcttggctatttctgaaaatatgatccttctggcttttctggccatcatggagccaaaacaagtgtgtaagctttgaaccacaaaaaagttcttgtttactgtcagccttaagggatatgagtgcttctagtttctaaattcttatctgtgtttattttgaagtttgataactatttcttctattgaaaaaacttttagaaataaagaacagtacttggcattccttagatattaacatatttttacaagtgccatttttttttcctcctgtgccctgggtattactgctgttgggtcccctttggctgtgccccacatcttttgttgagcagcttctttcttacatcctggagaccttcagagcttccctttcttctgacccagcctgctgtccctcactcattatttccaggttgccaagtctctggggctcctccctttctgtcgtgtccttttacctccccagttccacccactctcagtcaacagccatctcagccccactgatcaagccttcctggctgagctctggctcatgaattttctctcttgtttcaactcccatggcagttaacccagagtatacagtttagcacttaattgtatattttctttcatttatttttatttgttgtgttagttttgtctcttccagtgaggcttcaaactccttgaaagcaacacatcttctattaaagaaaaattcctcttagtactctggtagggatacagtaaatactctcttttctatcaataaatgtcaattgtctcactgatagattgataggcacagatgtgagactttctacctgtctccgtcatatctggtgcttaataaatatctgtcaaatttattatacttagttgagtcataaagatcagttctgaatctggtattcagtgggacaaatcacactgtctctgcatccattttctcatctgcaaaatggagattaaaaatgtcttcccaatctacctcagagagttactatgaggcttaaatgagataatagttacaaaagtgctttgaaaagctttgcagcttttttcctctactgcatgaagattagggattattatagctcacatttcctttgacagtagtcacagggtaaagtagggtttggtgtttatcacacagagtgtgtccctttctagcctttattagaatggttggccattctcagggaaacctgagtacaaccagaaaggtaggaagagaataaacatctggcttccagttttcctgagaaggtatcacagctatggaaactacaaaggtggtgaaatttcttttcttttcttcttcttcttctttttttttaagacagtttcgctctgttatccaggcgggagtgcagtggcacgaactcagctcactgcaacttccgcctcccaggtccaagagattcttgtgcctcagcctcccgagtagctgggattacaggtatgagccatcacgcccagctaatttttgtatttttagtagagacagggttttgccatgttggccaggctggtcttaaactcttggcctcaagtgatcttcccatcttggcctcccaaagttctgggattacaggcatgagccaccatgcgtggccttctttccttttttaaattctttttttctttttaaattttaaatagaagcagggtctcattatgttgctcaggctggtccggaactcctgggctcaagtgatcctcctgcctcagcctcccaaagtgataggattgcatgcatgagctaccacgcctggccaggtggtgagattttgaaatggaaattcccaagtgaagttagtctttattgctcctaatttacatatcctttctgcactcttgttccattccgaagctttctgttgttttagttccctcctggcaggttggatgcaagacgtggtgtaaagaaagcttagtgaagaggtgagaacttcttccttctggagaagatcctcttctctgttccatttttccagattccaaaaggaaaatattactctggttatcactgaggttgacatcattttttatttttcttcttcttatgtatctctcttcactctctccccctttcctttccttctttttgtatttacaatttcatgattttttccccttctcctctcttcctgaccttggtcctttagttgaccataataccaaagtatatttgttatcgtcagtggtatttcttgagatgttttttgtctctgtttttaataaaaataaaactatttggggtgtaagttttatatatccctttattaaagcaaattataaaatgtattaatttttttattgatacataataattgtacatatttacggggtatatgtgatattttggtacatgtatacaatgtgtaatgatcaaaccagaataactggcatatccataatctcaaacatttattatttctttgtgctcggaacatttcaaatcttctaggtattttgaaatgtacaataggctgggcatggtggctcatgcctgtaatcctagcactttaggacgctgaggcaggtggatcacttgagccctaggagtgggctagcctgggcaacatagcgagaccttgtctctataaaaaatacacaaattagctgggcatggtggtgcacgcctatagtcctagctactcaggaggctgaggtaggagaattgctggagcccaggaggtcgaggctgcagtgagccgtgattgcaccactgcactccagcctgggtgacagattgagaccatgtctcaagaaaaaagaaatacacaataaactgttaattatactcaccttactttgctatcaaacactagattttactccttctaactgtatttttgtatccattagctaacctcccttcgtcccccagcccacctttcccaggttctgataactattgctctacctccatgagatcaactttttcagctctcccatatgagtgagaacatgtgatatttgtctttctgtgtctggcttatttcacttaacacaatgaccttcaggtccatccacgttgctgcaaatgacaggatttcattcttttttatggctgaatagtattccattgtgtatatataacacattttctttatccatgcactattgagggacacttaggttgatccatatcttggctattgtgaatagtgctgcaataaacatggaggtgcaggtatctctttgattactgatttactttcctttgaataaatgcccagtagtgggattgctggatcacatagtagttttgtttttagttttttgagaaacgtccatactgttttctataagggcagtactaatcgtattctcaacagtgtaaaagactttccttttctcttatatatggagtgagatgatatctcactgtagttttgatttgcattttcctgatgataaatgatgttgagcatgttttcatatacctgttggccatctgtatgtattcttttgagaaatgtttatgcagatcctttgcccactttttaatgggattattattatttttttgctgttgagttgagttccttctatatgctggatatcagtctcttgttggatgaatagtttgcaaatattttctcccattcttcaggttatctcttcatactgttaatgtttcctttggtgtgcagaagccttttagtttaatatatttccatttgcttatttttgtttttttggcctgtgctttcaaggtcttagccataaaatccttgtccagaccaatgtcctgaagcatttccccaatgttttcttccagtagttttacagttttaggtcttatgattaagtctttaatacatcttcagttgatttttgtataggtgagagagacataaaggtctagttttattcttctgcatatggatatctggttttcccagcaccatttattggaaagactgtcctttcccaatgtatttccttggtggtttgttggaagtcagttggctgtaaatgtgtgggtttatttctgggttctccagtctgttctattggtttatgtgtctcttttcatgtcagtaccatgctgttttggttactatagctttgtagtatattttgaagtcaggtagtgtgatgcctccagctttgttctttttgctcaggattgctttggctattcagggtcttttgtggttttatacaatttttaggattgttttttctatttttgtgaacaatgtcattggtattttgatagggatcacagtgaatctgtagatttctttgggtagtatggtcattttaataatattaattcttccaatccatgagcatgggatgcctttccatgtttttgtgtcctcttcaattttttaaatcaatgnnnnnnnnnnnnnnnnnnnnnnnnnnnnnnnnnnnnnnnnnnnnnnnnnnnnnnnnnnnnnnnnnnnnnnnnnnnnnnnnnnnnnnnnnnnnnnnnnnnnnnnnnnnnnnnnnnnnnnnnnnnnnnnnnnnnnnnnnnnnnnnnnnnnnnnnnnnnnnnnnnnnnnnnnnnnnnnnnnnnnnnnnnnnnnnnnnnnnnnnnnnnnnnnnnnnnnnnnnnnnnnnnnnnnnnnnnnnnnnnnnnnnnnnnnnnnnnnnnnnnnnnnnnnnnnnnnnnnnnnnnnnnnnnnnnnnnnnnnnnnnnnnnnnnnnnnnnnnnnnnnnnnnnnnnnnnnnnnnnnnnnnnnnnnnnnnnnnnnnnnnnnnnnnnnnnnnnnnnnnnnnnnnnnnnnnnnnnnnnnnnnnnnnnnnnnnnnnnnnnnnnnnnnnnnnnnnnnnnnnnnnnnnnnnnnnnnnnnnnnnnnnnnnnnnnnnnnnnnnnnnnnnnnnnnnnnnnnnnnnnnnnnnnnnnnnnnnnnnnnnnnnnnnnnnnnnnnnnnnnnnnnnnnnnnnnnnnnnnnnnnnnnnnnnnnnnnnnnnnnnnnnnnnnnnnnnnnnnnnnnnnnnnnnnnnnnnnnnnnnnnnnnnnnnnnnnnnnnnnnnnnnnnnnnnnnnnnnnnnnnnnnnnnnnnnnnnnnnnnnnnnnnnnnnnnnnnnnnnnnnnnnnnnnnnnnnnnnnnnnnnnnnnnnnnnnnnnnnnnnnnnnnnnnnnnnnnnnnnnnnnnnnnnnnnnnnnnnnnnnnnnnnnnnnnnnnnnnnnnnnnnnnnnnnnnnnnnnnnnnnnnnnnnnnnnnnnnnnnnnnnnnnnnnnnnnnnnnnnnnnnnnnnnnnnnnnnnnnnnnnnnnnnnnnnnnnnnnnnnnnnnnnnnnnnnnnnnnnnnnnnnnnnnnnnnnnnnnnnnnnnnnnnnnnnnnnnnnnnnnnnnnnnnnnnnnnnnnnnnnnnnnnnnnnnnnnnnnnnnnnnnnnnnnnnnnnnnnnnnnnnnnnnnnnnnnnnnnnnnnnnnnnnnnnnnnnnnnnnnnnnnnnnnnnnnnnnnnnnnnnnnnnnnnnnnnnnnnnnnnnnnnnnnnnnnnnnnnnnnnnnnnnnnnnnnnnnnnnnnnnnnnnnnnnnnnnnnnnnnnnnnnnnnnnnnnnnnnnnnnnnnnnnnnnnnnnnnnnnnnnnnnnnnnnnnnnnnnnnnnnnnnnnnnnnnnnnnnnnnnnnnnnnnnnnnnnnnnnnnnnnnnnnnnnnnnnnnnnnnnnnnnnnnnnnnnnnnnnnnnnnnnnnnnnnnnnnnnnnnnnnnnnnnnnnnnnnnnnnnnnnnnnnnnnnnnnnnnnnnnnnnnnnnnnnnnnnnnnnnnnnnnnnnnnnnnnnnnnnnnnnnnnnnnnnnnnnnnnnnnnnnnnnnnnnnnnnnnnnnnnnnnnnnnnnnnnnnnnnnnnnnnnnnnnnnnnnnnnnnnnnnnnnnnnnnnnnnnnnnnnnnnnnnnnnnnnnnnnnnnnnnnnnnnnnnnnnnnnnnnnnnnnnnnnnnnnnnnnnnnnnnnnnnnnnnnnnnnnnnnnnnnnnnnnnnnnnnnnnnnnnnnnnnnnnnnnnnnnnnnnnnnnnnnnnnnnnnnnnnnnnnnnnnnnnnnnnnnnnnnnnnnnnnnnnnnnnnnnnnnnnnnnnnnnnnnnnnnnnnnnnnnnnnnnnnnnnnnnnnnnnnnnnnnnnnnnnnnnnnnnnnnnnnnnnnnnnnnnnnnnnnnnnnnnnnnnnnnnnnnnnnnnnnnnnnnnnnnnnnnnnnnnnnnnnnnnnnnnnnnnnnnnnnnnnnnnnnnnnnnnnnnnnnnnnnnnnnnnnnnnnnnnnnnnnnnnnnnnnnnnnnnnnnnnnnnnnnnnnnnnnnnnnnnnnnnnnnnnnnnnnnnnnnnnnnnnnnnnnnnnnnnnnnnnnnnnnnnnnnnnnnnnnnnnnnnnnnnnnnnnnnnnnnnnnnnnnnnnnnnnnnnnnnnnnnnnnnnnnnnnnnnnnnnnnnnnnnnnnnnnnnnnnnnnnnnnnnnnnnnnnnnnnnnnnnnnnnnnnnnnnnnnnnnnnnnnnnnnnnnnnnnnnnnnnnnnnnnnnnnnnnnnnnnnnnnnnnnnnnctcccgccccggaggaaaagcgccaggggcagcgaggataggacggttggccagttctcaccccctctctgcgtagatccctgagactcgttaagtcatccggtgacggcctttgattgcctccgcgttccacatcgctgcggaggcagtacaatcatggccgaagttgcacgaggagcgtacgcacggtcttacgcggcagcaggcatgagcgacttgtataggagaacggcgcggtatgtagccatgggagatcatctgatgttgatcgaggtgatgagaaggatattgggagtctctggcgatgtgttggtgtagcggagggcaggtctggccctgagagctgccagagtcgccccctggcacgcgactgcgcgccggcccagtggctgacctggtgtggccatcgcagctgcccgccgagacgctgcaccaggtgggtccctccgcctcctgtccctgcgggtctgtggggcagtgtgtgcgggggcggaggttgcgagtggggcgacagggctgcccccagggacccggagcctcggccagttctgagagagaggactctgcagccggggatggcgcgacgcccttgtcccgggggacaccagcctccttcgcagctcagctcctcgcccagtgctgggtgcgctctccccatcttccttccctgagacagtctgacactctctcccctcccccggccatttctggggttctgcagccgcccagacccaaagtttgtcctgttctggaagtggtgtttgttttggctgctgcactggtttaacctctgctcgctgctcctgcccctccctctcctgagtgggttctcagggtgccttgctgggatttcaacttgaagggtgtgtgtgtccgtagggttcgaggcccagggctgaatgttgtcctctctatgtagttgtaatatataagtatctactatatgtaattgcccataacatatttctaaatattaatattaaatcgaaaaccttaatgacaagttgcagaacagggacacgggactgcaagaggacgtttgtcaagtcaaaaccaaatttcccatttgagattagaggtggacttcagaagtccaccatgggaaacagctgtagtttcccatctatcattacttggacttgaaatagaattgaaaggtaagggatgtcatagctaccaccttttggctgttctatacttggaaaagtactaggggatgatacataccagacgctgtttttgttttgtgctttccttggagcttggagaaagactacttgataagcctttgtctgtcatttcatgtcaccagcacttcatggtgataagactgttaatatcaggttcaaaacgtgaaatgaagcttttcctaaaagcaatagtatgaatgttattaacaccaatggaatatttagagtggcgagtggtattttaaaatctagtttcaaaggagaactgagggttttatggttcacttgcaatgtcattgtgttcatacgtatttttaaaaaaattgcttaagactgcgttttatactgctggagtgtttttactgctatatgtttgtgagcataactttagacactttgtaatctttcacccttttgaatttgggatttctgaaactgtaactagtattcacagaacttagcatggctgtttatccctaaagaagtccttgatatgtagacagttctgccattgctgatgagtagttgagctggatcaggtaaagagaaagtcagtgtcttaaaacacaaaccgtggctattacatgaggccctcagaatagtcccgagcataatacatttattcagtgctgtagctgcttcccagctgaaagaggaataattgactgaggctatgcagcaagtaagtgacagctgggtacctattaaggcttattttgttgtcagtaatgcatcggataagaggaggtgggcatagtaaatctgaatatgttggttgatgcctctttaggaattgggaagaaggatttcctgatgttagaacccatgctttcttgaggtacatatagttttaaaaggacccaaggcacagtggctgtgcgtgaatgagattatatttttgatgtccagttgaaatctgcttgcaaaagactgcttcagatactggcaaaaggggacatccctgcgagattgcttggagtaaatctctcagagctcgaagctcccttattcagcctagcaaagcaaaacacatcatccacctttaatccaacaaaattaccataactcaatattcttggtacaggtgaaaatgaacattgaaggcatcctggacatgtgatcctaagagagtcaaacaaagtcagcaaccagcagacacctaattttcacccatcactttggtggtggtggtggtggtggtggtggtggtgtgtgtatgctccatccactttaatttgcattaccccatcagtgtattagccattctttaaaacaaacgtagatgtttttaccctttctctgttaaacaggaacctgtaagttgagatttaagtgccccaacaggtataactgctcaaatcttggaggcactaaccagtcctgatattttctatggtaacaaccaggttttcctcttaataagcatacaattaagattaccataataatgttccaggaagagtgagaatcttgcattcttaccacaagtaaatggtctataaaaatacttattttttatttatttattttttgagatggagtctcgttctgttgcccaggctggagtgcggtggcgtgatcttggctcactgcaacctctgcctcccgggttcaagcgattcttccgcctcagcctcctgagtagctgggactacaggcgcacgccacctctcccggctaatttttgcatttttagtagagacggcgttttgccatgttggccaggctggtctcgaactcctgacttcaggtgatccacccgcctcagcctcccaaagtgctgggattacaggcgtgagccaccatgcctggccttaacatattttttaatagactatttttttttttcagagcagttttaggttcacagcaaaatttagcagagtacccatatatcccctgccccgacacacccgtagctttccttactctcaacgtcccacatcagaataatagagtttttacaattgatgaacctacattgacacctcattattccccaaagtgtatatattagggctcactcttggtgttgtacattctgtgggtttggacaaatgtataatgacggttccaccattgtagtatcatacagaatagtttcactgctctaaaaatctgtgctctattgattcatccctccctctccactaacatgtggcaatcactgattttttttttttttttactgtccccatagttttgccttttttagaatgtcatatagttggagtcatacagtatataggcttttcactttggcttctttcatgtagtactatgcacttaaaattccttcatgtctttttatggtttggtggctcatttctttatagtgctgaataatattccattgtctgcatgtactacaatttatttattcacctactgaaggatatcttggttgcttccaagtttgggcaattatggataaagctgttataaacatctgtatgcagccttttttgttacatgcaggagataagcttttgactcatttgggtaaatagcaaggggcatgattgctagattgtatggtgagagtatatttagttttataagaaactgccaaactgctttccaaagtgattgtaccattttgcgttcccatcagcaatgcattggtttctttacagagtatttattttcctttgctgacttattttaacagcaggattctagcactaggtggaaaacgtatatgagtttctgatgtgtgtcaggtactgtcctaggtgctgaggttataatagtgaatccaacacaatctctgtcttcatggagcttatgttctcatgtgaatgtttttacacttcagagtttttatttggttgagaaaagacttgaaatataacatccaaaaataaaatgtcagcctggtgctgtggcgcacgcctgtagtcccagtgctttgggagaccaaggatgggaggattgcttgaggccaggactttgagatcagcctgggtaacatagtgagaccctgtctctacacaaaataaaatagccgggcatggtggcatgcgcttgtagtcctagctactctggaggctgaggcaggagaattgcttgagcccaggagttcaaggttatagtgaactatgatcgcaccattgctctccagcgtaggcaacagagcaaaaccctgtatcaaaataaagtaaaatcagcctgtcaaacgccatcctgagacatgtcaaacccggcccggtttctaacgacacaccatgcgtgctcgtaaaattctggcctttgaatacaacaaaatacttcataacctgggaaacctaactactctaacgtttgttgctctgtcttgaaatactaaacaaaaccatttacctgttcgtagacatattttctttttctagtttaaaagtatcccattctgccattttccacctagtgctagaatcctgctcttaaaataagtcagcacagggaaataaatactctataaagagaccaaaagacctttcaaaataggctatggccaggcccagtggctcacgcctataaatcccagcactttgggagtctgaggtcggaggattacttgagcccaggagttctagactagcctgggcaagatggcaaaaccccatctacacacacacacacacacacacacacacacacacacacacacacacacacacacacacacccccgctacctacctctctctggggcatgcctgtagtcccagctattctggaggctgaggtgggaggatcccttgagcccaggagtttgaggctgcaatgagccattatgacaccactgcactccagcctgggtgaaagagccagaccctgtctcataaaataaataagtaaataaataaaatatctaccttaaagcagcaagttttgtatttgatgtaatgaattaacagaccgctttataatatctatcttttaggatagtgtcagtctcttggaatgctgtgcatgagtcatcattaaaattggttttcattaaaaaaatttttttaacatatacacatcttattggagttttcttttaaaattcaaaaatgggaacattattttttcaaagccaagtaacagaagagtatataaaaaagtcaattttgtgcatatctttttacattttctatgctcatgtaaaacatacatgacttatgtaattatacacatatgctccagatctcatctgtattaattttttaaattatactttagttctgggatacacttggagaacgtgcagttttgttacataggtatatatatgtgccatggtgatttgctgcacccatcaacccatcatctacattaggtatttctcctaatgctatctctcccctagccctgcacccctgaataggccccggtgtgtgatgtttccctccctgtgtccatgttttctcattgttcagctcccacttatgagtgagaacatgcggtgtttggttttctgttcctgtgttagtttgctgagaatgatggtttccggcttcatccatgttggttttcatttttgtgatagttaattcttggacattaaggggaataattataaaacactgttgcttccatatcaagggaaatcactgaatgattaaaaaaaacccaataagtgttgtctgattgtttaaacagctttcattgaggtaaataagtaaaacaaagctgtgagaagtagggaatatttaaacaatttgtgcgcatgccctcacctttggggagaagtcttttctgaaggctctcttctgattttttgaagcaactgtttaatcattaaagaaaattataggtaaaagacaaattcttgtgaactttcgctcattgctagattattaggcagaactattttttaaaaatttaaatgaaacaactttatatttttacatctttagatcatatcattttgtaactatactttagggaaatagaggccagcatattaaaacagtaactaggggctgggcagggtggctcattgcctgtaatcctagcactttgggaggccgaggcgggcagatcagctgaggtcaggagtttgaaaccagcctggccaacatagcgaaaccccatctctactaaaaatacaaaaattagcaggagaattgcttgaaccggagaggcgaaggttgcagtgagctgagatcaggccattgcactccagcctgggagacaagagtgaaactctgtctcaaaaacaaacaaaccaaaaaacaaacacacacacacacacacacacacacacaaacacacaaaccagtaactaggactaactatatgctgttttagattgacagtattctttttttctaaaagagaatgaatgccagcagatgtaggaagtaccagagctaaaccattgcctggttaaaaggagtacctctgcataatagttacttgttgactcttttgtaataaaatatttcaggcatgtaaaactagacagttacccaagaaataactgtgtatccaccactccgtataagtaaaacagcccagctagagtgaaagcctgctatgtccccttctctggtcccattcccctccctccctaccctggagttaccagagtcctgaatttggtgtgcatgatttgaagatttctttctacttttattgtatgtatatgtggatatatatatttgtgtatatataaatcactaaaaaagatattattttggatgtcttttcaacttaaggaatatcgtattctgtgtaaccttctgcaacttgcttttcctctcattgttttgtttttggaattcatcttgttgacacatgtaatttcagttcatttatgtttccttttaaaaaatctttactacttacgtttacaatgactcattgttacagtgcggtagagacccttatgccaaaaggaagtaggtggcatttttccttatttatatagaatgtcacatgactgggggactgttcgaaacgtgtatgaaaattaagaacaccttcatagatagcagaatgcacacttatattcttgagcgtgctaggggatgtttgagctaattaattgactttcatgggctttctttttttctcatcttttatttttttgagacagggtcttgctgtgtcacccagactggaatgcagcaatctgatcatgactcactgtaccctcaacctcctgggctcaagcaatcttcctgcctcaggctcccgagtagctgggaatacaggtgtgcagcaccaagcctggctaattttctttttaaaaatttgttgtggagatggtgtctcattatgttgcccagcctggtctcaaactcttgggctcaagtgatctcccgcctcagcctcccaaagtgttgggattacaggtgtgagccaccacaccctgccatttttcatctttttaaaaatggaacatctcaaataagcaagtagatagaataatgcattaaaccctgctgcacttgccactcaggcccaacaactgtcaatgcaaggttaattcaattccatctacatttctatctttgttccctctcacctttgttatcctgaagcaagtcgcaaacatcatatggttcatagggcttatctttaaggaaggaaccagggtgggcagaaggaaatggaaacatgcaggggtttaggttggccagaaaaggtacctgtggcctatggtcaaatggcaagactgatgatggttcaatactgtcaagcctttggctgtcatggagatagacgtgcttgagaactgatttagaatagttgggaaacctgtagggagattgaaaaagtaaccaactgaagaccaggaatacaagatggatttgaatattgttctagcttcacactcctaagtaggggctgtcctattttaagggtgtagacaattggttttgaggaaatcttgggttgtttttgctaattatttataactttttttttttttttttttttttgagacagagtcttgctctgtcgcccgggctgaagtgcagtggcgcaaggtcggctcactgcaacctccgcctcccaggttcaagcagttctccctgcctcagccttctgagtagctgggactacaggcgcccaccaccatgcctggctaatttttatattttttagtagagatggggtttcgccatgttgactaggctggtcttgaactcctgacctcaggtgatctgcccaccctggcctcccaaagtgctgggattacaggtgtgagccaccgcgcctggcctatttataactttaaaaagagggtttggttcctttccagggtttttcaaactttctgtttgtttcgtataggcaagtttctcatgttttgtattgatggcattctattattcatacctatctgttggtgggcaactaatcaacctgggttgcgcaggactgaaggatttcctgggggcatggaacttcagtcttcagacagtcctaggcaaactgggatggtcaccccctctcttggttgctgcattagttatctattgctctataatgaattaccacaaacttagcagcttaaagcagcacacagttattatctcccagtttctgtgggttcgggagtctggacatggctcagttgggtcctcagctcagagtttcataaagccacaatcaaggtgtctggagcttggagtcctctgtggaggtccaacacttggttgcagaattcagttccttgtgattttagaactgaggctctcaacttcgaggcttcctgcagttccctccacatggccttctccataggcaattcacaacatggctcttggcttcttcaaggccagcaggagagtgtctctctccagttagctcagacacctttgccatagtccattagttagaagcaagtcacaggttttgtctgctctcaaggggaggggattatacaaaacaacagagaccaggaggtgagaattttgcgggggacaccttaggatctttccaccacacttgctttccaggatttgtctgaagtagaaaattattctgttgagcctttttgtggccagaatatacatatgttttgctcagccactaatttagaattcctttatctttttaagaaacattttcatgcgtaattcatcctaagtagaactggcaaatatgtaacttcttaggtattttcaattttagtctttaggcaattgtttttcctcttaactagtaggaggcaggaaaaaaaagtggaaaagcagatgcaaatgccctgcctggctactcctgcacgcagtgctctaaagcaggccttctcagcctgggttagttcaggggtctgtgaatttagatgtggaaaagaactacatctttttttttttttttactaactgcccttcccccaactgaaattgagcacttccttctattatgcatgtaagcaaaaaaccacagcagtttttttttttttttttttttttttttttttttttgagacagggtcttgctctgtcacccaggctggagtgcaatctcacaattttggttcactgcaacctgtgcctcctgggcccaaatgatccttccatctcagcctcccaagtagctgggactacacgtgcatgccaccacacccagctaatttttgtattttttgtagaaacgggattttgccatgttgcctaggcaacagggttcactgctttcggtcaaatgacagcaatgctgctggcaagtccatggtcaggagtgagattccctcaggctgctgtggtccctcctcctccagtctgtcctgcaggaagctcagagtgaatggatgctcagctgtttcctctgagacctcaccagggacagttcctgcagtcccggctctgagctctgctcctgaccgttttatctggccctctcagctgtgcttcactgcaaaggaggaaggacaaggccctctggagccagtgccagctgcttgtggggcctgttttatttactactgctatctctacttcagagacttgggctaggacatagacttgaagaaaaaagccattttaacagacttgagaaactcagccatcctcataataccattcagaaccaggagaggccattattaacactaggctagtaggaaatgttcactttgactgaattcatttgtaacactttgccactggtttacaagaaaaatactttggttcagtctcctggaggtaggtaattaaatgtttcacctgtgctaattttccaaataattaaagtgaatcccataaatgccagcaattaagaattgttgtttttggccaagtgtggtggctcatgcctgtaattacagcactttgggaggttgaggcgggcggatcacttgaggccatgagtttgaggccaacctgggtaaaatagggagacgctgtctctacaaaaaatacaaaaatcagctgggcttggtggaatgtgcctgtagtcctggctacttggtaggctgaggcaggagaattgcttgaatccgggaggtagaggtttcagtgagccaagattgtgccactgtactccagcctaggcgacagaggcgagattctgtctcaaaaaaaaaaaaaaagttgtttcttaagtgcagaccttctgagatgtgtagtgcttgccccatgccttcaaaagaacatatttaatacaataatctctttgtctctcctttacttcaaagtcagccttgtgaaaaacagatgatgatataccaacagttttttgctcttggaggtgtttggtgtgctctgctttttgagttttgttttttggacttctttaaaattattttaaaatgttttaactcctctcctttgcatactctctggtacccttatagtcccaatactgagtaaagcatgtaaaatttagcatgcagatgttttagcctcttttattttttgttcgagatccagattttttagtctcagcatgactgacactttggggctgtatcattctttgttgtggaggactgtcctgtgcattgtaggttgtcaagtaacatccctggtctctacccacaagataccagtagctattcttctcctgattgtgacaacaaaaaatgtttccagacattgtcagatgtctcctcggggcaaaatttagttctacatatatgatgataaaaaccatggtagcagccaacatttgttcactatcatccccattttgaagaaagcaaaaacggaggcactgagggtgaggttcacttacttgcccaaggtcacatagataaaagtcacttcttgaaatacttttcataatatatatgggttgaatctcagtcttaattgaggaggcagactaaaaaagaatgtaaaaacggggagtttcctgatgatgtctcaattgagaggctattgctttcatagtgattctgtgtaaatgctggaattcttgcttaaacggggtgattccatgggcatgtgtctgagtaaaggacttggatcatttctaagaagcttctgtggcatggtgaagcagaacataagacagtctaggatcaaggataactgatcaaactttgaaaccaaggaagccataggaaattggggtaaggctatgtatcacttagggtcccacaggaaatggcatgctcaaagggttttagtgaaaacaggaatgttgaggcacgaagggactagcagcaggaagctattgccattcctagacctggtggggcaaagggaggggagggaatgtcgttgctggagctgtgaaaggtactccctctacaggaacaatagtcatgaaagaatacagcctttgctagaactatggccagagaggggccagtgggatgaggggatgggagagaagtaaccaatttctgtttcctgccctctcatttgctgcagtgccttttgttgttctaacccaactagaagccacaggtaacagagcctgggtgttgaagcttattgaggttagcctcttgcgctgagtggatggaaagggctgagagtggttcaagggggcaaatagagcaacagccagcacaggctatgagcaggagtgggaaacactaccctggatcctaggaaggatggggcatggccagtgataggagcaatgaaagtctttttgtgtgaaaaagagcctggggatacagacctccatgaaggagaagagagggttggataggagtgactggttcatctgaggttcttcctatttctccaaggaagccttgaggaatgtggggttgtctgtttgcatttggatatggaagtatgtgtgtgtgtatacttttatttattttgagacagggtcttgttctgtcacccaggctggagcacagtggcaccatcacagctcactgcagcctctacttcctgggcttaagtggtcctcccacccaggcccccccaggtagctgggaccacaggcatgtaccactatgctcggctgatttttaatattttgtagagacagggtctcactatattcccctggttggcctcactcctgggctcaagtgatcctcccaccttggcctccagaagtgctaggaatacaggtgtaagccactacacccagtctgtttgtatactttttggtcagagtgaggctttccgtgagttggagtgtttgtccttattcatgacactgggaaacatacaacagtggagtgaccctcttgcagattctgctaggagtagctacatatggtgggaaaggttgctatgggaatggagataaattcaaggcagtagagagtgctttataatgtttgggggtatggccaagcattagttttgctttttccttcccagtaggatacgatttctgtagcaattcttccttacccaaaaatagctatatgtgctcccaaaaagaaaaagcccaggaccagatgacttcatggctgaattctaccaaacattcaaagaagagttaatactaatccttcttaaactcttccaaaaaacagaagtagagagagtacttccaaactcattttttgaggccagcatcaccctgatttcaaagccagacaaaagataccaagataccataagaggagaaaaccacaggttagtatctctgttgaacatatatgcaaaaatcctaaataaaatactagcagaccaaatttaacaacacctcaaaaagatgatacaccatgaccaaagtggcacttatccctgagatgcaagattggtttaacgtatataaaacaatcagtgtaatatgccacattaccaaaataagaggtaaaaaacaagccaggtgtggtggctcacacctataatcccaacactttgggaagctgaggtgggaggattgcttgaggccaggagttcaagaccagcctgggcaacatagtgagacactgtctctacaaaaaattaaaaaaaaatgagctgggcatagtggcatgtacctctagtccctgctacttgggaggctgaggcagcaggatcgctggagccgaggattttgaggctgcagtgagcactgattgtgccaccgcactccagttgggcagtacagcaagaccctgtcttcaaagaaaaaaaaagagaaaaacccatgatcatttcaatacatgtagaaatagcatttgacaaagttcaacagcctttcgtgataaacattttcaacaaaataagtttaaaagggaatttcctcaacacattaaagaccatttatgtagagtccacagctaatatcataatcagtgggagaaaactgaaagctttttttctaagatctggtacaaagcaaggatgcccactcttgccacttttattgaacacagcactggaagtactaacatgagctatcagacaataaaaagagataaaaggcatctaaattgggaaagaagaagtaaaattatccctgtttgtaaatgtcatgatcctatatgtagaaaaccctggactccacaaaagccctcttaagactaataaatgagttcagtaaagttgcatgatacaaaatcagcgtacaaaaatcagttggaaatcaagaaaactgtcccatttatgataacataaaaataataaaatattcaggaatacatttaatgaaggaagtgaaagatctgtacattcaacattataaaatattgatgaaagaaattgaagacacaaataaatggaaagatatgccatgtttatgcattggaaaaattaatagtgttaaattgtccacactacccaaaacaatatacaggttcaatgcaatccctatcaaaataccaatggcatttttcacagaaatagaaaaaacaattctaaaattcatatggtgtgacaaaagacctagaatagccgaaacagtcttgagaaacaaaaacaaggttggaggcatcacacttccttagattataatacagtataaagcagtagaaattatgatagtatatcctggcataaaaacagacatatagatcaatagaatagaacagagatccgagaaatatacagtatatatacagaaatccaagtatatacagtcaactaatttttgacaaggccaccaaggagacacagtggggaaaggatagtctcttcaataaatgatattgggaaaactggatattcacaggcaaaagaatgaagctggatgcttatatacaaaaatcaactcaaaatgtgtctttaaaatatacaacaaaacctgaaaatggaaaagaagacctaaatgttaataactcaaaccattgaactcctagaagaaaacataggggaaaagctccttgatatcggccttggcaatgattttttagacatcacaccaaaagcacaggcaacaaaagcaaaaagaaacaggtggtactacatcagactaaaaagcttctgcatgacaaagggaacaatccgcaaataaaagggcagcctatgaattggaagaaaatatttgcgacccatatatatgataaggagttaatatcaaaaatatataaggaactcccagaactcaatggtaagaaaatgaataacccgattaaaaaataggcaaaggacttgattattcattttcccaaagaagccatacaaatggccagcaggttgtgaaaaggtactcagtatcactaatcataagggaaatggaaatcaaaaccactatgagatatcagctcacaccttttagaatggctattagaaagacaacagataacaaacgttagggtgtggagaaaagagaacccttttatacttttgatgggaatgtagattggtacagccattatggaaaatggtatagaagtgcctcaaaaaattaaaagtagaactaccatatgatccagcaattcctctgctggatatgtacctaaaggaaatgaagtcagtgtgtcaaagaggtatctacactcctgtgttcattgcagcattattcgcaatagccaagatatggaaacaatttaagtgactgttgatggatgagtggctaaaaatatcgtgggatacacacacacacacacacacacacacacacacacacacacacacagatgacagaatattattcagccttaaaaaaggagatcatgctatttgtgacaacatggatgaacttatgctaagtaaaataagtgagacacagaaggaaaaatacttcatgatcttatttatctggaacctgaaaaaaagagtcaaatatatagaaacagaatagaaccacggttaccaagggtgggaatggggaggaaataaggcaatgtaggtcaaagtgtacaaacttgcagtgatgtaggctcaataagtctagagatgtacagcaggaggactatagttaacaatattgtattgtatatggaaaatgtgctaagagtagattttaggtgctcttacctcttctccccacaaaggtaactatggaaggtgatgagtatgtcagattgcttactggtagtaatcatttcactatggatatgtatatcaaaacatcatgtcatacatgttaaagttatgccataaaaatagctatatgtgggccaggccaggcatggtggcttatgcctgtaataccagcattttgggaggctgaggcaggaggattgcttgaggccaggagtttaagaccagcctgggcaacgtagtgagaaacctgtctctccaaaaatgtttttaaaagttatctgcgtgtggtagtgcatgcctgtgatcccagctacttgggaggctgaggcaagaggattgcttgagcccgaaaggtggaggctgcagtgacctgcgattgcaccactgcactccagcctgcgtgacagagtgagaccctgtctcttaaaaaaaaaaaagattaaaaaatagttgtatgtgtatatgtatacgttcaggatttgttctatttgttttctttttcttttttttcataggcagtggtcaatggcctaaggatttctttatacattgctcatatccactaaggctctattgagcaaaccacgccttaaaaatcttacaatcctcttcatatattttaaaggcaaatgcaaagaaatagctttgttctgttttgcattcttcatgggttaacatatcttctggaaaacttgttgctatggcaatgggatattatctatcttggtaatgtactacataaaaatagccctttgtgtttgagaatgatgttagtgacaggtggttgggtgaatgtatagcaggctgctttgtcaagaatagtttcccaacattccattgtttaaagttgtgaaatcaaaatgagtataatttttttctctctcaaaatgtaattttatctggaaaaggcaggcagtggtgctctgtttaattatgaattacaagccttcctttgcaggtcaggtcaacatgatgattgaagccacctctcactgtaataagtaaacgacttctctattctttctgtcagggtgtgcagcacaaggttgcgctgggggggccagtagggataattttcccattcttgaacacatcgttcttcctaagcacctcgtacttataaaccaagaagtaggaagtggtcaggtggaagagatgagctctgagctgttaatcaaatccgaatttcttgtaggttcttaggtgaaacagttccttgggaaaggtcagatttccatgttgcttttagtattgaactcacacatatagccaaggatagaatctgacccaaatcttaatttttcctttgaaaaatcctttgggcaatttttttttaatttaatttaattttattattattattattattttttattgatcattcttgggtgtttctcgcagagggggatttggcagggtcacaggacaatagtggagggaaggtcagcagataaacaagtgaacaaaggtctctggttttcctaggcagaggaccctgccgccttccgcagtgtttgtgtccctgggtacttgagattagggagtggtgctgactcttaaggagcatgctgccttcaagcatctgtttaacaaagcacatcttgcaccgcccttaatccattcaaccctgagtggatacagcacatgtnnnnnnnnnnnnnnnnnnnnnnnnnnnnnnnnnnnnnnnnnnnnnnnnnnnnnnnnnnnnnnnnnnnnnnnnnnnnnnnnnnnnnnnnnnnnnnnnnnnnnnnnnnnnnnnnnnnnnnnnnnnnnnnnnnnnnnnnnnnnnnnnnnnnnnnnnnnnnnnnnnnnnnnnnnnnnnnnnnnnnnnnnnnnnnnnnnnnnnnnnnnnnnnnnnnnnnnnnnnnnnnnnnnnnnnnnnnnnnnnnnnnnnnnnnnnnnnnnnnnnnnnnnnnnnnnnnnnnnnnnnnnnnnnnnnnnnnnnnnnnnnnnnnnnnnnnnnnnnnnnnnnnnnnnnnnnnnnnnnnnnnnnnnnnnnnnnnnnnnnnnnnnnnnnnnnnnnnnnnnnnnnnnnnnnnnnnnnnnnnnnnnnnnnnnnnnnnnnnnnnnnnnnnnnnnnnnnnnnnnnnnnnnnnnnnnnnnnnnnnnnnnnnnnnnnnnnnnnnnnnnnnnnnnnnnnnnnnnnnnnnnnnnnnnnnnnnnnnnnnnnnnnnnnnnnnnnnnnnnnnnnnnnnnnnnnnnnnnnnnnnnnnnnnnnnnnnnnnnnnnnnnnnnnnnnnnnnnnnnnnnnnnnnnnnnnnnnnnnnnnnnnnnnnnnnnnnnnnnnnnnnnnnnnnnnnnnnnnnnnnnnnnnnnnnnnnnnnnnnnnnnnnnnnnnnnnnnnnnnnnnnnnnnnnnnnnnnnnnnnnnnnnnnnnnnnnnnnnnnnnnnnnnnnnnnnnnnnnnnnnnnnnnnnnnnnnnnnnnnnnnnnnnnnnnnnnnnnnnnnnnnnnnnnnnnnnnnnnnnnnnnnnnnnnnnnnnnnnnnnnnnnnnnnnnnnnnnnnnnnnnnnnnnnnnnnnnnnnnnnnnnnnnnnnnnnnnnnnnnnnnnnnnnnnnnnnnnnnnnnnnnnnnnnnnnnnnnnnnnnnnnnnnnnnnnnnnnnnnnnnnnnnnnnnnnnnnnnnnnnnnnnnnnnnnnnnnnnnnnnnnnnnnnnnnnnnnnnnnnnnnnnnnnnnnnnnnnnnnnnnnnnnnnnnnnnnnnnnnnnnnnnnnnnnnnnnnnnnnnnnnnnnnnnnnnnnnnnnnnnnnnnnnnnnnnnnnnnnnnnnnnnnnnnnnnnnnnnnnnnnnnnnnnnnnnnnnnnnnnnnnnnnnnnnnnnnnnnnnnnnnnnnnnnnnnnnnnnnnnnnnnnnnnnnnnnnnnnnnnnnnnnnnnnnnnnnnnnnnnnnnnnnnnnnnnnnnnnnnnnnnnnnnnnnnnnnnnnnnnnnnnnnnnnnnnnnnnnnnnnnnnnnnnnnnnnnnnnnnnnnnnnnnnnnnnnnnnnnnnnnnnnnnnnnnnnnnnnnnnnnnnnnnnnnnnnnnnnnnnnnnnnnnnnnnnnnnnnnnnnnnnnnnnnnnnnnnnnnnnnnnnnnnnnnnnnnnnnnnnnnnnnnnnnnnnnnnnnnnnnnnnnnnnnnnnnnnnnnnnnnnnnnnnnnnnnnnnnnnnnnnnnnnnnnnnnnnnnnnnnnnnnnnnnnnnnnnnnnnnnnnnnnnnnnnnnnnnnnnnnnnnnnnnnnnnnnnnnnnnnnnnnnnnnnnnnctcctcacttctcagacggggcagctgccgggcggaggggctcctcacttctcagacggggcggttgccaggcagagggtctcctcacttctcagacggggcgtccgggcagagacgctcctcacatcccagacggggtggcagggcagaggtgctccccacatctcagacgatgggcggccgggcagagacgctcctcacttcccagatgtgatggcggccgggaagaggcgctcctcacttcctagatgggatggcggctgggcagaggctgcaatctctgcactttgggaggccaaggcaggctgctgggaggtggaggttgtagtgagctgagatcacgccactgcactccagcctgggcaccattgagcactgagtgaacgagactccgtctgcaatcccggcacctcgggaggccgaggctggcgggtcactcgcggttaggagctggagaccagcccggccaacacagcgaatccccatctccaccaaaaaaatacgaaaaccagtcaggcgtggcggcgcgcgcctgcaattgcaggcactcggcaagctgaggcaggagaatcaggcagggaggttgcagtgagccgagatggcagcagtactgtccagcttcggctcggcatcagagggagactgtggaaagagagggagagggagaccgtggggagagggagagggctgggcaatttcttagagcagtaactctcaaacattttgtcgtcatcatctcacttttcttctacttatcaaaatgagtattgatttaattgtaatgagtaaataacagctccctgctactgaaatgaaatttactctagctttgagaatttgagagaccctcttaagaaaataccacagctggaaatttgagacctaaaagtaatacaatttgagtatctcatatctgaaatgcttgggaccagaagtgttttggattttggattttttcagactttggaatatttgcgtttacataatgagatctcttggggatgggacccaagtctaaacacgaaattcattaatgttttatatacgccttatacacatagcctaaaggtaattttatacaatattttaaataagcttgtgcatgaaacaaaattttgactgtgttttgactgtgacctgtcacataaggtcaggtgtggattttttcatttgtgacttcatgtcaacactcagaaactttcacattttggagcattttggatttcagattagggatgcttaatctgcagctctaattctgatatgcacggtactactgcagagatggaaccattgcctttgtcttttctgttggagtcagtatagatatcttgctactaataatatcagaagagagtgttgagtggtttgctgggtgcccaatactacttttagaacattttatgtattaactaatttattcctgtaaacattcttgacagtttttgtgactatttcccaaatgaggcgtacttgttagcatgtctttctgtttgtggtgagtaagcattcttgtgtattggaagacttgcttactagcatgtcacagtgttcttcatattgaaagcattcttctatcaggagttgacgtaattcagcctgtgggccaaatccatcctgccacccattttttgtgtattttataagctaagaatggtttctgcatttttaaatggttgggaaaacataaaaagaataatttgtgacatgtgaaaattacatgaaatttaaatttcagtttccataaacagttttattggaacacagctttactcatttgtttacatattgctaaggctgcttttgaactagagtggcagagttgagtagttgtaatagagaccatatagctcccagaccctaagaaaaagtttgccaatcccttctctatattcttctgtatctagaatggcagatggtcctcaataataacagcagattggtcaggtgtcatagtttatacctgtaatcccagcattttgagaggccaaggtgggaggatcacttgagctggagttcaagaccagcctgggcaacacagtgagacctagctctgcaaaaattagccaggtgtcatggtgcacgctggtggtcccagctacttgggaggctgaagtgggaggattgcttgagcctgggaggtcaaggctggagggagacgtgatcacaccattgtgctccagcctgggtgacagagcgagaccctgtctcaaaaatatataaacagattggatttatgtacaggttcatatatatattaattttcttttggtatgcaatatatttttctttcttccactaaacgtttctcttgtcataagcttgatgtcatgtactatggcatatctcaaatatacgtgatttcagctctttgcatacccatattggttttcttttttttttttttaattgatcattcttaggtgtttctcgcagagggggatttggcagggtcacaggacaatagtggagggaaggtcagcagataaacaagtgaacaaaggtctctggttttcctaggcagaggactctgcggccttccgcagtgtttgtgtccctgggtacttgagattagggagcggtgatgactcttaaggagcatgctgccttcaagcatctgtttaacaaagcacatcttgcaccgcccttaatccattcaaccctgagtggacacagcacatgtttcagagagcaccgggttgggggtaaggtcacagatcaacaggatcccaaggcagaagaatttttcttagtacagaacaaaatgaaaagtctcccatgtctacctctttctacacagacacggcaaccatccgatttctcaatcttttccccacctttcccccctttctattccacaaaaccgccattgtcatcatggcccgttctcagtgagctgttgggtacacctcccagacggggtggtggccgggcagaggggctcctcacttcccagtaggggcggccgggcagagggcttcaacgctccctggacggcgcggcctggcgggcgggcgggctgacaccccacctccctcccggactggcggctggcggcggggggctgaccccaccctccctccggacgggctggctgcctgggcacaggggcctctactccccagtagggcggcccagcacaggccctccaacccctggatgggcccctggcggcgggcggctcaccctaaaattacccccagaaccgcaggttcgcccagccgacggatcccccctaaccatccccctaaaatgccccccccccccctttatccccctttcccccccaccccccnnnnnnnnnnnnnnnnnnnnnnnnnnnnnnnnnnnnnnnnnnnnnnnnnnnnnnnnnnnnnnnnnnnnnnnnnnnnnnnnnnnnnnnnnnnnnnnnnnnnnnnnnnnnnnnnnnnnnnnnnnnnnnnnnnnnnnnnnnnnnnnnnnnnnnnnnnnnnnnnnnnnnnnnnnnnnnnnnnnnnnnnnnnnnnnnnnnnnnnnnnnnnnnnnnnnnnnnnnnnnnnnnnnnnnnnnnnnnnnnnnnnnnnnnnnnnnnnnnnnnnnnnnnnnnnnnnnnnnnnnnnnnnnnnnnnnnnnnnnnnnnnnnnnnnnnnnnnnnnnnnnnnnnnnnnnnnnnnnnnnnnnnnnnnnnnnnnnnnnnnnnnnnnnnnnnnnnnnnnnnnnnnnnnnnnnnnnnnnnnnnnnnnnnnnnnnnnnnnnnnnnnnnnnnnnnnnnnnnnnnnnnnnnnnnnnnnnnnnnnnnnnnnnnnnnnnnnnnnnnnnnnnnnnnnnnnnnnnnnnnnnnnnnnnnnnnnnnnnnnnnnnnnnnnnnnnnnnnnnnnnnnnnnnnnnnnnnnnnnnnnnnnnnnnnnnnnnnnnnnnnnnnnnnnnnnnnnnnnnnnnnnnnnnnnnnnnnnnnnnnnnnnnnnnnnnnnnnnnnnnnnnnnnnnnnnnnnnnnnnnnnnnnnnnnnnnnnnnnnnnnnnnnnnnnnnnnnnnnnnnnnnnnnnnnnnnnnnnnnnnnnnnnnnnnnnnnnnnnnnnnnnnnnnnnnnnnnnnnnnnnnnnnnnnnnnnnnnnnnnnnnnnnnnnnnnnnnnnnnnnnnnnnnnnnnnnnnnnnnnnnnnnnnnnnnnnnnnnnnnnnnnnnnnnnnnnnnnnnnnnnnnnnnnnnnnnnnnnnnnnnnnnnnnnnnnnnnnnnnnnnnnnnnnnnnnnnnnnnnnnnnnnnnnnnnnnnnnnnnnnnnnnnnnnnnnnnnnnnnnnnnnnnnnnnnnnnnnnnnnnnnnnnnnnnnnnnnnnnnnnnnnnnnnnnnnnnnnnnnnnnnnnnnnnnnnnnnnnnnnnnnnnnnnnnnnnnnnnnnnnnnnnnnnnnnnnnnnnnnnnnnnnnnnnnnnnnnnnnnnnnnnnnnnnnnnnnnnnnnnnnnnnnnnnnnnnnnnnnnnnnnnnnnnnnnnnnnnnnnnnnnnnnnnnnnnnnnnnnnnnnnnnnnnnngagggagagtaatgaattttatcattttattagttagtgtgcttcctttgctagatcaggaattatatctcctagtaattataaccctctatttattatttttaactatattgctttctacttttgggctttcagccaacgtgtaaatattgacagtttaataatctgaaccaagccacctggactgattgtaatattttaatttaataaatcttgcatatggttaagattacatcttctacattcatcagattggatttaatgcactcaccataatcaactctggaacattcttgcaattattattgttatttttaaaggttttctcctttgtctgttgttttcccactttttttttttttttttaagacggaatctccctctgtcacccaggctggagtgcagtggcgtgatctcggctcactgcaacctccgccccctgggttcaagcgattctcctgtctcagcctcctgagtagctgggactacaggcgtgtgccaccacgcccagctaattttttgtatttttagtagagatggggtttcaccatgttggccaggctggtctcaaactcctgacctcaagcagtctgcctgcctcggcctcctgaagtgctgggattataggcgtgagccactgtgcctggcctgttttcccactttttaaagtaacagccttgttgagatgtaattcacataccatatagtcacctatttaaagtgtacaattcagtggttttagtatattcacagaattgtgcaaccatcacaactatttccggaatatttttgtcacccaaaaaagaaaccccatactcactagcaatcacccccagttccaccattcctaggcagccatggatctactttttgtctatggattcgtctattccagacatttcatagaaatgaaaccacatagtgtgtggtcatttgtgattgtcttctttctcttagcgtgttttaaatgtagcacgtatcagcacttcttattgccagttctgctgtatggctataccacattttatttatcaattcatgagttgacagacatttgggtcattttcactttttgcctcttatgtataatgctactctgaacacttgtgtataggtttttgtgtggacatatgtttttatttctgtcgaatatatacctagaggtggaattgttgtgtcgtatggtaactctatgtttaaccttttgaggaactgccaggctcttttgcaaagctgctgtactatttgacattcttgtgagcaatatatgagggttccagtttccccacatccttaccaacgtttgttattgtctatctttttgattatggctatcctagtgggtgtataatggtatctcattgtggttttagttggaatttccctgatgactaataatgttgcatgtcttttcacgtgcttattggccacttgtatatcttctttagagaaatgtgtatttagatcgtttgtccattttaaattgggttgtctttataaaatgttgaattgtaagagttctttatatattctggattcaatacatatgatacaatacatataatacatattttagtcatctatcagataaatgatttgcaaaaattttcttccattttgtgggttgtctttttactttcttgatggtgtcctttgaagcatgaaagcttttaattttgatggagtttatttattgttttctattgtcacttgtgtttttggtgtcatatttaagaaaccattgcctaatccaagatcacaaagatttcacttatgttttcttctaagagttttgtagttttagctcctatatgtcagtctttgattcattttgagttaatttttgtacgtggtgtgaagtaggggtacaacttcatacttttgtatatggatatccacttgtcttagcatcatgttttgaacaaactgttcttttcctaatgaattgttttggaacccttgtgcaaaaccaattgaccttatgtaaatgtaagggcttatgtctagactgtgtcagtatcacactgtcttgatttgtttaatctatttttgaggcagactttcgctccctgatctaaaattaaaatgtttcacaattgatgatgtcttatatgcatcaaaacttgcagactgggtgtaagtggcttgagaaaatatattggagactaaagtggggctgttggagactcataggaatcaaatagttagaaggtgggggagtgagagaggcagtaagttggatgcttcccaggtgtttagcagccatcccaaagtggcagtcaaaaataggctagctttacataatttcaaagttaggtactgatggttccagtttctttttatggattcttttaaaaagtgctgtatcaccaaatgctgttgatggcatagaagacaacactgtggaaaaatgtggacattgaccagtctgagtcaaaaagatggacagatattcagttctaaatgtgaggaatttttaggaaaaccttgagcagttaattttgcttatttccctttctatgtgtatatgaatgataaatgaaaagtctaaaagagctcctttaataagcctgagataaatgctaagtcgtagactactgcatcatatcttatttggcttttttttagtgccacctaaaatactggtgttttagctttgagatgctcttatcctcctgcttccagctctatctacacctcagaaggagctgggtcctttcccagagtctattgtataaattaaccttcttcctgtagtcactctatgtccatctgtttcccagccactttaattttgttctttttcctttctcttgtgcttgtagatttaagtcttaaaaacaagccaggtattattgtttatagtggaattttgagtaggagtggaggttaacctgtacatcaatctagtaggaatattcattcaatcactcaagggatgagcttatggaaaagttacaaaaatagtagcattcctttatattcctcaccctgctcccttaatgttaacattttatataaaggatcaagaataggaaattagtcttggtacagtattattaactaaactacagagcttatttgaattccatcagtttttccactggtggtctatttctgttctaggatcctgtccaggatcccatattgcatttagttattatttctccttagtctcatccagtttgtaataatttcttaatctttaatgacacctttgaagagtacagatcaatattttgtagaatgttcctcaatttgtatttgtttgatgctttcttatgaataaggttgttcatttttggcaagaatataatgatgcatatttttcagtgtatcatatcaaggagttcatgatgttgatgtgtcttgttactggtgacatttaccttgattccttgtttaaattgctgtctgcagggtttctctacagtaaaattattactttttctctttatggttaaaatatcttgggggagatgctttgagactaggcagatatcctatttatcctcaaatttttgtccattgatttttttcattctttggtggatcactctgtatcatagagtatttgtgacaaatatttgattagcagaaataaagctatgccctacaagaagcaaagatcaattacattgaaatcctattgtattggttaatataacgctagcagctgtgttcctcaactttcaggagcttaacacaacagatgcttttcttctcaatatgggcatttctggttgtgtaggcagttttctgccatgttaattcaagtatccagactaaactttttatactgaagtaacttcaaactgacagaaaatagggatgcaagaatagtaccaggaaatcctgtataccctttactagatttacttaacatttgctacatgtgccttatgattttctttgtctattcatatatgtatatgtattttatatatattttatatatctgtatttatatattgattgccatatactaaatcacttgagattaaatcacatacatcatgttcttctatgccttaatagtttaaacttaatatatttatttgtttaaatctagtatacagtttcagaattgctaacccatatctgtttgagaaacactttcactaactggattacagcatttatacaattcttttattctttagttttgcaatatctagtcaagatacgattttccagtttcccactgaagtattaagtttgaaaactgtacataagcacactgttattcaaatttaggaaatttaatatcagtactttagtatgcagtctgtattccagtttcattaattatccccaaaatgttcttcagtggaatattttttttctcctgatacagtatcaagtccaggatcatgtattgaatttatttgtcatgactttttagtttcctttgatctggaacagatcttataagcctttctttgtctttcatgacatcgacattttgaacaatgacaaatttatgacattgttttgtagaatgtaccaaatttgggctgggtgctgtggctcatgcctacaatcctagcactttgggaggctgaggcaggtggattgtctgaggtcaggaactcgagaccagcttggccaacatggtgaaaccccatctctactaaaaatacaaaaaacaaaaaaaattagccatggcacctataatcccagctactcaggaggctgaggcaagagaatcgcttgaacccgggaggcagaggttgcagtgagccgagattgcaccactgcactccagcctgggcgacagagctagatgctccatttcaaaaaaaaaaggaacgtaccaaatttgggtttggttgatggctcctcttgtttagattgagattatgcatttttaaaaaaacttttaggttcaggggtacatgtgctgatttgttgtataggtaaattcttgtcacgggggtttgttgtacagattatttcattacccaggtactaaacctagtatgcagtagttttttttttctcttctccctcctgccaccctccatcctccaataggcctcagtgtctgttgttcttctctgtgtgtccatgtgttctcatcacttagctcccacttacaagtgagaacatgcagtatttggttttccgttcctgcattagtttgcttaggataatggcccccagctccatccatgttcctgcaaaggacatgagctcattcttttttatggttgtgtagtattccatggtgtatatgtaccacattttctttatccagtctatcattgatgggcatttaggttgattttatgtttttgctattgtgaatagtgctgcaatgaacatacgcttgcatgtgtctttatggtagaatgatttatattcctttgggtctatacccagtaatggggttgctgggtcgaatggtatttccgtttttaggtctttgaggaatcgccactctgttttccacaatagttgaattaatttacactcctaccagcagtatgtaagcattcctttttctctgcaacctcactggcacctgtttctttttgactttttagtaatagccattcttactgatgtgagatgttatctcattgtggttttgatttgcatttctctaatgatcagtgatgttgtggtttttttttcatctgctcgttagccacgtgtatgtcttcttttgaaaagtgtctgagattatgcatttttgtctggaatactgcataagtgacatgtccttctcaggcaatgcatcaggaggcacatgatgtctcaacccctcattggtgattgtaattttgatcatttggttaaattactgtttgcttaagtgttaactatttttagatatgacgtatcagagtgatcaatactgtgaagcctcttacaacagtgtttagattgaaaaattatgagtgaaaagcctttcacagtcattcggattgaatatgcctaacatgaaatccaaactgtttcaacatttctttcaagtcattttctactatggaaataataatgcatgatttagccatgcctgagttttatttcctcacgcaggcatttatttctttaaaaaatttaatttaaagttcactataaaacttaccattttaaccatttgaagtgtacacttcagtggcattaagtacattcacaatgttgtgcaaccatcactaccatccatctccaggacttctttatcatcccaaacataaaccatatctactaaacagtaactccccaattccttctccagcccctggtaacctcattttatatgccatcacaatattttagaataaacgccaacttcctggggtaagatcatttgacttttgctcccagatcagaactatgataaaaatattatttgctatatactaacagggaaatttctggattttggcatgagttactgtattataactctaaatcctggtaagggaagcatttttattctgaaagtaaacaaaaataaccattagtatgataatctttacctctgggggtggggtattttggagggggtgagtacaaagagaggtgaaattattcctctagggtggcagaccagagtttaaattgtttcttatgtttttcatcttggttgtctaccaattggatatagtcactcagatcatccatgtttttgtacctggtttgataggtataaatacctataaattggaataaattctagcaattagaggtccatgttccttggtctgtaaagtgaatataacaaaactgacttctctccaaagggtgctttgagacaaaactataaaacactttggagagtagaaggggggtccttatttttagtaacattcctcagtgttcttcaagaactcacctactgccaatcattcctctgagttaagaatatatattagaactagttttaatagcactataaactatagatagcatggccatatgtccctgtttgcctggagctgaataaattacaggttcaaaaatactcaaataataaaattgcctaggtggtgacccacctagtttgttgctgtatggtgttgggtatctcttttttttccttgacaaatttgaaaaggccttgaaaccatgagcagattccttggttcagatggtctgtaataggagacaccaggacaagcctgagtctcctgctcttgaaagattagcatattgatagattgcatacccattatcagttaggtatctgccaaaccatttgcagcgtttctctggagttcatacagttgggaagacttcctagaggcaagaggtcttttacctgaagattcagcagttactataggggccttcttttggcttcttgctcttgggacacctttacttgaatgaggtagtcttttgccattagtgcctgtggggccttaatgattcctattgggatgagttggccagaagtgaggctctccacttcatgttgaaactaacttctgcctgagtattaaggatgggtgattctgaggtcctgagccagctggaaggactttcattcactttctactcttgtctgaagaatgcttaggctaccttactgttacttctctggtggtaccaaaggccatgtaatgacatggctggatgcgatcactcacgtctgtaatcccagcactttgggaggccaaggcaggaggatcacttcagcccaggagttcaaccagcctgggcgacataggaagacccccatctctaaaaaatttttaaaaaatctagctgggcatgttggtgtactcctgtagtcccagctactcggcaggctgagatgggaggattgcttgagcttaggcgattgaggctgcggtgaaccatgatcacaccactgcactccagcttgggcaacagagcaagaccctgtctctaaaaaaaaaaaaaaaaacaaacaaaagatgtgatgattgcctctttcggttatatcctgctgcctaagagcccaccccagaatttagtggcttaggataaccattttcatagttttgtcagtgagggattagggaagatgtcagctgagctcttcatttctgctccagatggcattggttgggcaatgggactggaggttctaattctaagatagcttcttcactcttatgaatagctcctcagtgtctgtggccagtctctctccatgtggtatctcatccaccctggcctttccacatgccttaggcttcccacatcatggtggttcctgggtagttactcttcttacagagtagggatgaaatgaaagcctctattctaaattcagttaaatactggtacaaatatttagtactgggattgtgggatcattttcttatatcataattataacccaatcagggtagaaaagtgaaagaaagaaggacacttcattttctttgctctttgtgtggatgatgggttgtacaaatagcaggaggttcaacttttggcttgttttggattactgagtactatccttcagaaatgatttcctaatactttcccggccatctggcatgagcacagaagaccttttactcaataaaagtaagctaataataataagttgaaacatcttgataataaatatatttgtacagcttttcaaatcccaggttattgaaattctgtcagccttggctggtttccatgctccttctgtgcccttgtgtttcctttttttctttttttttttgttgagccactcctgctgacttccaaaggatgctctgagctctaaaaggaggagcagttttgctggcatgcagaagtggtgaaggtaaggcttggattcaattacagtaatctcagaagttcttggtagaagaggggcacagaatcccagcctccattttgcaggtaaggaagaagaattataaaaagataaaatggcttttcttaatgtcagcatctgattctttaccttctttcaccctagcaaagattgttaacataaaacagatgttccttggacaagagaaaagtaatagagctggatcttttcatgatcctgcatttattatttgtagcactggatctctaaactaggaaaagcaatgtcgattctaactagaaattatggggcatttaataacacgtgaggcaaaattatgaggaaaggcaagaaaccaagtggctcctagcttctaacaccttattttctatggtgtaagttaatgaatgatccatttttaatgccataaaaaaggaaatttccgataggctttaccttaacttcacgttgctgtttatattacagacaaaatgctaaagttaacaagtgtaaaatgccctaggtcagggtttcgagtgcccataagcaattctctagaattattttgagtgctcagattatagatttgcccccataccatatactgtattacctatcactgcaagattctttatagggtgtcaagtatgtgggaggatttaaactaattgtcttaaatgcttcatgggataggagatgatccaatgggaactgaatgttttcaattaggatgtttccatggatactattaagcatgccaagattcatagccacaggagatttttacttacttcaatattgattaagaaatctgagaacaatctcaagaagtgtaggatgtaggcggaggataaattttgaggatagtctaaaatttgctttctcttccatagttaaggcctagtccagaaaaagtctaggcagtcagccaagtctaacagcaggatttatgtcaagagaatgtccagaataaaagtgaacatgggttgtttcatttaccccaggtgtatttattaacatttatttaatgttacttattatttgtttattaccattagctttcttatgtactcggtacaaagcattagaattacaaccctttgtatctttgttgtttatgaggaaaacatcctaaatagtgtctacagacatcttaaaattcacattcctctgagaaaggtttatcccttaggttattacttttttttttttttccacacatgggttttttacctgggttctcagatctccaagaaatcggtggatagaattcaaggtgacttcttggatggagaaaaagtacgtctttattttgaccaaccatggatatttagcattttcatcaattaatgaatgcaggtgacaaatcacagtactattggccccatctttgagtttgtcctcaatagctcacagatattttcatattgtatcacagttgttgcagatatcttgaaatattgtttattctaatcactccttcaaaatttgggtggttattggcattatcaccagttttttttttttttttgaggcagtctttctctgttacccccaggctggagtgcagtggtgtgatcttggctcactgtgacctctgcctcccaggttcaagtgattctcccgcctcagcttcctgagtagctgggattacaggcacatgccaccacggcccggctaatttatttatttatttattctttattttttatttttaaattttttttagatggagtctcactctgtcgccaggctggagtgcagtggtgtgatcttggctcactgcaacctccgcctcccaggttcaagcgattctcctgcctcagcctcccgagtagttgggactacgggagcgtgccaccacgcccagctaatttttctattttaagtagagatggagttttaccatgttggccaggatggtcgcgatctcttgacctcgtgatccacctgcctcggccaaaatgctgggattacaggcgtgagccaccgtgcctggccacattaccaccagttcttgatacttaatgccataacaaaaggcacatgtatcactatatcacaaattagcattttataatattttaataacgttttcaatataagtggcttcccttgtaatcatatattttatttttgcacttaaaaatataattcctaaaagggatccataaagcttcaccagactgccaaagcgtccatggcacaggacgttaagaaccctgttccaaatggaatgaagattagaagcactatcatatgttcattttctgatcgcagtttaagaaagagtttcctacttaagtgcttttcacagaaaatctaaacttaaaggttaaaagggaattcttttgtgctggctcatgtgtgggccctacaaagtactttgcagtcatatctgactttcgtttgagagtttgtcttcagaaatggaagaagaaaaggcattcaggtatatgacaggttgcattctgtagaacattgttaaatctatgggaggggagaaaagttccattcagtgtcttgtggattgtggtaggagtcagttgtgttcttgcagaaatttccctagacagtgcctcttgcctcctcctttcttgtcccacagtactccatggagcagatgtgggaacttggatgcctgatgggaattgtaaccccatgctttgccttatcctggtggggactgatctgaggtttatccattaaactgtatcagttcatggctgggagtaggaatgcagaaaacacaagcaaaatgactgcaggaaggtttaaataaaatctcatatgtggcttttccttaacacattattttgcaaaaagtggcagagtgaatttgctgtgatatgataggatcattctggacttttacttaatttacgtgttctctagcagaatgctgaaggagcacacataaggagtggggagttggtatttggttctgtgacaagtgctatcttataacagaaaaatacatatttttgtgaaacttcaaatgcatttttattccccagcacatctgtgattctggatccactaccttcttccaagtgtgatcaagcactgtacctgacagtatcgattatccttacccgtaggcaaaaattgtattacatttattttacagtgatctggaaaaaaaaggatgacaacaaaaaccagacacacttcatttctattccggtaacattttttggtaataatttattactgtacaagtcacacaccatataagtcacacatttaaagtgtcaaattaaatggtttttagtatattcacaggatcgtgccatcatcacagtcaaatttagaacacttattacccccaacaagaaacctcatacgctttagcagtcaccctccattgccccccagttttctaaccccaggccctaacaaccactaacctactttctgtctctatgaatttgcctcttctggccatttcatataaatggaattacacattttgtaaccttttgtgactggcttttttcacttagcataatgttttttaaggtctacctatattagagtatgtatcagtactttattcctttttatggccaaataatattccattttctggatataccagattttgtttatccattcatctgttgatggacatttgagttgtttccactttgtgctattattatgaataatgctgctatgaacattcatgtttacatcatgtatacattttaatgtggacatatgtttttagttatcttgagtatatacctaggagtggaatcatatatatatgtttttaaaccaaaatcaaattttaatgttgcagaatccctgaagcacttttaggaactgttcacttccatagaacagtttgcaaatcagtgttaaagtggagagagtgttgatttttttgtgcatgtatttggtagacatcgtttgaatcttgattttataggctgtgtgaattttgtcaagttacctgtgaacatctttcttctagtatagaatgttagtacctctggatgtttcacgagttgatagactgtattattgcttgaaaaattcactgtccatttattaccatcaactttggccacggatttgctttggctagtggcctgtgaggggaagtgatgtgtgccttcttccaggcagaagctggtggtttgcctcatctcttttcctttctgccatgatgaccattgatgttccagttggacacaggctccatcagcttgtgtatcagaatgaaaatgatgtggggcagagccctcatagattttgttgcatgagtatggaaaaagtgtcattttaagccgtcaagatttggtgactatttgatactttagcacagtggtcctcaagcaatggcagttttgcatttctcacactgagatatctggcaatgtctggagacattttttggttatcacacatggggaagtgctcttggcatttagtgggcagatgctgctaagcatccaacactgcacaggacagctcccacaacaaagaattatctgatccaaaatgtcaatagtgctgaagtttagaaaccctgctttagtataacctagtttatcctggttaagatagggtgttgagaagattaaatggaaaaaaaaatatataaaatacagcacacagggtggtctttttttggtaattatgtgacagagcttggcaatggctctgaggtcttcccttgcatttgtgggtcttttccaacttccctagggttcagtattcagtttaattgtagttgtgtttataaatcaaggctcgtttttagcagaatcatataccctttaaaaaagggggagaactaacattagatgcctgtttggcaccaggctctttgtatgtgttttgaatttttacagatattctctgaaactgatattccttacctccattttgttttgttttgttttgttttgttttgagacaggatctcactgtgttgcccagactggagtgcagtggtgcgatcttgtctcactgcaacctccacctcctgaattcaagcaattctcctgcctcagcctcctgagtagctgggattacaggcatgcgccaccatgcccagttaatgttttgtattttcagtagagatgggatttcgctatgttggccaggctggtctcttaacttttggcctcctgtgatcccccagccttggcctcccaaagtgctgggattacaggcatgagccaccatgcccggccctccattttgtttttgatgaagacattgaggcactgaagttaagtaatttgaccaagatcacatggcttataagtggtgggcctagaattcgaagcacatctgtttgcctccagaaccctcttctttccacactgctatactacctctttagcagtgactttaacatagagaaatgaaggtaatacctgatttctaacaattatgtgttgtattagttatctattgctgtataacaggttacctcaaaacttagcactttaacacaacaaaccgcttattgtctgacatagttttgagaatcagtaatttaggggaagctaagctgggtggttctggctcaggatctctatggagattgcaaacaagttgtcttccagggctgcagcgatctgaagacctgattggagcaggaagatccacttccattgtggtgcactcacagggctgttggtgggaggcctcagttcctcaccatgtgggtctctctttagggttgcttgattgtcatcatgacatggcagctggcctccttcagagtgagggatctcagagagacagcaaggcagaagccacaatatcttttgtgacctagccttagaagtcacagatgatcacttctgctcttttctattggtcacatacacaaccctgatataatgtgggagaggatgatacaagggcatcaagaatactatgagatggaaatcactgggggccatcatggaggctggttactacatgttaatgatcctcatttgccatagttacaaaattatgaattatatttccttttcatattctaatattccaaacacctgttttgtactttaagatacttaaatcatttagaatgtgagtgaaaatacaaattggcttttgtaaacacttactgaatgggtaaaataaaggccgtggtacagatacttcattggggaattttttttttaaataggtttgactagctgaggcttcttgaatcctgaaaagtttggtctgatgtacttttttttttttcctggaaaatctccttgtaccaaacactgaattcttcatttgccaaagtccacccaactttctgatgtttttattgctggtttgatgtgcttgaatgccagccagagtataaggtgaatggtagatgcaaggactgtgcagtttccacggagacttctttcaggagcccttcattttttcattcagctattgctgggaggcatccccttccagttaatgtgtggtacacatcaatttgagtggctcttagaaaggggctcagtttatacaaattaagaattgaggttttttttttctctgtatatcttcaacgttaaattagatttctatgaaacttgaagatgttaacaggaaatcttcctgaaacagtttaactatacttttgtttattacacttgattttgagcttttgggaataaaagtagggtcctggctaggtacagaggtatatggatttactgtgtctaatcgtgcaaccatgaaataaacgtttgcacttcaggaatcaacccatcactttttaaccactgttgtttgcattggcttagagctttgtgcttccttcaactattttccttttttctttcaaaactgtgttcagttggttgtgaccaattttacacagagactggctcactcacttatgttcttgactcctgctgtcccaatatcatgcttcatttacacagggatagcttttcctggctttatctgttgacttgacatcctgtgcatcatatttcttttcttagatatagagaagactgaaaaaaatccacgatttgaagaaaatttacaaaagtgcagagcaatgtgaaagagatagctttaattttaattttcactgtagtcagaataggtggcctcctgatgggcagacttgctttctcattttactctgtccagtgtagatacccagatcaatcaaggtcaagctggtctggtcattaatacaacttttggttttaaacacagctgtgtacgggggttcttagcattattaatagaggttataatgaaaacaaggtatagtcatacagttgtctgtgtgggtagtggcatggaggtggagttgttgcttaagatctgaaagtcaggaagctggaggtttttgtaattttattcattatcaatcttaagaatttattttgatcattataaatgcatgactggtgctattttccaatcctgaggttttttgggaaatttttttgaaaagaggccaggatgaggataaaaattaattttgaaaatccatttcaaagactcattatgctatgctccatcactgcaattttaatgcaacttatatattgtgcttttacctttgggactagcattcttaaaagctgacttttaatttggactttctaatatgtgtcggctctgtcagctcacgagtgtgtttttatctctgcatcatgttatattgggacctgggtggaatgtaaatcttttactggcctaaatctgagtctaatcctctgcatggctttggtagaaaatcaatttcctctgctctgtcaagatttttcaggtcagtgctctttggaagtttcccagttctcttagattaaaatagattttgtttctgtgctacatactggtattagttagtaggacactgggatctaaaagcaagagaacagaggcagacaagatatccatgagttcttctatttcagttaacttgttgacacactgcacctttgaggaaccaaggagtttgtgtgctttcaggcatcatttgggggagcaattgtaaatgactcctgtaggtgaggctgtgcacttaattttaatgagttcaggttcattaagtgacctgctcactgggtcattagaagtgacctcactagaagtgaatggtaaagagaagaactacctaagttccactcagcttgtttcactactgtggggtattggaagtagagtgacaacttggactttctcagttttagcactgaaaagtcccacatcccaggaacttactcagtccccagcaaactagggggagcgggggatggttggtccccctagcagtgaaaagtaaggggatggatgatttggaactggttagtacccttatagatttttttttttttttctgagacaggttcttgctgtgtcacccaggctagaatatagtggcatgatcatggctcactgcagccacgatctcctgggtccaaatgatactcccacttcagcctccccagtagctggaactacggggacaagccaccacacccagctaatttttatttatttatattaattaattaatttatttttttgtagggacagggtctcgctttgttgcccaggctggtcttgaactcctgggctcaagtgatcctcctgccttagcctctcaaagcactgggattacaggtgtaaaccaccatgcctggctgtcttataaatactttaaggagggatttattagagacatgtagcaccttgctgcccagtgatgctagtaaatgagtgactctactttgatttgacagaagaaacaatggaaagaggagagatggaagtttttctacctaaacttcctaagaggatgtgtttaggggatgtgttggtaaaaagttattagcattaatgtttacctgtatctttctcatagataatgcaaagacctttaactccacttatccctccttttaacttatgttgttattgccttgtattttaatactatatattaaactctacaagacatcattattttatgcaggcattgtttatttaatcagagttcagtaaactttttctgtaaatgccagatggtaaatattttaacccctgcaggccttatagtctctgtcacaactactcaactccactcttaatagtgccaaaatggctatagacaatatggaaatgattgtgtgtacccatgttccaataaaatttatttacagaaacagacagtgggccagatttggcctgcaggccttactttgacaactcctaatttagatttatctacatatttatttattttccctttatttcttgctatatctttgaggttctacctgggatcattttcaaggcaaggatgtctattctcatcactgtttttcagcgttgtgctagaaattccaaccagtgcaataaggcaagaaaaggaaataaaaggcatacagagcagaaaggaaaaaaaaaatgaaactggccaggtacagctgctcatactttgagaggcgagctaggaggattgcttgagcccaggagttccagaccagcttgggcaatgtagggcgacccccatctctacaaaagtaaaaataaaaaaaaaattagcagggtgttatggtgcatgtctgtggtctcagctacttgggaggctgaggtgggaggatcacttgggccttggaggtgaagtgagccatggtgactgtatcactgcattctagcctgggcaacagagtgacaccgcctgtctcagaaaacaaaacaaaaacctgtctctatttgcagatgacatgattgtctacatagaagaccctgagaaatctacagtctacagaataactcctagacctaattaagtgagttcagcaaggtttcaggatataagataaacatacaaaaatgagttgtatttctacatactagccataaacaaatggacactgaaattaaaaatacaataccatttacattcactcaaaaaatacttgggtataaatctaacaaagcatgcacaggacttgtatgctgaaaactatacaatgctgatgaaagaaatcaaagtctaaatagatggggaaacataccatgttccgggtttcaggatataagataaacttacaaaaatgagttgtatttcacatactagctagaaacaaatggacactgaaattaaaaatacaataccatttacattcactcaagaaatacttgggtataaatctaacaaagcatgcacaggacttgtatgctgaaaactacaaaatgctgatgaaagaaatcaaagtctaaatagatggggaacataccatgttccaggattggaagactcaacatagtaaagatatcatttctcccccaaattgatatacaggtttaatgtaattcctgtcaaaatcttagtaagatttttttgtagatataattataaaatttatatggaaagggaaaagaactagactagctgaaacaattttgaaaaagaataataaagcaggaggaatcagtctgtaagattttaagacatataactacagtaatcaagactgtgtgatattggtggagggatacatgtatagatcaacggaacagaacaaagaacctagaaatagaccaacagaaatgtgcccaattgatctttgacaaaattgcaacagcaattgaacggagaaggaaagatagcctttttgacaaatggtgctaggtcaattaaacatcaatatgtcaaaaaaaaaaaaaaactcttgctgtaaatagtacacgttatatgaaaaataactccaaatgtatcacaaacttcaatgtaaaacataaaactataaaaataattagagaaaatcttcaggatctaaggctaggcagagttcttagacctgacaccaaaggtatgatccataaaagaattgataaattggatttcatcaaaataaaaaatacttactctgagaaagacctcataagaggatgaaaagacagactacagagtggggggaaatatttgcaaactacgtatccgacaaaggactggcatctagaatatataaataactttcaaaacttaacagtagaaaacaacccagttagaaagtggaaaaaatacaagaagggacatttcactgaagagcatatacagatgacagataagcatgtgaaaagatgttcaacataattagccactagggaaatgtaaattcagaccaaagtgagctatcactacatacctataagaatggctaaaattaaaaatagtgacagcatcaaatgatggcaaggctgtagagaaatggaatcattcatactttgctgatgggatgtaaaatgatacagcccctctgaaaaacagtttggcagtttcttaaagacactaaacatgcaactaccatatgacccagcaattgcactcctgggcatttatcccagagaagtgaagatttatgttcatataaatgccagtatgtgaatgttttataggagttttattcataatagcccataactggaaacaatacagatgttctttagtggatgaatggttagacaaactggtatatccatagcatggaatactacccagcagtaaaaaggagtgaagtactgatacatgcaatgatctggatggatctccagagaattatgccgagtgagaaaagccaatcctgagtggtttaaataccatatgattccatttatgtaacattcttgaagtgacaaaattatggagatggagaacagattagtccatgccaggggttgagggggcaagggttgggagtaaaatggatagctataaaaggcatgatgaggccaggcgtggtggctcacgcctgtaattccagcactttaagaggccgaggcgggtgaattgcttgaggtcaggagtttgagatcagcctgaccaacatggtgaaaccctgtttttactaaaaatacaaaaagtagctgggtgtagtggcaggtgcctgtaatcccagctactccagaggctgaggcaggagaatcgcttgaacctgggaggcagaggttgtagtgagctgagattgtgccactgaactccagcctgggcaacagagcaagactctgtcttaggaaaaaaaaaaaaaggcatcatgggtccttgtgagcatgaaaatgttctctattgactgtgtcaatagagacacacaattatgttgtgtgtcacaaccataatcacaacattatggttgtgatattgtactgtagttttacaagatgttaccattgggaggaagtgggcaaagggtacataggatctctgggtatcatttcttacctctgcatataaaactacagttgtctcaaaaggtttaattaagaaagtatttaagaaaaagaaccccaggatctaaaaagatcagagtcagagaatcacaaatgctaaataagaagcacttttgtatttggtgatgttctgaaattctggctcagttttgttatgaaatggagccacgtgggtccatgtgagtgagtccctgtgcataggtgtatgattgactttttccctcaagtgcttctaatttgggatgttcttcactgtgtgccctttgagtgtctcttgcctctggttttttgttagacaaaaaaaccagtttttaaatgtcagttccaaggtcttttctgggtacggttaacttttatgatttcatttatgcagtgggttttcacctaagggccatggtttctagacactagactcgtttttcccaagcgattcatctctttgcctgtgggatggagagattcattctcttcttctcttttgcagtagaaactccagttttgagctgggcacctggatgcccagagtaaaggttgtactgcccacatttcattgtagctaggtgtgcctgcgtgaccaagtatgaaccttctatttagattaagccacaagataagtggagctatcaattggctttaacaaatatttagtgaataggtaaaataaaatactttatataagagctgtgtgttctgggttgaattgtgtcccccacaaaaagatatattaaagtcgtaacccttagtacctcagaatgtgaccttatttggaaagagggtctttgcagatataattaatttcaggtgaggttataccggagtagggtgggctcctaatccaatatgatgagtgtcctcagaagaaggcagtcaggcacatgtaccctaaaacttaaagtagaataaaaaataaataaataaataaataaataaaaaagaaggcagtcaggtgaagacacagacacacagtgggaaccccctatgaagatgaagatagaagcaatgtatctacaagccagggaccgcctgcggctgcaagaagccaggtgagacacatggagctgattctccctcacagcccttagaaggaacgtgccctgctgacaccttggttttggacttccagtctccagaaccatgggataataaatacatttctgttgtttgaagccacccaatttgtggtactttattatagcagccctaggaaaccaatatactatgcttttgatattatttttaggatgttgtggtttgaatatttgtgtctcccccaaattcctatgttgaaacctagtctctgatgcgatagtattaagaggtggggcctttaggaggtgcatgagggcagagcccttatgatgggattagtgttcctagaaaagagacttgagggagcttgtttgccccttccagtatgtgaggatacagcaagaaagtgccatctatgaggcagagagtgagccctcactatacactgaatctgctggcaccttgatcttagacttcccagcctccagaatggaaagaaatttctgttgtttataaattactgagtctaaggtattttgttgtagcagccccaacaaactaagacatggagtattttaaaaaatgggttgaacattcagaggcttcttaatctgagtccttagatatttggactgactctgccttctttttccagtgaaaagatctcgctgtatgaaacatagacattcttcattgccccaaagcccttccaccttccttatgtttttattgctggtttgatgtgcttgaatgctagccaaagtataaggtgaatggtagatgcaaggactgggcggtttccatggagacttcttgcaggagcctttcctttctcagttcaacagttgtcaaggaaacatctagtttcaattaaataaatgtttgtggggtctgccaatttgagtgtctcttggaaggggatttggttaaacttcttaaacatcgtaataaacaaattcagagcagaggctttttaggttcccttccagttatattaggtttttctgtaacttagggatgttaactagtcctctgtctgaagtgatcagactatttattcatatccagaaaatattatttttgagtcttgtggggaggaaaactgaggcttaaagaaagagaggccaaagccagggagctggtgttacatggcaccagctatatatacatgactatagtccatgctctttagtacgtcctgcaggataagagatccaaggggcctgacctttacaaactgtttacaggctatggagtttgctggctcagcactgtgtgtttattgcttctagttagctattgttgtatcagtggctggagttggtgatggttcacggaaatagtggtgagagtacagattctaggtatatgcaattctaataaatgagacttccctagtgttatctgtattgtgacagcctccccattgtgctctttatcaaacagtaaggtatggtatattgcaaaatgctcacaatactttgcaactcttcccatcaagaggtagagtcagtttctctattcttaggatcttggctgtcctgttgatttggtctgaccctggaatacagtagaaaagaccctgtgtgggttttgatcctaggcgtgaggtagagcttcagtttcttgctgctttgggactctgccaccttgtaaaaaaagcctggctggcctcctggaggaagagagactatgtggaggaaaatgaaggtacccagacaacccattagtcaactgcagaagcataagtgaccctcatctgagatcaattattttgagacagggtcttgttctgtcacccaggctggagcacagtggcaccatcacagctcactgcagcctctacttcctgggcttaagtggtcctcccacccaggcccccccaggtagctggtaccacaggcatgtaccactatgctcggctgatttttaatattttgtagagacagggtctcactatattcccctggttggcctcactcctgggctcaagtgatcctcccaccttggcctccagaagtgctaggaatataggtgtaagccactacacccagatctgtttgtatactttttggtcagagtgagacattccgtgaacctagtgtgtaaatccttaaacatgacactcgccatccgatcactgtggtgtgcctcacttgtcgaggctgcgcgaattgtcgtcctctgcctgtatagaaatatcaggcaccaccactcagaaacaacgaagggagtaccactcgacccacgcagcaggtatcacggaagcacggaagtgcgtgccgtttacacaaaaagattatatgatggtgcgcactgtacttgctgaacagaggtagagaagatgaagtagacttctatgttagaatctattnnnnnnnnnnnnnnnnnnnnaaactcaggctcttgaaatgccctcgctttgtgcgagctctagaagaacccccagctattgttgtatcagtggctggagttggtgatggttcacggaaatagtggtgagagtacagattctaggtatatgcaattctaataaatgagacttcccctagtgttatctgtattgtgacagcctccccattgtgctctttatcaaacagtaaggtatggtatattgcaaaatgctcacaatactttgcaactcttcccatcaagaggtagagtcagtttctctattcttaggatcttggctgtcctgttgatttggtctgaccctggaatacagtagaaaagaccctgtgtgggttttgatcctaggcgtgaggtagagcttcagtttcttgctgctttgggaactctgccaccttgtaaaaaaagccctggctggcctcctggaggaagagagactatgtggaggaaaatgaaggtacccagacaacccaatagtcaactgcagaagcataagtgaccctcatctgagatcaatggtgcctggctcggatcagtataattgtccagctgaactcagcccaaattactgacccccagagttatgaattaaataaatgctgttgctttaaggcacttaagttttggggtggtgtgttatacagtagtagataattgatacagccaagtttggaagctctggaatgatcagggctcacctttgacctgtcctctataaaacccaggattcttagtaacacagtcctgttaataacagaacttgcctatggcaaatctaagcggaaaagcagtttattggcaggatattgtgtagctacatctttctttaggaagaccagggacaaggcttgaaaactgcacaactagggggcagtactgccagaactacagccagataacctcacagaattggtagctactgaatattggatgcctccacctacaccaccaacattgcctgcattggacattgggtatggggctgctcctggaactggatgttgttcctgtcactagaaaacaatcatctactgttcttgctgtttcacagcactcattactgattcagatgcccgtgtgccacgtgtttatagcagtgcaatttgtaattgcaaaaatagggaaccagcccaaatgcccatcaatcgagtggataaagaaaatatatcaaaaatatattttatatgtgtgtgtgtatgtatatgtgtgtatatatgtgtgtatgtatatgtgtgtatatatacacacacgtacatatatatacatatatatacacacacgtacatatatatacacacacgtacatatatatgcacacacacatatatatacacacacgtaacatttataatacgccatggaatactactcagccataaaaaggaatgaaataatagcatttgcaacaacgtggatggagttggagaccattattctaagtgaagtgactcaggaatggaaaaccgaacgttgtattttctcacttataagtgggagctaagctatgaggatgcaaaggcataagaatgaaacagtggactttggggcctcagagggaagggtgggaggtgagggataaaagactacacattgggtacagtgtacactgctcggctgatgagtacctcaaaatctcagaaatcagcactgaagaacttaactcatgtaaccaaataccatctgttcccccaaagctatttaaataataataaaaacaaaaacaaatgcctgtgtgggtggtgtctggcagagcgtaggtcttgtgcccataccctgattgaaaagaaatcaggaaagtgagaatctgacacttttagcttatttagctgaaagcaggtggaaaatttcataaacactggcaaagggttcggataacaggcagccaaaagaaaaatggcaaatgttcattagtttctgttgtatactctggttagctcagttggttacagcacagttatgatgaagccagcattgtggtttgttcttaagttttattgaaagaaaatagttctgagattgtcccccttacacctgctccctctctcacagatgtgtgctgatagccatttgtaaggccaggcaatagtggggcctaacttgcatctgtctctggctgctaaggtacaaagattatgtgtctttcagttggtgggcccagagactccattcactggcatagtgtgccacataagagaactgaatgaatggtatctgtgtgaatctaaggggttggctaattgcgcagtgaatttggttcatgtaacatttataatacaaattgttgggcagcaagatctttcaatccagacggtttctagtttttcagaatttctctgataacttctctgaactctgaaattcttatttgcaaaaccatctatatagggttcatttaaatattagaaatagtactcataaagagaaaagcataatgcctagaggatgtgtaatagatgttcaataaatgttgatcatttccctcaaacttcttagattcacacaccccaaccagattagaaactctgacacggcttgccctttttgtgttcaattctctctcagttgttaagtgaagacccaatccagttgttaaaataataaatgcacctcttgcctccctgacattctggcaaccttactctgaggaggctggcccggttcgaagctggctgctccagggcactaaagctggagaagggcccttccaccctgttcataactgtggacagtaaactgtatttgggatagaggatcttgggaacaataaggacctagatccaagctcatgcattgtggtgggactgtcaatttagggggatgggtagattttatcagatctgtcagtggaaagtttggggagatggaatagtatctacaggtagttccaggtaggaggaagagatctacctggctcctagggatgtccatcctggcaagcattgctcagtggcaggagttgtaagagtagggaaggtttaggaatttggatatcagggaagtgtcagcaggtagctggggatgaggtgcaggacaaagacagacgagaggaagaccaagccttaaagtgatgagtatctagatagggaagaggatggatgggtatagcttggacacagaaaggggattcagtcatggaaagaggtcagtctgcaatgtaatgtggctatcaggtcacaggagggccaagagcaggacaggtttggggcttggttctggttagtcgaggcagagccccttagaggtgtttggatttgccatggtgatgcaggggacctgagtgtgctggttgtcatgagatcttgttgctgggagaacagtcaagaacagggtagaaaggcccttccccagctttagtgtgccttggagcaggcagctttgaatagggccagcttcttcagagagagctgccagaatgtcagagaggcgagaggtgcatttgttattttaacaattggattgggtcttcactgggagctctacaaagaaaccaaattagtgaagttagattgcctatcccaccaacaatggatgtttatggtatgagtttagctctgtgctagagaatctcaatatatttagatttgggcttgagagagagaacttcagtgtgatctgagactgaacttccattcacattcattcctcgaggaagcatgttgaggatctatgtgtaatatactggtgttccatttacttgaaatatcctggcttgctctattcctctcacttaggcactcactcctctaaaaaataaatgtgtatatgtgtatgtgcatgtgtgtgtacatgtaggtgtaagtgtgcataaaatatggaatagactgaaatcaacaaacttataaaaataccaaataacctcaatctgtaattttatttttgagaagcactaaaaatgtcaataaatgaattgtctgaaaaactaatcctttggctggtgagataagtctgagttgccagaaccagttaaagctttatataatttggcagtacatttgcgttcacctgagatttctctgcctccagctgtacaaaaattctgtgatatgcagagcctcgaaacctgggccagaatgctaaaactaattttctttcgtaatctgagccgtaattgcattttaactcagttctagtgtgaagactgcttttgtatgtgtgtgtgtttacttcatgtcattaatttctggcatttaagttagtgcctggcacatagtctaccctcagtaaatgttagttcttactgccgagtctactgttctttccttctaaaccagtggggtagatgcttcctttgtgcctcagtggttcattcccttgccctcttcccctctcctcacccttgagttgttagatcctggttttgccccaggcaggtgccaaccccgaggaactcctgaccctgtggtgatgcatgcctgcatgtgtgcagccagctgggcagcttggaaagccatagtattgacttgccaaataaggactagtttacaaaagtcataagagatcactgtcatcaactgctatcactatctattatcctttctctttccaaaacacaatttaggtgcataataaaaacatctgtagaattactctgtcaagcctatgtatgcccatcagttgtgcaagagcctcagttcctacttctaatgaattttatactgattatcccagacctttctgccagctccctaatagcagaggagagaatacactgttggagtcaggggcaaccaaagcagctagtctgagtatagaatttctttgaattctcatctttaagaaccatgctcagctgggcacagtggttcatgactgtaatcctagcacttcgggaggccaaggtgggaggatagtaatggcctggtgtggtggctcatttccataatcccagcactttgggaggccaaggtaggcagattgctggagtccaggagttcaagaccagcctgggcaacacagggagaccccccatctctacaaaaaacaaaaaagtagccaggtgtgatggcacttgcctgtagtcccagctatttgcagagggctgaggcgggaggatcacttgagcctgggaggttgaggctgcaatgagctgtgattgtgccactgctctgtagcctcgaggacagcgtgaccctgtctaaaaaaaaatggatgatatatccacatgattcagaattgaagaggtacaaaacaataaccaataaactctttctccccactgtgtcctagccaccttgttttcttccctggaggcatccagaagccaattttgttagtttcaacttctggagatggcttatgaaaatataagtaaatgcatctatattcaaccccattttagaagaaatgatacctactatatcagctgctttctgtgcaccttgctttttttctttttcacactttagcatgatgatttttctgtattggcacataaagagcttcttctttgttagttggtggttcttatggcagacaactgaatccaccctagatggttaagccaaaaagggattcggattttaggtaactcatggaatcctttggagggctggaggaacaggctagcatccgggtgcccagaaacaaagccccaagacacacgtagtactagcattaagtggaagccacctgtgctgctgccctccactgaacagcagatgctaggtatttgacttgactgcaactggctctacctccactcctggaccgggaaggcaacctagcagtgacacctgcaaaagtagaagctctgagcagagcctctttccttacatttctcacttctaaagcaaaatctggtgtggatgtatctgattagtggtgactaggtgacacatttgcatcttagcttcaatagagtctaggaattttattctcaacttttaaacttggaggtgggacttgtaataggtgaaatttttgcaaatagagaaataattttcaaagtatgatggacagtcacagatatggcaaatgtccactagagctgcttagaattccattgtatggatcaaccacaattgattaaactaatatcttagatggtagacctctaagtgttttctagttttctagtctgtgacttaggcaatactgtattaatgaccatatacatgtgtcattttgctaatgtaaaatggaatataaatttctagcagtggaattgctagatcaaaaggtaaattgtaattcttgtggatattgccaaatggtttctggatgctatactgattttttgcttccactagtgatgttcctgattttttttttttttttttttttttgcacagagtcttttccttttttagattccttctgagccagagtggcaggctgagtgttccctgctactggggtgagttttgggccttgggccaagaatgctgacaaatcagatctgggccataacctatgccaatatagactgtatttagcatctggactggatttggcttatagtttattgtagtccttctagccctaaattaaatggcatcttggggtatctaaaagataatgttgcttccaaaattgatttgcaatgtgggagtagcttacatcttggattgttatgtgttcacaaatgcataaagatgttttcaaagaatggttctaaagaattataataccttttctttttaaaaaagcaaaatcttggccgggcgcggtggctcacgcctgtaatcccagcactttgggaggccgaggcgggcggatcacgaggtcaggagatcgagaccatcccggctaaaacggtgaaaccccgtctctactaaaaatacaaaaaaattagccgggcgtagtggcgggcgcctgtagnnnnnnnnnnnnnnnnnnnnnnnnnnnnnnnnnnnnnnnnnnnnnnnnnnnnnnnnnnnnnnnnnnnnnnnnnnnnnnnnnnnnnnnnnnnnnnnnnnnnnnnnnnnnnnnnnnnnnnnnnnnnnnnnnnnnnnnnnnnnnnnnnnnnnnnnnnnnnnnnnnnnnnnnnnnnnnnnnnnnnnnnnnnnnnnnnnnnnnnnnnnnnnnnnnnnnnnnnnnnnnnnnnnnnnnnnnnnnnnnnnnnnnnnnnnnnnnnnnnnnnnnnnnnnnnnnnnnnnnnnnnnnnnnnnnnnnnnnnnnnnnnnnnnnnnnnnnnnnnnnnnnnnnnnnnnnnnnnnnnnnnnnnnnnnnnnnnnnnnnnnnnnnnnnnnnnnnnnnnnnnncacatctggctgtgtttgcagtctttaagttggcatttacctagtgcagttgattatttcaagaaaatacactttctacatggctactgagggtatctgaaaggatataaagtatagcccagggaagtagcatgttgttaggcaggggttagtaactctttctggaaagggtcagttggtattttaggctttgcaggccaagaaacagaatcaaagatattacataggtaattctataacaagagaaaaaataaacttctacaagctttttattgacaaaattcaaaacataataactgaggacttttttttttggtaatacaggtctactcataagaagaacagcattcttactttggggataacattttgcttaatgggattcaaagaatagtgttccctttcatcaaatcgattgcaaatgttcatctgtaaataccatttattttctccttgtgggccatagaaaaccaagcagtgggctggatttgacccatgagcggtagttttccaaccactgatgtaatggaaagaccatgagctttggacctggatgcatgtaggtttgagtactggctctgaatttgtgaccttgaacatatcacttaactttctgaattgggaaggtttatttgtgtataaactgagtgtaatgacacctatctcatggaaaaaatattacccccatctttgtgattttgcattagtattctagttctgtagatgctgatatgatttagctagacttacctagaaaattagtatttaactgattttaaagctgacttttcaagggatagaacactcacatggtcttaaagtacaatgtaaaaacatagctttgcaatgaagagatctggcagtcaccacattaatcaaatgaccaagctttgcaatcagtaccaatggtgggatgttctgacattgtgtgcccctcactgctgtgtacctctcactatatctcagtatcacctgtgtggtgttcttgccagaaacttttgactttaatgtaatcacaataaaacagacaaatccaaaacatgggatgttctgaggacaactggcctggattcttaaatgattcagtgtcattaagaaccaagggggattgttctagattagggggagactaagggaaaatgagataaaaatgcagtgcatgaacattgactaaatcctggatgaggaaaagaaaattcagctctgtaggcattttctggataatcaagggaatgtgaatgtggaccatatgttgtatgttagtccattttcacgctgctgataaaggcatatccgagactgggaagaaaaagaggtttaattggacttacagttccacatgcctggggaagcctcagaatcatggcaggaggcaaaaggcacttcttacatggtggtggcaggagaaaaatgaggaagaagcaaaggcagaaacgcctgataaacccaccagatctcatgagacttgttcaccatcacaagaatagcatgggaaagaccgatccccgtgattcaattacctccccctaattgttcaagtccctcccacacacgtgggaattctgggagatacaattcaagttgagatttgggtgaggacacagccaaaccatatcatgttgtatgataatattgtgttaaagttgatttccttgggtgtggtgatgatggtgcggtggtgtacgaaaatatccctgttcttagaaggtgaatagtaaagtacttaggggtggtgtgtcatgaggtgtgtctgtaacccacttttcagatggtttggcaaaatgggagggaaggagggagggagagagagaatgtgtgtgagtttgtgtgtatgtagaataggtgattctgtgcattgctgctcagttcttagcatagcactcagcacattgcttttgatagggaggtgcccaaccaaaacttgttaaactaacaagtactttaaggttttagtaggattctctgaaatcacacctcagcactgcctgtctgccctctctttagcagtgtcatttggcttaggcatatactataatgcctaatgttgggtaatcagatatgggggttcatgttttcttgagtagctcacccatgtccctctggactgaaagtctctcttgaatgttacagtataaatgaatgggaaaggaaaacccagcatagaggttgacctgcgtgttcagctgttccctgagaggctgaggtacaatttgtaagcatgtacttcagattctcttctgtatttctgttgctgagtttgcccacttggggagggttgacacctcctggggctgtgctgagtaggaggtgcatctctggagttctgactggctggagcatcactgaggtattctcctgggctatgagggctagggccaggataaagaatggtggatgcctttccttatgccttgatcctaaccggtaccctcttagctgagcaggaagggaacagagaaattaatattctcttatattcctgcaggaactcttatggctatatggtgtgagatgactaaagccaatttagcagctacttgtaaaagtaataaaaatggaggggaagaagaaagattctgatgcaacaggctgtgaagactaattcaacatttatttattgagctactgagcatatagcaggcatagtaaagtatgagtcctgggggatacaaataataagaatataccctcgctttctgctgggcacttagggcatagggaaaggagatgggctacagtggagataattatcaaaataccaattgtgctgtgttgcaaggctagggatgtgttagaaagctagtaaaaagtgttatgggaatgcagagaacatgccatgtggaattgactacagtttcaaagataaggttggtcttgaggtgacttgaagaatgagcctggcaggcaaagaaatgggcatctggtgtgactaaagtcttaattagctgtagggtggggaggagagagacatgacgatgttggaaaggtagtttgggccagacaggagggcctcagaagccatgcttggtttcacaggaagggcgtgaagagtcccagaagccctttgaagttggagggtgatgtggttttgataagaggtcacggagggaatgtagaagctggtgtgtgaaggtgtgtgagtctggagacaggacttgaaacagtcgaggcgagagcaaagaatctggattttgctagctgcagcagagggagagtagaaaatggggtgctcttggagaattcttccagcccctcctactaggagtttttacattttcaaatctttctaaggaaacctttaataatacttgagagaagcttatttaaacctttgaacagttctgaaaatgtattacatttcagccaggaaagaaagtattatttcaggcaaactggaacatggttactcagcacagtcgcctaatcttatagaattaggtaggagggaagctatgttagtggccttcaaccttcttccagaactttgttcagatttctcccaaatggtcggtgaatttttctgatttgtatccagcatcccagccatttagtgtacatccgtaagctgtaaggaagttgatttaatctatttctttttttcatctcttgccttccacctgagaaaacactactccataggttcttattctgtattaggaatttgcacaatgtgtaacctaagatggatccagctgggagttggatccagctgggagtgttacaggtttggagtttagactaaagaagaggagtggaatcttttcatttttttcccctttattttgaggaaagcccagtgatttggattgtttgaaggatcaattatatcaaatatctccactaattgagtatctgggataaactttttttttcaccttattttctttagataccattaagcatttcgacccacaacttacagcttttccatggagattttaaacttagaaaactttgaaccttgatgaatgaaaaaaacctttcagaactaaccttttttttttttttttgattcagaagtccatgtgtaagttccaaaggcttataattcttttctcttccttgaggcttgactatttcagaacgttcttggtatgtctcttggaggtttggtgtacaaagagcaaggaaagtaacctatgggcttaactcacttatgtgtatatattctactttggctccaaagcaatgattctagtggtgatatgggaccaagggacagatttcaaggtaaataaggctgtttactaatgtcagattaaggtattagtcttcaagtaccataaatgttttactagcaatttcagttacctgtagtaaagagctttccagttccatgtggtagttatggtaaaggagcaactgaaagttaacttgatagtagattaacactcactgaaaatatagttgttattttttcacataccaaggattacaatgtcttttttttttctatttttaaaatagagacagggtcttgctatgttgcccatagtcttgaactcttggcctcaagcgatcttccttgaggcctcccaaagtgctgaggttataggcatgagccattgtgcccggcctacaatttcttaatattaggagttattttgcaagacaactatctcaatgttggaactacactaatgttggtgtgtttttttccttgtgtgggatagtctgtatcttaagatgtgtaatgtatatattcacaataagggctacattataaaattcagagacattttatttttgaggtaggtttcattcacttaattgagaatttgttgactgtatcttgggtgcctatccttatgctaggagatgaatggaagttgccccctgccattgaagagaagacattttaatgggaggcagagataaacagataattaattataatgtgatacatttggaaatagtcacaaaaaacttgaatatggagattttcaaaagtacaaagaataggatattgaaccctcatgaacccactaccaaacttcaacaattactaactcttggttatgcttgtttcacccatgtgccccacctcctcccttcccccttttattttgaagcaagtctaagacactgtatcatgtgatggacattaatagatacttggatagagtactctgagaatacactgggaaaacatactgtatcgggacagggaaaggagctacagaaaagtaacatttgagttcaatctaggtggggaggaggatgttgttccaggtgatgggatggaaactgacaattattacaatgtcttgaaaaatgtgtatatacaacttttttgttcctctgaactgagcacccaagatgtaatttccaagattaggaaattgttttgcctgaggactttataaaaataattaattcacttttaatttagataaactagaataatccatgagtagtggtaacgactaatctgttctcttttcaccccagtgactttctagactttgaacattagaatccactccctgaaaaagtcactctcctttgtaactagagcaacagctatcctttgtcacctttatttttctctttggaagaggaggaataatcagtggctcacttctgaaacatcatgaataggtagaatttagtaatctgaattaaaaacctccctgtaaactgaaggaagaggaaattgaccagtgggcacacagaggttctcaagggacttttttggttagccactaggtgaaatccttgatatttcatcatgtaccttgtctcattttcctgttgtgaaattgggtgttcagcattgtttttcttgtctgttctcagatcacagaactgtgtggtgcaaagcgggttggttattttggtccaacacagttttacattgccctgaaattaattgctgcagcacaatctggcctcccggtacggatagagagtattaaatgtggtgagtatctcacatttgtatgttttattgtccatggcgagtcgctcatttatgagaaccatttttaatgagtttaaacttttgtggaatttctccttgcttcctccaactcttctgcaaaataaaataagaaaacttggcaggtaggtagcttagtttctttcttttttaaatggggaaaattctgagagtaacctgagattagttcattttaactgatttgcagttaaaatagattttattctttagcaggaagagattgggccaggaattctagagcctgtggcaaataatcacattgactttaattttccacttgaggtatctataatgttattgaaggctctgttagaggagtaacaagggagtttgagtggaactatgccttttctctttcccatacctgccagtgctcagcctttaattcttagtttccaaagcactgttctgatgctagtaagtacttgggtgctaccaaaattttggcagaatgaatttatcttcttaaggttctgatttaatattttctcatcttgccatccctgccctcaacccactgtatgcttgagcactttctacaatttaaacaaaaagcaaaacccccaactattagcagtatttctgctgcctcaggattggttttaaaaatctgtatgaaaaaggtgattattcaaggggtgtgccaaggtcctctgataattcagtttgatacagattactttcatatgtccatacaggtatgtaggaactttttttctttttctcattctgagactaaaaacctcttaactgctcatgcctgtcctgtgaagtctctgatagacatacaagtggattcaggatttatggtgagcccatggaaacctcgtaggacaatccaaatggccgagaagattgccatagatggctggctgtggaagaccaagcccttcacactaaccgtcagcaggtggcagtcatcatgctaatctttatcagggggctagcttgtgccagacactttcatttaatcctcatgacaccctactaaattaggtacttgtgtcagtttgattgcttaggataagctgcgataacaaatgtcacaatctcagtgcctcaaccagacagaggttcgttttccactttgcagtgggtcagggtgaccctccagggcagctgccctctatgtggtgaccatgtgatcctggctgctttatcttgtggcacctcccaacacaacacctgttcccataatcgccacaccagggaaagagtatctcaccctagcggttaaatgctttggcccagacatgactgaagttattgctgcccacactgcattggccagaacttgtcacattaatctgcttcagtgcagagcaggtgggagaacacaattctctcctgtgcctgcaaggagaggacaactgcgagtctctactatggctgcacactgcaagtctctactatggttatggctgcacactgcaggtctctactatggtgctgccgttgttcgtatcttacaagtatggaaatttgaactttagggaggttgagtaacttacctaagaatataaggttagtagaatttggagccaggatctacttccagtccccatgctcttaatttctatgcaaaatagccttgtctcaattttttctatttagtaagatgctgacagtaatctgttatacaatattttctgaatgggaaaaatattggacttgaaaggcatctcttggtatgacagaattttgttctttgaaataggtttcttgatggagtgtcatttgacaggcaggcttagtattcattgctgcaagacacagcggccatttgctttgattagttgaaagttgcatcacactgaatttggatttgtggtaggcactgatagtttttattccattgtaaatgatcattaagctttattatagtatcttccaattttatcttctggaaaagttagagctgctttattgtatacagaataaacttttgacacttttgttacttattttaagttagacctaagtcttttacctgatttgtgcccagattgacagtttaatttcctgagggcagggagcaggattgttgaagttatcacttgtgtaaaggattaacagtttatcacaaatataaggctttctcagttttattttataaacccagttgctgccttttacctctgagagtttatatatgtccagagttaattctgaattatcttccttcaccactctctactaatccatttaaagattgattaaataaaattatttgcagttagcatatgttgaataagaattagggcaagattgggccaaactttgagctgccacttagaattttccagtttgttgcttgaaatctattagcttaatgcttgatgacacaaatcttgaaggccaaagggatcactctgtgagaacctaatctgaaaggctgtgctagccctgtcacacccagggcatcatacccagggagttgtggatggatacccttatgtcatgaataacatgcacctgtgtgtatgtgcgtgaccctctaatccctagtccttcccatttcggtaaatgccaccaccatcctcagctgcacaagccagaaactcagcagccatcctggattcctccttttccctcactccttaatagaatccatcaaaagtcctagcaatgtggctccaatctcactccctgttgcctctatctctttgtccctgctagaccagacaaccttcatctacttacctggacaccacaatggattgacatcctagcccctcctctcttctctactgtgatctctcttttcccactggttttttgtttgttttttgacagagactcgctctgtcacccaggctggagtgcagtggcacgatcacagctcactgcagccttgacttcctgggtgcaagggatcctccaacctcagcgccccgagtagctgggactacaggcatgcgccaccactccctactaatcctactaatttttgtattttttgtagagatggggttttgccatgttgcccaggctggtcttgaactactgagctcaagtgattggcctgcctcagcagcctcccaactttttttttttgagacagggcctcactctgtcacccaggctggagtgcagtggtgtgatcacggcttgttacagcctctgcttcccaggctcaaatgatcttcctgcgtagctgagactacaggcatacatcaccatgcctggctagtatatatgtctttttgtagagatgggggtcttgttatgtttcccaggctggtctcaaactgctgagctcaagtgactctcctgtgtcagcctcccaaagtgctgggattataggaatgagccaccatacccagcctcttttcctacttttgaaagtgtgatcttttcaaaatacacagcagattattccatcctcatcctttaaaccctccagtagtctgcttgttgtactttgtaaaacattcaaagtccctacactgatctgtaacaccctacacaatctagttcttgcctacttttccatcctcatctcaaatcttaaacccttgctcactacctgttccccagtctcagtggccttctagccatttctgggtgacttttcctgctgcaggccatatgtccattttatcttgcagtcttgggttcctagggatctgtttttcctttctgcttcccctggttggctccttcccaaccttcaggattcagagtctgtccctactatcctacctaaagtagttctgtcagattcattaattcatgaaggaaccagcatatggtaaaactggctcaagaaagtatagagagtcagatttatttatagtcatagaaagaaaggatgctggaatagaattgctaaattaggtataaagctaattaacgccctacggggtaatacaagtgcagcctggctattgtacttttttctaagatgaaagtatttgcattgccgtcagacaagaattacttgttagctaacagttttttccaagttaatatctaccctttcaggattatcaaatgcccaaccaagagtaaacagtaactcagagcagaagtccatatccctaggaagtgaggtgatccttgggtgggcctgctgggtaatgcttctgcagggcaatctcctccccactttgttctttcccagcatctgtttcctgatagcacttagcagagtttgcaaatattccttacaggtttcactattttttttgtctgtcttcctcacttgtccagtttgtgtaagggggagggaagaggatctgacaccccttgcattgtggggcattataggcactctgtgtgtattggttgaatgaatgaatgaagaggtgcatgtctacgcatgaggagggtgtcttaatcatctgccactctttaatctaaaacgattggaattcagattctcctggaactccagaggagtttttacagaagtcatctcagtctgcatatcatctttcttaggcactgattttcaaccttgtcggcacttgagaaccacctggagagctttaaatataaaataaaaaaatacagatgcctgggtccatctccagaaattctaatttcatatatctgcagtccggtctgagcatcagaatttttaacagctctccaggtgatttttgtatggagacatgtttaagaataaaagctgcatcaagcatttttaagagctttgcttaaactgtgtgtgtgtgtgtgtgtgtagttacagtagctgcatctgaactagggtgctgtacgacacagggcacatgatttaagggggcacttactctcagggcaagtgccgactctacatttacaccaccctgagagtgcgtgcctccttaaatgttggcactaggtatctctctagccccaccctcgtctgagttggggttaaacagatggcaaaacagctagggcagaaggaaagaaggtgaaaattaaggactggtagagaatttctgatgaggaaatcatgtggtgaacatttgccctgggacctgctgttacctttctttccagggtctgaagttgagcacgtgtgaggactgagggaaggttaggcagaacctagagtagggtttctcatcatttttgtgccaggagcccctttggcagtctgaagcctgtgggccctttctcagaattatgttttaaatgcaacaaagacataagattataatggaaaccaattatactgaaataatcactaaaatagttaaattgttatataacaacatacatgcttctaggcctggcacagtttctcatgcctgtaatcccagcactttgggaggccgaggtgggcggatcacttgaggccaggagttcgggaccagcccggcaaatgtggtgaaaccttgtctctactaagttcgagaccagcctggccagcatggtgaaaccttgtctctactaaaaatacaaaaattagccgggtgtagtggcacatgcctgtaatccctgctactcaggaggctgaggcaggagactagcttaaacccaggaggtggaggttgcagtgagtcgagattgtgccactgcactccagcctgggcaacagagtgagactatatctcaaaaaaaaaaaaaaaaaccaacccccaaaacatatatgcttctttattaatgcattaaataaagcatctaacagtgtttgaaataaccactactttttcaaattagtaatatgcataaacagtacttcaagatgttggcccggcatggtggctcatgcctgtaatcctagcactttgggaggccgaggagggtggatcacgaggtcaagagattgagaccatcctggccaacatggtgaaaccccgtctctactaaaatagaaaaaaattagctgggcgtggtgacacacacctgtagtcccagctactcaggaggctgaggcaggagaatcacttgaacccgggaggcggaggttgcagtgagccaagatcacgccattgcactctagcctgggcgacagagcgagatgccatctcaaaacaacaacaacaacaacaacaacaacaacaacaaacaaaaccctaatgtgataggtgacaaagttaccggtattgctagtgataatacagtggcttgttgcctacattcataatggaaagaaatgctaaatttcagttatagtagggaaaatgaagttgtaatttttttttttttcctaatcaaggtgacagaccccgtgatttcttttcactagtccctttgggagcctgtgaactctgatggtgcaatgacatgattcatgtagtctttggggctgtgttccccaaactggtttatggtctggttgcagtctggcacagtttagaattaggacaaaaggatgagttatttataaagctaaatgtattcaaatctaagattgggttttttttggttcctcttgttaagtgtcctttgtgaaactgctaatgggtaatagtttggggtaaaattcttgacgagataaaacattggcaactttatgttggctttcttcatttctttttttgttgttgttgggggagagatttttcctattttgtgaaatccccaaatttgtgagccactgttgtggtcacgattctactgccaagaagatactgaggcaaatcattgaattccctttgactcctcccttatctgcaaaacagttgttctccacctaggtgatttcgtccctttagggactttcggcaaggtgaggagacatttttggttgtcccagctgcggaaggggactgcctggcatctagccggtagaggccagggatgctgctcaacaccctacactgcagaggacaggaccccctcttccaacaacaacaaacttatctaatctaaaatgccagtaatgttgagactgagaaagccttctgtaaaataaggatcaagacttaggaactctaatcctgctgccttgcttcctgtgctctagttagtttttttgtttttttaatcatacaagaaaggtagaaggattttgcagcattgagtcctatttctgtggcttttgttttcaaagaagaattattttattcaaggaaaaataaaagcagttattctctggttgaattgagggtggggttccctgtgctttgcctatttgacaaaccctccctatctcttagggctaggagagaaatcttttgagtgtgacaaccagtttggtaattcatagaaaagacaggataggaagcccaagggtaaagaaagaagcccaggaggtaaggttgtagctggctctgtgtgtgtgtgtgtgtgtgtgtgtgtgtgtgtgtgtgtgtccacacagtgtctctgtattttgaacactaaatactatgttgggatgtctcattaagctaaggtcaactcatcctttctgactgacgtccaacccaatccccctttccttttttttcctcagtgttcctttgtcaatttcctttaccccctctcccagccctgctacagggacacagagctgctttggacaaagttcgcctatgcaggttcactgactgtacggctggacatttgtgttttctaggggtctgtccctctaccccatagcgctgtcattagctctattgttgctcctccccaaaggttctccccaaccttttgagctgtggattttcaccttatttgtaaaaatctttgttgtgggattctttgacaatctagtaaaagctctggatcttagcaggaaaatacacattgacattatgtaaaaaatgttgccttcaatgtcaggggtttctggacccctagagctggttcatggagcccagtgaagagcccttcttccagagaaatgcagtgtatgggatggatatagaggaggtaagttggaagatgcatagtggggaaattgaaggccaaagaggtaaaataaaagggatgctgcttgctagcagcagagcccagtggattgtggacctcctaactcactcctggggttctacccgtggtatggccaggaaattgaacttatccaccatcctcctctgccaaacatttacaagatcacccttcccattgtaacctccaccccgccatctagcgattacctacccatttcctaattgacaagaggtatttcagatcaatgggcagataggaggataataggagactagatagctttgattactcaggcctgggttgataagactggcctgatttttttttttgttttgttttttgttttcccccaaagtaacttcaggaaaatgtgtagggatggtttcactttggaattatagaacattattgtcataattctttgttaacgtataagtagctggtataagtgaataggtaacaaaaagcagtgggagagaagggagccagcagtcaggagtcaagaatttttgttacggtcttagctctgccactgtattgctgcatgactaaggcaagtcttgctctctctttcctgggcttatttcctcacctgcaaaatgcagacatttgagcaggttttctctagattattttctgaaatgccacagtttcatgctaaatgttcaaatctgtactagaaagaattttaatgttcaggatggtagtatagccttgtggctgggaatgtaggtcctagcaataggctacctcattatgaatctttccttcattaccttttatttgtgtggcctccggccagtttcttaatttctctgtttcaaatgactccctggaggaaaaggtataccaataacacctgccttatagacttgttgtaagcacaaaatcagggaatcccttatcaaacattgtagaaaagcatctacaactttgttatttaatatcgtagccacttgccatgtgtggctattgagcacttgaagtgtggcagtgtggctagtgtgactgagaaactgaatttttcattaaatgatttaaataaaaggttttaaacagtgtaaaatattttctgttaaatgcaaccttattgatttagtaggaccacttttcacttcaaccatcaaattctgtaagacaagggtcaacaacctttttctttttttttcttcttttttaaattttattttattattattatactttaagttttagggtacatgtgcacaacgtgcaggtttgttacatatgtatacatgtgccatgttggtgtgctgcacccattaactcgtcatttaacattaggtatttctcctaacactatccctccccccttcccccaccccacaacagtccccggtgtgtgatgttccccttcctgtgtccatgtgttctcattgttcaattcccacctatgagtgagaacatgcggtgtttggttttttgtccttgcaatagtttgcggagaatgatggtttccagcttcatccatgtccctacaaaggacatgaactcatcattttttatggctgcatagtattccatggtgtatatgtgccacattttcttaatccagtctatcattgtgggacatttgggttggttccaagtctttgctattgtgaatagtgccgcaataaacacacatgtgcatgtgtctttatagcagcatgatttataatcctttgggtatatacccagtaatgggatggctgggtcaaatggtatttctagttctagatccctgaggaatcgccacactgacttccacaatgattgaactagtttacagtcccaccaacagtgtaaaagtgttcctgtttctccacatcctctccagcatctgttgtttcctgactttttgatgatcgccattctaactggtgtgagatggtgtctctctgtggttttgatttgcatttctctgatggccagtgatgatgagcattttttcatgtgttttttgactgcgtaaatgtcttcttttgagaagtgtctgttcatatccttcgcccactttaaagggtcagatagactttgtgggcagtatgattttggtcacaactactcaaccctgttgtagtatgaaagtagccatggacagcatgtaatcagaggatcatggctgtgtgctaataaaactttatttatgaacactgaaatttgaatttttaattttttttattttttatttttgagacagagtctcactcttgtcacccaggctggagtgctgcagaggcacgatctcagctcactgccacctccaccttctgtgttcaagctattctcctgcttcagcctcctgagtagctgggactacaggcctgtgccaccacgcctggctaatttttgtattttagtagagatggggtttcaccatgttggtcaggctagtcttaaactcctgacctcgaatgatccacccatcttggtctcccaaagtgctgggattacaggtgtgagccactatgcctggcctgacatttgaatttaatataattttcacatcatgaaatatttttcttttttctttttttttttttttttttgcaaatattcaaacattgtgcttgcgggatgtacagaaataggcagcagactggatttggttcttaggtatacacccaagataaataaattcatgtccatcaaaaaacatttataagaatttcacagcagctttatttacaatgggcccacactggaaacaacccaaatgtttatcacaggataatggattaaaattttcaatatattcttttagggtcttgctctgtcacctagactggagtgtaatggtgctgtttcagttcactgtaacctccaccttccaagctcaagccatcctcccacctcagcctcctgagtagctgggactataggtgtacaccaccatgcctggctaatttttgtattttttgtagagatggggttttgccatgttgcccacactggtctcgaacttctgagctcaagaaatctacctacctcggcctcccaaagtgctgggatcacaggtgtgagctactgctcctggctcaatatattcttaaaagtggattgctccatagcaatgaaaaagaatgaactatgtgtacaatacattgggtgattatcacagacaaaaaggtcgtaaaaaaagcttgtcacaagaacaaatactgtatgattcaatgtatgaagttccataatggcaaagataatctgcaagtatagaaattagtacagaggttgctcggtggaacaaagggaggggattactggaaatgaacatgaaggaaaattctgtatcttaatttgggaatttgggtgttggttacagggatatatatatatatatatgtatttgtcaaaattcttcaagtggaacacttacaattccctataaatcatcccaccatacagaatactctttacataatttaaaaagaaatcaattagttgcttacatttaacattgtaataataataaaatacagtaaaatacagatttctggccacaatggctcacattcccatgtagcaactatcaactagagctgtgctgtttcagtatggtagccagtagctgcatgtggctgttgagcacataaaatgtgacaagcacaaattgaggtatgcaaggagggtaaaatatacatgggagtttgaaggcttaatatgaaaaaaaatgtaaaatatttcattaatagtttttaatgttgattacatgttgaaatgataatattgggttaaattagattattaaaattttgccattaaaaatgttttgaaatggaaaatttttaattgtgataaaatacaaataacatttcccatcttaaccattttaaatgtataattcagtaatgtgtaaatatagtcacattgttgggtaactagtttctagaaccttttcacctcaccttacaaaatggaaactctgtattcattaaacaccttcccattttctttttcctacccagatcctggcaactgccttttttttttttttttttttttttgagtgcagtgacgtgatcatggcttactgctacctctgcctcccaggctcaagagattcttgtgcctcagcctcccgagtagctgggattacaggcgcatgcaccactacacccagctaatttttgtatttttagtagagatggggttttgtcatgttggccaggctagtcttgaactcctggcctcaagtgatctgcccacctcagcctcccaaagtgctgggattacaagtgtgagccactgcacctggcctgcccatctactttctggttctatgagtttggctactcttgatgcctcatataagtgaaaccacacagtacctgtctttttgtgaccagcttgtttcacttctttctttctttcttttttttttttttaatgtggctcacattcttttttggcagataacattgaaagactgtgaacagctgctgccattttgatggaacatgagttctctgcccagcaccctccactccatattgtctagctaatgaggctcaatgtcacttgccatttattattgcatttatgctgtttacattttttctaatggattgaggaaattgaggtatttttttttcttttttgagtgacagggtttcactgtcacccaggctggagtgcagtggcatgatgcagccttgaactctcagactcaagcgatcttcctgcctcagcctcctgagtagctgggactacaggcatatgccaccatgcccagctgattttttatttttatttttttaagagaaggggtcttactgtgttgtccaggctggtctcaaactgctgggctcaagtgatcctcccacctcggcctcccaaagtgctgggattacaggcatgagccaccactcccagcctaaagtattcctaatatatctgtatctctatcaaatatggaaaaacaaaggatttttctctcttgtagagggtcaagtgtttaaaaaggagcaggcataattttctttgtggaagggaaaaatagtcatttatgtttaatatacaaagcatttctgtgttcaaagaatgtaacctaagatgaaacatcaatgaagcaaattgtcatcttggatggccactctcattgtctcctcagaccctctaaacatttagtgtgaactcttactttgtttgctgtgtgtaattcaattcagtttgggagacaagattctaaccaatgactacaaatagaccttcttcttgacagacatcattgtatagcaggtactttattgattaattttttcaaagtttcactattaaattttgtgtatgtgtgactaggaaaaacattcagttgagtatggtgactcatgcctgtaatcccagcactttaggaggccaagacgggaggatcgcttgagctcaggaatttgagacctgtctgggcaatatagcaagaccccatctttacgaaaaataaaaaaagaaattagccagcatggtggcaagcacctggagtcccagctacttgggaggctgaggcaggaggatcagttgagtctgggagttcaaggctgcaatgagctatgttagtgccactgcacttcagtctgagagacagaccttgtctcaaaaaaacaaaaaccaaaaaaaacattcagactgaaaatttacaaactacttttacctttcactttttaaaagcttgcatcagtttaagggaaatggcaccttcatgaaagttttccatgataagaatattattatgtatggttatacttctgttaagtgagagttgcttggaaccacctgaccaaagaaagtatgagagaacttcagctgtattttgtcttttgctgtttggtggctgtctgggggagagaggtggttttctaggcacatagctctaaagaaatgccatagacagggtggaagaatgtgtgaagtgacaatgtcctagacaatatctgggagccctacttaagtcctaatataataattgatattcataattcagttagtgtattccattgttccttggaggtatctgttgaatgccagtaaggcactggtcagggagcttataaatactgagcatttatttcttttctccctcaagaagtacttggaagtagagtcatcctcttatgggtagatcagggtgcaaattattttatgtgatcttgtttcatctttttagatcctttttcctgactgagctggagcacatacctgagaccaaaaccatagagttagcttatatttgatttactaagaatctagagtttcttttctcttgcttttttgcttttgaagcccattcctgctttgagtgctggagagctgcccgagattgggaaacattaagattggttactctatttatgtctcttgggcccttggctgattgatcacacagggatttgtcatattgcctgcttcttttttttttttctggtacagaattttgctcttgttgcccaggctggagtgcaatggcatgatcttggctcactgcaacctccgcctcctgggtttaagcaattctcctgcctcagcctcctgagtagctgggattacaggcgcctgacgccacgcctggctaatttttggtatttttgtgtagagacggggttttaccatgttggccaggttagtttcgaactcctgacctcaggagatccacccgcctccgcctcccaaagtgctggaattataggcgtaagtgagccactgcgcccggccgcctgctgctttgaatcaaatgtgaacatagcaactaaaagtaaacatcatgtggatgttagagaaccaggggccttctttgcctggggaactctaggatacttgcttgctgttgctaagatgttttctggccttagcacagcatcagtcattgaaagtgcagctgtgtttttggaatagagagctgatggaagtgcaaaggcacactgatgagtattatcctgaacaatggatacagatgcaaatcattatgcataatccataatgtccccatttttgtagggttttgtgctacgtgattgtgtgtgatttgatgtgctgagaactagaagtgtgccaaagtatcatttccgctttcagaatagttttgttagaattttgaaagatgagtaaatataccagaccgttgcttttcaactctttgtagcattttgagtggctaatggttttgacagaagaatgtggctgaatgatagattgattgctctgacttgatattgttttccttattccattatgaaaagacaaccagagattggatgtgaaaattccttaaagaattacataggatgagaaactgttctacccactaagtttgccataggaacaagggaccattctgtagagcactggtaaagtaccagcttgcctgcattcaaaccgtggctctgccacagatgagttgtgtgatcctggggacattacttagctcctttatgactgtttctacttttgcaatgagggggtggtaatgatagttttatcatacagagttgttgtgaggattaaatgagttaatatttgcaaatctttaatactgtgcctggcatatttaagcattatatgaattttacctgccaccatttgtcacttattattgtattatacagtgtcatatcctttttcttggttattgaaggatgaaatgggagatcagtcccaaatctgaatttattctgcgatttggcaacattgaaaaatgttaagccagaatactttggttaaaccatagcattttaaaaatcaggacgttattataggagtactcattgtatctaaatctaaatttatatttagtgctctggaatttttcctcaaaaatgattcatcgtttggccattgagttccccttttttgcagtttttaaattaagtctgactagagcttctctgatttctggtcccaaagaattgcctctgcctcgctttatgatgtcaaagaatgatggtgagatacgatttgggaacccagctgagctgcatggaactaaggttcagattccatatttaactacagaaaaaaattccttcaaaagaatggacgatgaggataaacaggtaaacagtttgttcagatgtgttcatttgattctgaccatgaaaccgcatgtagcagggcctcgtatctactgttcagcttccagcaaatctcaccatctggaacccaattacagacttggaagtgagccagtaaagttttctcctagcaagaaagagagaccgacacatatgaatcaccaccacccacttaagggccctttagagcctactttaaagtagaattgtgtctaaaataaggctaccgatttaatacatttattgatttcactagctcagtggttttctaaatggattcttggaaatgtaacttccaggagtttttaataggttctcttctccaaaaagaagtctgtagaaaaggtttctcctattataataaatgtgtttggagaatgctgcttcatattcccttgttgagggaaggactaaatcctcagtcttggaaattcgtagtgcacattagcacggtaaaagccctgagaagttctgcagtgaagagacctggaaatgtgtgtttactaaacttctttcaccaggaaattctttcttggggaacatatttggaatactatcttgggaaatgctgccattacccatttagcaggtttggaaccagaacagggaggataggcttttaaaattagaccactaattgcaatggtcagatgatgattggtggagacaacagtataaaatctcagaagagtgggcagatccagaagaagtaaatagtctacacattagtgtaccctgcaggcatcaaggtatagctcatacttccagcaaagatactgaatcatgcagagaagtcaaattatgttcaacatagtgtcttctataaggtaaagaaatttattataggaacacttgaggctgggcacggtggctcacgcctgtaatcccagcactttgggaggccaaggcgggtggatcacaagaggtcaggagttcaagagcagcctggccaacatggcaaaaccctgtctctactagaaatacaaaaattagccgggcgtggtggcatgtgcctgtagtcccagctacttggaaggctgaggcaggagaatggcttgaatccgggaggcggagattgcagtgagccgagatcacatcactgcactccagcctgggccacagagcaagactgtgtctcaaaaaaaaaaaaaaggaacactcgaatgaaaatgtttttaaaatgcaatgaatattaaatgattatgttggaaaactaacttctgtgacttaccctgtgatgttgtgtagatgaggtgttgctacagaagttttatatggatagttaggggaggtgtagcacatcctgttaaacaattccatgtactgtcactttcataattctgacacattttaaatcagttcttcagggatatatttaaaaaggaagaggtataggaattttcagtcaatattctttggcatattttcccaccagcatttggagaggaatgagggtccactgtcccacggtggttgatgccctgggaaatttccaggcccagtccctgattgtgtgaatgagaatacatcctttcacttcaggctgagtttatgcatgccccacccaatctatgggtgtgagctcatgctttagagcaaacatattttgctttttcttgaagaagagtatttgatcagtatttcagattacatatttctctttagactaagggagcctatatatatagtctgtgtgttgatagaaagcattgttttggctgggtgtagtggctcatgcctgtaatcccagcagttggggaggccgaagcaggaggattgcttgagcccaagaattcaagaccagcctgggcaacatagcaagacctcatttcaaaaaaaaaaaaaaaaaattagctgtgtgtggtggcgcatgcctgtagtagctactgggggtgctgaggtgggaggattgcttgagcccaggaagtcaaggctgcagtgagctatgatcacgccactgtgccccagcctgggtgacagagcgagaccctgtctcaaacaaacaaacaaacaaaaaaaagcactgttttcttggtacttgaatactccaaagttaccagtctactagtaaagttttttttttttttttttttttttaaagaggaaactcagcagcagataaggttgcttactttgcctagggttctacatcaggttcatatttgaattgagattcaaattgtagcttgttaagatttcatcttagtgtttgggagtaagctggttggaatggtttacctataatgaattgttttgcagtctctcattgttaaaaaaaaaaagctagcattttactttgacatggtaagctccaagaatattaagtattaagcatttagaaatatatattttaatattcacatttgctggaagacttgataagtataaatccaggaaataaatttattaatgaatgaaaatgaaatctatccacagagagatcacaattgggagcgggtatgaatgttatttcatgtgatcagtgtctttcattttccaaaggaaaatattattggaataaccaaaagtgtttcaggctggttttagtaatttaggtaactcagcactgatgagattttattctctgggagacttcttgaatcctcagacactgctgtttaaccatgctgcatttttgagaaaacatttccccccatttgttaaaccagctgggtcaccagcagtagagttgcgttatgcttcctgactgcagctcagaacgccaggcttgagtgagcgcctctgaactctgatctggttctttgaagcaggaaacacagtctcccacgatgtcacccctcgcctcccctccttcttccccgcctcattaccagagggtgcccttgagccatggctacagcaaactgcggagcagcgcagaacagatgcatccaggtaagaggcgacctgggggccagctgtcccaggcagtgtcttagagactccttaatttaccaggcggtaacgcttcaagctgcttaatttcctgatttaattacccctgtctttggaaacatggctcaatttaattttatattctcaagcaaggtttttttttaaaaattgatttaaacatatttgagtaatgtttcatctcctgtcctagaaactagttcgtctttagacttgtaaacagctagatgatttaatctttcatatacagattttattgaatagaacataccatattaagggcttgtattttttttggaattgttattcctttctgtaagcacaccaaagatatttatatagtaactgctttaatgaaatttcttaagaaatataactgcaaaagcaaaagagttgatccaacctttgaagactgagcacgtaaatgaaaatatataggtcctgtgctttggaataaggataaaggaaatgctaggggtagcattttgctgaggggtatgtagcatgcacagttgtggggttgccttcttgctcacatttatgctctgctggcctcgttaggtggtaaaatacgttagttctgaggatgacttgcagagttggctgtttaggctgcagtgcctaaagcactggaaattcactgcagcatcttgtgcctcctggggttcagactcctagtttaagatatgaccaattaaaggtattctagaactggatatctgtaaacccccacccccccagttttgttttgtgggctgtggccccaaatgacccagtttctgcaggtttttactgcattaaaaatagtggtgacttttagagggacacagaaataaaactgcgcgctaggctgaataaagagaggctgtaatcttgcagagagaagcaggcgtggcataatggcaatagcttttgattggaagcagaaggtgtgtgggtttctgtgactagctgtaggactttgggcaggccattgaacatctctgaaccacgattacctcttctctcttaaaatggagtaacagtatcctagaggggtattagaagattaagtgagaatgtgagtataaaatctgtttggaaattaagtcctatgcacatgcaagatgatgttgctaatggatagtaacaaaaaaatcactgtcctgtaacttgaatatctcagtggggttagaaactaaatggagttgagaattcttcattttcctcttatagtttccctgatctgatttccctattttcaggagtgggttttttttttttttttcctatttctaatcttacttgggtttggaagttggtttttaattcacaggtgaaactttttgttctactgagtcagcctgtcagcaagttctacctttggtattccttagaaaacttttctgttcctcctccttaatgccccattccctcctcattccatacaaattgggcttccatttccccagtggtaaggaagcagcttgcttctctccatctttcttgactctcagcagcctgtgccaaagctgtccatgccttcatttcttttcatacttttttaaaagtgaggtaaaatatacatatgataaaatgtacccgttttatttgttcatttttgagacaggttctcactttgtcactcaggctggagtgcactggcgcgatcatggctcactgtagccttgatctcctaggtttaggtgatcctcccacctcagcctcctgagttggtgggattacagacatgtgccaccacaccgggctaattttctttttgtatttttttgtagagatgggatttcgccatgttgcccaggctggtctcgaacccctggactcaagcgatccgctctccttgtcctcccaaagtactgggattacaggtgtgagccacaatgcctggccatgcacatgttttaaatcttcaatttgagttttagcaaatggataggcccttgtagctaccactttgatcagtaattgaacatatccattatgccagagatgaccctctccggtcactccctgccccctaacgcaatcactgttctgattttcatcaccatcattagttttgcttcttctagaacttcatatgaatgaaaacacacagaatgactgactgtactcatatgtgtttgccatctttccttcagcataatggttgaaatttatctgtattgttgtatcagtagttcattcctttttattatttagtagtgggatatattgtgtgaatgcatcacagttcgacgatctgttctcctggtgctggacatttgagttgtttccagtgtttggctattatgaataaggatactatgaacattcatgtatgagtccttctgtgacatatgctgtcatttccctggctcctaggaatagagtcactcagttttagggtagttgtatatgaaactgccaaagagttctggtttgacactgaacttcagagtgatgaaatctttaggtttttttttttttttttttttttgtacacctccccttggagaaagatggtacttccagttcttattaaacctcttgtaaggggatcaaagaattatttgttttgcactgtattgcatgtttggggtttcatttgggaagaaagagagttgagtaatagctactttttaaccttctgaattcagatccaattaaggaaggagccagaagtcagacaattgatggcctgaatatcagctttattactgatatagctgatcagagcacatgtcttagatttgtgaccagatgggctttagacactcacctttccagtcacaggcaggcttggccatcccagatttcccacacaagtaggaagagaaaatctgcctctccaaaaaaggccccccatgcagctgagtcttcatccaagccctactgatgagataggtctgtctcttccaagggaaggcccttgtaggtgagggatagaagccaagggccagatggtggcctgttcccccatgtgtctcccctggaagtagaagtagaagctcttatgggaagcagaggcacgtgggattcacttcctaaggaaagctcatgaccgctagcaccccaaccatgccacagttcactgtgtttcaaaccttttggcagagcgcaattggtattagtgatttaattcagtgctccatcaacacagaatgattttaaaaatcctacttctcagaagacaatggtggcctaccagctgagacttactttttaaaatttggattatgtgctctctatgtatgtatgttttgcagtttttatatctgtattcattcttagcaggttctgaaaatctacttgatgggttgccaggcaattgttttgctattttaatgtgtgttaatgtattgtaacattgtgttccagttactaggaagaaatacaaaaagcagatgtgagcccaagagtgatttatcattcttgatgtgctattgttgtaccttctttattttaaaaagagcaaactatgttaaacatgaggtcataacaggctgctctgctctctacctaattttatttgtaagtaagctacagaaataaaacattttacttatttatatattttcaaaaacttgaactattaacctatagagatgagaaagaatttcaacttgggtgataatttctgctttctgttggagctgcatactacctggttatgtttaactgtctccctgccatattggtaaggtcattattaagtcttctggaaataaaaggagtgaaaacatacattcatttttgtggcttaaaaagttattttaaaggcagcaaaattgttttttaaaagtttggttattgaatagtagaataataaatataaaatatatttattcattttcgtagtcttctctacatgattttacattctgtttgatttatttttcaaaaataatgttggttcttagtgttcaaaatgcacattagttttcttcttggggaagtggatgatcaatggaagacatttacttaggggggatatatagaatttacctcatatttagaatttgaacacttatgacacttttctagctattgttgctttctatcccaattgaagttctcactgttccaccttcacaatttattcctaatcataacccagtgtaaatatttttctgcttatcatgaattggttgaatgtctttagattgtttagtgaaattgtgccaaagagaatcaggggttgtcagtcctagatggccctatgagtattctgttgccagttctttcctgaaaagcagatgctgtatcagtttgaatgtgaagtcataatttttgaatggaatctttgcataccatactgactttcctttctgctgtttcagcaccttatgaagctaggcagccccttgtccagcccgagggatcctcatcagggggcccaggaaccaagccccttcggcatcaggcttcccttatccgggtaagtgatgatgcagggttatgccaatgggacagtagagtcaagctttgggcttcggggacatggctttttgatggaccctttttcattgcaaggaagatataaaactgatccttcatgcaaatattgcatgtcttgtttggttgcttgtataaattactaaatcttttctactgtgtatgtctctacgccttctcagtgtctctagaataaactaggctgcttcttgatctttagtatatctaaaatgtccctctgccttcacctatctaatcattagccaccactttcaggagagcttcactttttctaaagcagcccatcttgtctctgccttattctttattattactcatttaatgcatagttaactgttttccatttgttttgtgcctctaattacatggtaaacttttggaaggcagaagtagttctgtattctctctcagtgcctagaccaagagaacagttattgtacaatggcagcagctgctgtttccttatgtaataaatacaaaagaaatattatggcaaaagcttctggctataccacagcttagacaatttcagcttccctttctgcagtgttttcctttggataaagagctcttattttgttctctgtctgcagctgttgccttgtgtagtgtctctgggtcctgtgctggggaagttatattctcaaagaagggtgtgtgtgtgtgtgtgtgtgtgtgtgtgtgcacgcgcgggtgtgcaggtttactatttgacactaaagaggaagtggggcagtttgtataacatttcagtcatctaactcgggaataaggaacatttttgcacaggcacttctactcagaatagaagggtggtgtcagacactcccataaagatgtgggctgctaggttggaataggataaacaaagtctaaagaaggtcctggggttcatggaataccttctggggatggggcactgtgttagatgtggtgcagaacttgattttctaaggtgggactctgtgtacaaataatttcttaaagataataatttagccataggctattttttatatttaatgcttcctacaaccataagatctagttactgctgcttctaatagtataagtgagttgactgtggttgagagaggtcaaatagctggtttaaggtttcattcataactagtcagtgacagagccagaatttgaatccaggcctgtccaatgtcaaaacctgctcctttcattactttgtcctacattagagtcccatattacaagaaggctaggttctagagttgctacataaagaaacgttgggtgtagtaaaaaatactcttgaaaaatcccttattgataccacactggagaaccaatatgccatttgctcccagggccagtacagctcagttttatccccaagttggaaaacacatttgtttcttcagctgagctccagatgtagtagttggctgtgtttagagatcctgtggtacaaaaatatgtgcctttaaacacgagaatcacacccactgtggagtgaggtttacgttagaaaaggtatcagtaggactgggatttatccctaagctctccaaaatgtggctgtgtaggttcctacagagtgtgtcctgggaatacagaggccagatcctgaatggttaggatgatagtcaaactaccagtgcatactgagctttacagcagtgtgactgggctcactagaccctttctacctagcccctggctggcatgggcatggatgctcatttggattggcaccctgtggcttctcttctaatctccatgttcccttttctgctgacaaacatgcttcatgagcccttcactcaactaatatttagtgaacacctattaagtgccaggcactgtgttgagaatacaaaaatgaggtataacactaacagtttctgccctcatggagctactggagagatggtcattaaccaaaccaccacaaagtaaatgtataattatgatatgggatatcagtaggaattacactgtactttaaggatgaaaatgggcatggggtatgacctagccttgaggggcaggggctgatcaaagaaggcttctggtgggggagcaacattcgagttggaataagggtacatgggtgttatccaggtgacagggtgggagtgcgggagcaaggtgacaagatggagggaaccgcatatacaaagacatttcctatgggtttgccattttatgaacattatctctttcagtgcccacagctatcttatgaaataattagtgttgttatcccattttcagatgtcagaacctgaggtttagagaccttatttaatttgcccaagttcacagctaggaagtggcagggctggagttcaaacactggtcaaggttcctcagtctctggctcaggaaccagatagatggtggtgtcacctgttgagctaggaagccctagatgaaatactggcactggggaaagatcacaggttcagtgtttgatgtcaggaactgaggttttgagatagtccagagaagctgttgaagaactggtagattacatgggtctggagcttgggagagagcttaggctggacataggtatttggcagcaattggctatcagaaggtctcatggtatagtgcagaaaaaaccagacaggtgctcgcccaagtccagcaaaactctgtgtgaccttgggcaagttccttctcttttctgtaatacaaatgacttcgaatggatttaacagcccattgtaacaatcagcaacagtccgattctcttaatgtgtctgtggttttcatggctggtgtgtttttctttcctctgttcttaggtttccttcttatgcctgttaacttggtttggctggactccgtgttccagaaagcaaaatgccaacctggattagtcatgtagatgaggggatttgaagtgaaggttcttggtgataagggattaatgtttactgggcatggtgctaggcctaggctggggtgactaatccccctcatgttgtcacgttgatgtgccgatggcaaccttctttctcttctaactagttctctggccttgtattcaagttcttcctgcctgattacaagggggcatgtcctctgggtcctgggggaagcctttagggactcccagccagtgctgttgcaacccatggtgttggcattttagaggtgcttatgccaatccagtgcctaaacattggaatgatttgtctttttgcttactattttaggaatttcacttttgttcgggtgttggatttttttccctttgaaatttcagacactaagcatatcctatgttggtagatgattgatagtgctttgtaaagaaattataagacttattttctgcttcatctgttatcatatgtttagatgttgttttgtggtttgtttttcacaaattaccctcaacatctagatgatgtagtcatttgtaattttgctggcaaaagatttagaattgcacgctttattcctactgttctcagctgcctctgtttttgccagggtcatgagaaactttatgttaagccgttgtctttattgtctccttggcagctgtggacactgaccatcttctcgaaatgctctcatcatttggtgtccattatgcctgctctcctggttttcctcatgcttctatggctgcccctgcctcatttgtttcaatcctccttcctctgccctccccttgttatgctggagactgctgggcctacttctcactctacttactctttagatgtgtggatgctcatgaccacatagcaccatctgccagacatcttcactctaatgttccactgtcactttcagctgacatgtctttctcataaaatcagctttcactcttccactcctagctccacccacccatcagcacaggccagaatgctggtcattgtctttgacttctctttctctccttatgcctgttcagtccccaagtcctgaccataccacttttcaaatagcttgtgtctgtccatgcctctgtacttcttcgttcaggccattatccttttcactgattgtattgtattagcctctctcttgtttcttcttgcttccacccttgccttcttccaattcattattctcattgcacacaaaaacaatcttaaaaacacaaatctaatcatcctgctgacttgattgaagcctgtccctctctgcccatggctcttaacatgtcatccatgttgctgtctggccctcgcctacctcctcggccacagcagctcactgccgctttccctccactctctggccatttcccggatggtcagtgttctctgcgtgggagccttactcttcaccctcacttttgccttctttgttttctcctttgtctcaattcatctatgcttttttccccattaagaacgtgaaacgtaagtgttttctgatattttcttgtatatgcgatgtttcctttttttttcattcttaaaaagaaaaagatctattgcttgtcagctcatttatgtgtgcaactcagccagagggatgggcgtctgatcattattggtttcccatctcagaggcaaccagggttgcctgtttcttttgtatcattctaggaacattttacgcatgtacatgcaaatataggtattcatatatattaatatgtgtgtgtatgcactatatgtatttatatatttatttatttttttagacggagttttgctcttgttgcccaggctggagtacaatggcaccatcttggctcactgcaacctccacctcctgggtccaagcgattctcctgcctcagcctcccgagtagctgggattacaggcattctccaccatgcccagctaattttgtatttttattagagacggggtttctccatgttggtcaggctggtcttgaactcctgacctcaggtgatctgcccgcctcggactcccaaagtggtgcaatatatttttacctgaatttagggagacatgtttggcaaatgaatatattcttccagctagattgcactagaaaaaattatcttttatttaaaaccaaaacacattcacttttcaaaccctcaggatactgttgtgatgttttctttgctttttggagggatgaaagtaacagttttctagaacatattctcaacactcactactcttcttcagagatgaaaaaatgacaaacagaatttagatacctctattactctaccattcctcagggggcttagctatatttttggtgtaagttttctaatgatcaggtaggggaggggatgttaggcattgttagccagcaccatattcatctcgaagtgcataacttgaaaaatgtttatttaacttagttatctcctttcctcctcatctcagtttcttgccgtacctcctcccctagatataactgcaggtacttacggccagaagcaggtgatctccactccttgggtcctcttggaacccaagagaaaaggcaagtttatgaaagatgattaaagaaatgaatatttcttgagctctgtcaaagtggtgttggcctgaatcaaaagataattgnnnnnnnnnnnnnnnnnnnnnnnnnnnnnnnnnnnnnnnnnnnnnnnnnnnnnnnnnnnnnnnnnnnnnnnnnnnnnnnnnnnnnnnnnnnnnnnnnnnnnnnnnnnnnnnnnnnnnnnnnnnnnnnnnnnnnnnnnnnnnnnnnnnnnnnnnnnnnnnnnnnnnnnnnnnnnnnnnnnnnnnnnnnnnnnnnnnnnnnnnnnnnnnnnnnnnnnnnnnnnnnnnnnnnnnnnnnnnnnnnnnnnnnnnnnnnnnnnnnnnnnnnnnnnnnnnnnnnnnnnnnnnnnnnnnnnnnnnnnnnnnnnnnnnnnnnnnnnnnnnnnnnnnnnnnnnnnnnnnnnnnnnnnnnnnnnnnnnnnnnnnnnnnnnnnnnnnnnnnnnnnnnnnnnnnnnnnnnnnnnnnnnnnnnnnnnnnnnnnnnnnnnnnnnnnnnnnnnnnnnnnnnnnnnnnnnnnnnnnnnnnnnnnnnnnnnnnnnnnnnnnnnnnnnnnnnnnnnnnnnnnnnnnnnnnnnnnnnnnnnnnnnnnnnnnnnnnnnnnnnnnnnnnnnnnnnnnnnnnnnntgtgagctctcaaacacacttgttcttcagagcaaatacagattttaaaaatatgtcaaacattcaacagatacaaaagggcacagtgaaaactgtccctaccatttccccgcacagccactcatcccaggggcaactgatatgacccatttattttgtatagtactatacaaaacatttatataatattgtatatgaatatcttttttatatacaagtgaaaataggtattatatataattacatgtaatatatgcaaaacacagttatgcttttttacacatatggtggcatactatacatctaacatgcatttagcactaacaataagctttattaacgttctatagcagcacataaagtacttcctcatctttttgttttttacagatgcatagtatttccttgtctgcgtcttgtgtaaatcatttagccagccccttttgattgacatcttgtacttgcaatcactgcgttgtttgcagatatatgggagaccaattcctagaaattgaattattgggtgaaaatgcctatatatttgtaatttttgataacgactttcaaattggaggtatagcagcctatgtacttgccaacaatatatgaaaatgtctgttttctcgtacctttgtgaaaacaatgtgctaacaaatttatgggtctttgccaatctgataggtgaaaaatgatagctcactgtagtttaattagcatatctctttattagtgaagtgaaatatcttaagtttatgagtcacttgtatttccttttctgtgaactgttgattcatatcaagtgcccctttttcttttgagtattggtttgtcattcttaatggcatgaaaccagaagctggtctgtcttttcctttggaccagagatatactggagtgtgtgtggaagatttctccctgagtggtgagaggagatgctggcacctgaggctctcgaaggaggttatggaccccagctgcttcccagttctggagaaccccaggcctgcctgcagtgcagatttcttgtttataaggtcatgacagtaaagttgaattacttagtttatgggtagagattagggctaaaaaaaaatcctctgttgttagagatggtaaatgtcaacactgtgtgtgtgcgttgatctctcagcattgcttagacagctaaattatgttcctttcactgaaatgggtgggaggaggagatagaggtagagataaagatagatagagggagagagtataagtgtgtgtgtgtgtgtgtgtgttaggaagagtgagtttgatgccttttctaggtatgtatgtgccttattcttgagatcttctttcaccaaattcattcctcgtttcatttgagaccccagctggacgtttataccatctcctaaggggtcaaaggttaacatgtcctccaggtgtcctacttcactgagtctactatagaacccacatatacctgaacggacactattgccacaaggaggtcctattttttcatagcctccagtctcctgcttacttattttcttcacctgcttgtagttctctttctgattttctagcccttaacttttgaggaaggatttctagctcttaacttttggggaaggaaacatttaatctcaactgatactgaagtttattttctcagtgccaatcttttctacttgtttcttttttcttttttccttttcttttcattgattgattgattgattgattgagatggagtctcgctctgttgcccaggctggagtgcagtggcgcgatcttggctgactacaacctctgcctcccaggctccagcaattctcctgcctcagcttcctgagtagctgggactacaggcgtgcgccactgcgcctggctattttttgtatatatttcttttagtagagacggggtttcaccatgttggccagggtggtcttgaactcctgacctcaagtgattcacccgccttggcctcccaaagtactaggattacaggcgtgagccaccatgcccggcctctacctgtttcttagtgtattcctcaggtgctcactgtgtaccacacttcttgacaataaaagagatgtttagttaatttagcctcccagaggtagctgaaaacactggtttgaactgctggttccaggcagtactttgtaaatctggaaaggatagtagcttattccccaggaccttttggtctcagttatatgccaggctatggatatggaagacttctttacaactggcaccattttagcccctgggcccatcagtctttcccttgatctcaggcaagcagggagtgtcatgcccccccagttgcctatcccaacaatagtcactactgactgaggtgcttctttggtcccagtgctgtgctggcccttttcagtcctcccaacaatctcacaaggtaggtattattacatcttccatttgtccatttggaaatacttaagtggcttccatgagtcagccaccatgccaggggtacactgaggagtacacctatagcctcttgctctctaggtgcttgcagtcaaaaggaggagatagatttgaatcaaatgatcccacctatgcatgtggaattaaaaactgacaattgccctaaaggccttaaaacatggtaccatgtagcaaaggaatccagcctatagctagaaagtgagagaaggctcctttaacaaagtatgtgttgagctgagctgtgaaggatgaatagaagttaaccaggctaaggaaggatggtcctgggaggtgaggagaggagtggagtgtttcctgtagaggtaagagcctctccaaaaccgcacagcagagctgggctgctgagagagctttgcttctgtcacaatcagaaagctacagcattgggaaactgctgccctagtgtcagctccaaccagatccacactacaaactaccttggcagccaaatgaaagctttgttccctgcctgtaacttgggtctgcatccgtcttccgtgggtgtatttgttgagtggaacctaagtcctatttggaattctagcagcaaaggtgttttgacagtggagtttttagctagtcagcttgtgcagtgctgggacttatgctgacgggtggaatggactcgtgacccagtctctaccatatttcacagggagagcagatacatttgaagaactgaaagaaggcagctgtggctagagcctggagtgggagggagatgaggtcggagagggaggcagggccctgtgggctatgtgactgccttgcaggtgggagctgatggctcagaagttaatttactggttagtaagtgaccatgccaaattggaacccaagtctgtctgcctctggaacctgtactctttttgcacctccagtcagtagcctcattctccaaagcattcttgaattctgtccaagttgtggatgcatctgtttcccatctgaactcagactgccttgagtgtgaaggggagaacgtagtgaagagacaggcagccttggcctgaccagcaaggacaggggtgggaacgtcatcgcttcgttaatggaagtctgcagccttgtcagagtctcctcttactgctgatttctcatttttcttggctttctcctctaagcagagcacaaaatcctgataatagtgaaggaaaagtgcccttctggaacagcaaatcttggcccctgaggggagaattggaggcagtggttactaatgagcatttcttatgttaatcaaaatactgttagcgccacatactgcaatcacagtaaaatgattacatacctggattgtatggctagctctaggattcttttgtgatgacgtgccagatgcttacctgcaaaaattatgtgagaaataaaatggtgctctgtcagtatgatttaatagttcgccagccaaaatctaaaactaaactagatgatggggaggaaggtgtaatacagcatagtcatagctcaagcacagatcctcaatctgcaaaattgcagcaatgatttaggcattgcagtgaggttctttttgtaataaatgctctatttttacaggatggatgaacagatagagataactatagagcttgatgatcaagtgtacgtactttggacccagtttgtattctggctctaccatgtgccataggtgtgtggtcttggtaaattacttcccttacctaatcctcagtttcctgttctgcaaaatgggaattaccggatttacctcgcagggttgtgaagatgaaaattgattgtgtgcattaggtacttacagtgcctggcacttagcaaagcaatgaatgcttgttacctgacattcttctgtgtctaagtgatcgtttcaaaaagtatagcttattgtaataagcagcaactgtgtgttgcacattaggctcagagagattcctacagtttggcagtcagccttctgaactattgaaattagatccctaagtaagttaggtaatatgtggttaaaggcatctttgtgggtttatttccctgaagaaacagataaggttaaatttctctgttgggacttaattttaactaacttctctacagaaaaaccaaattatttattgcaacttcctgtgaatctataattattttgaaataaagactagaaagaaggagttttttaaaaagttctctgacttcagaggtaagggagagggctcagcctttatagtgttggatgacattatgtgataaatgcatataaagttcagcttcagtcagcttaagagaactcaggttaacctttctctgtctctagactgggattgagaattttttcgaatgtttgtttgtttactcattcagcaaataacttattgagtgttttgtatgtgttagtgacttttccaggcatttgggatatagcagtgatcaggatagacaaaattttctgtcctcctgggttttatgggatagcatggggtagggtgagaggcagagcataaacaagattgatcaagcataatttggaatcgtttcatgttaaaacaaaattgctaagctctgtctccttttctaggtccttttcttcatttctcattgaacactttccccacaattttacttgagctgtcttttctttttaactgggaatctccttcaaatccatggaagatgaacctatattactcaaacacagaaagactactataaaaatgaatcagcatcctggtcctatagattgtctgcatagataatcaaattagaatgagaaagttgtttgggctcataatggtctaatgtcattggtcagattgcaaaaccacaatagcttcaggcttccatctccaggatgggctttgtggttgtgaagggcagatcttcctttcctttgggtcttgcttgaaggatacattcattgagggaacagctgctataacaaataggccccacattttaatgactttgcacagtaggtatatttctcactaatataatagtttggcaggccgctgtcctcagcatggtgattcatgcaccagagctccttctgtcctgtcactgtgccatcgtctgttcagtgggcacataggaaagagagtagaggagtgctacagggtactagtcctgcttggaagtagggtaggccactggtgctcacattgcaatggctacaactcagtcacatggctgcatgtaacttcaagggaggctggaaaatgtcatttctggttgggcagccacttagtgacacctctacaccaggcatagtagagcatgaattattggaggagtctgctgtaatcccacctatcagcactgccaccacttgcttctgtgacttttttttctcagccccatgactgaccaatttccttgatctttctttagacaaattgatattcacttgggctatagtgtagtctcaccagcccattagctatccttttctttacagtagtcaagtcttctcacatctttgctaatgagatcgttttgatcagcaattgccttgtggtagtcttatttccaaaatatttttggcggaggaggcatcctcagatattcactgtgggcttagtatgagcttttgctactccaaatagtttgtttactaaggcactaacaggacactgttaaaagatcattacccctcataggtgaaatggctggactctaaaacagcatttataggatgccttcggggtaggtttatattttaaacagaaatgttctatgattgaaacaatacacacacccttcttaagttctctccaacaatgcttccttgcaattcatattatttagctttgtttgatttttaagatagtttgatagtaggggtaaatgttaccttttgggattttattaatagtattactttttaatgagtcttttgaagtctttcattataaacagcctgctttccccagagataataacttgccatgccaaatatttgcatttcacttgaaacaaaaccaaggggttgaatgttttaaatataagcaaatctaattctcctgtgtctagagaaactgtataatgaaccatatgtatgtggcttaagcagacagatgtgaaagatttctccctctctccttttatttaaaaaacaaaacactggcagagctcaaaattggcaccaagtagcaaatatctctgctcagccaacaaaaccactggagctggagttgatggggggaggcctctttagggtgcatgcaaaagtggagcttttcctggtcctggcttctacttggaaagctaaggctccacagcttatttgccctcatttctcagtgccttcaggcttcaaaatgagccattctcaggtgactgacttttcagatctttgagaagattgttgtggttgattgttggactggttcagaagacatgggtccacgcatctgggtcctgcggtgacatggcctctagctgctgacagagtggtgctgagctaccaaacagactcataggcttcctttcacaaagaacatcatagggcagtgtttccacatctcttgcaatacaagacatacctctgaacttcctcaagcttgccaataagtagagctcacactaccttttagtatctgtgatgtacctgccagggactataggtgggataaagtatctgatatggctcctgtccttcacattgaaacctgggtgaagatgtttaggaacactttaaatgttcaaactgtggtacttaccatgactatcataaagattcatatatatttttttgagacagggtcttgctctgtcacccaggctggggttcagtggtacgatcatggctcactgcagccttgacctcctgcgctcaggtgactctcgcacctcagcctcctgagtagctggaactacaagtgcatgccaccatgcttggcagtttttaaatattttttgtagagatggggatttgccatgttgcccaggctggtctcaaactcctagagtcaagtggtctgcctgccttggcctcccaaagtgctgagattatgggtatgagccaacatgcccagccaagattcatattttttaagacgctcaaatcacttggcttagtaaatcaatttcaagcatacagcgagaagcaaggggaaagagatgggggggtaggttagcacacttagtgcaaaccagtagaagggccactctatgggttacacagaactcatgtgccctctccctttgtcctaaggcctttctaggtttaggagtaggaactctccttgcccacttaagttttcttggaagaggggttgggttctcatgggaatctaagaaatgagagccaaggaatggcccactggtctgtaggggtgggagttcttggctgttcatgcttgttctactgttaacaggccttgccctggttgtgttaagtttgctccactgtccacttatctttaggcttctgcagcctttcttgcccccccccggctttgtgtcctttctgtacctacctcccagcttgtgctgatgcttggttctggcgccctcataactttaagtcccacctaccctttctctatactacagccccactgagcatctgtttagggtctactttctcttctcattggccttgatatttctcatccacattcccaagaatgagcatctgacctaagcccttgtcagagcatctcaaaggccagtatactgtgtgcccatgaacccttactcccactcaggtgacgccaggtgtgaggtgggtcatggtgcccacacaaggctgccaggcccacctttgcagcagagcatgggaacgagcagtgccgtctgtcatggccgtgggtacggcaggtacattggaggatttgagcaggggaagagtgttctgggaagaagacaaacatcttacccctgaggagtgagcatgtgcagtcggaaagcctgctgagaggaggctggggtgcgaggcttctgaaggccaggtggaggaggtggacttttctgttaggcagcaggtcatctctgcaggcttttaagcagaggagttaatcacccccttctgttcattcctgatttctgttgttagagtagacctgagacctgcctgctaagaggccactaatgccacgctggagtgaggtgatgtcaagaggagctagaaagcagatggttatggcattgaggaaagagcacacatgggctgacagggacagctaagcagcagcttcatgagcaggagggaaagggcgtgttctaggggagcagcagcttccatgtcagactcaggaatgcagcagacccaacatccagcttggagatttcttctctttttcttttttttcaatggaactgtattttcgcaaaatgttacagatcacttatagcaaacagaatggtgatggtcaaggaaactgactctgggctcctttttgaccgcagcagctatgtggaagcagctgcagctgtgataagggccgcccagcatggatatttctgtgtcttcgttcactgggaagtggagggacagagcttccgacccacatcccaccttcttcacgaatcatctttgccaccaaatcgttggctcataggtgtctgttcttgtctttcctgcccatgcctagcttttaggttcctttgctccggctctttctgtcagggctgacctggagggcagtgctcctgtgagttctccacattatatcatggccggtaatctaatccaattcaagctgacattctccaccctatgttctaccaatggaacctggtcagacatctgggctcattcaggaagtgctgctagggcatggctctggaatttggtgggagtattttggaaggttgtgtggtctgtttggttgtttagtgctcggactggattttgattttttttgctttacttatttttactgagacggagtttcgctcttgttgcccaggctggagtgcaatggcgcgatctcggctcgctgcaacgtccacctcccaggttcaagtgattctcctgcctcagcctcccgagtagctgggattacaggcgcctgccaccacacctggctaattttttgtatttttttagtagagatggggtttcaccatgttggctaggttggtcttgaactcctgacctcaggtgatccacccacctcagcctcccaaagttctgggattacacgtgtgaaccactgctctgggcctgtttatttttataataataagaggtttttgaaaaaaattcagatagatgcaacccagttaaaaaaaatcccggtatacaaaatcctgcctttgaataagagattaaaaaaagatggtcattatttgctgcctgcaggggttcactaagggatatgggtaagttcccttagctcggaaaaaggataataattaatacccgcttacatctccaaagtcttgaggtgctcaaacaagtaggagtgtgtgaaatgctttgtacatatcaaaacactctgtgaaatttaaggtattaactaatggataatgacttcttgaacatttaagagtggtttgatttacgtttagtagaaactcatctagtatgaaaatgatacatttattacaaatgattaacaaccctacagctctcaacctctttatgtaaccttccttctgactaaaggacccagatgactttgaggaatagcctgtttgctgggtgcattctcactcagcacttctggaagtatccattctacagttagtatttcatctcattgtcctggccttccgaaagcacccttaacccaaggtgtgagatatcaaagtaatacatattttacttcagagatgacatctcaaggttttacagtagctcaacattttctagtctcctttctctgaacattgtcagaggggagacaggcgttcctgggaagaattaattcctggaatggtgtgtgtgtgtgggtgtggggaatgggaggagatggccggccttcttttctagggttagtgggtggaattgcccgcccaatgattaattccctccttgacagtgtgttcagaagcaggcaccttgatggctctttagcagcaataccctcctcttctttcctagcctccttttgtcataaagcctcatcttttttatttatttttatttatttttttttttttgagacagagtctcactctgttgcccaggctggagtgcagtggtgcgacctctgctcccaggttcaacttctgcctcccaggttcaacctctgcctcccaggttcaagtgattctcttgccttagcctcccgagtagctgggattacaggcacgcaccaccatgcctagctaatttttgtatttttagtagagatggggtttcatcatgtcggccaggctggtcttgaactcctgacctcgtgatccacctgcctcggcctcccaaagtgctgggattacttgcgtgagccactgcacccggccaagcctcatccttctggtgttcacctcttggtcctgttaaggtggcccttggcaagtacctctttagtcttagggttcatgggagggatagaacaaaggcccacgcctccccctagcatcgacatttcccttcgtctgccaatgcctaccatagctttgttttctcccgcactgcttccctggttttctaggctcttaaatcctcaaatttgacttgcatgccctctagtggcaggtctgatgcaccccttgttaccctgtttattgtggtaccataacagctgttctcaccacccagctctgttactaaatattgtctgtaattcacaaatgccgaatgagaggttcagtggtcctgacttgccactcaagtaggagctggaaatgtgggatttgaattggagcttttgattcctggatttatacagcatttcagtgtaacggcaacagtaaaaaagatgtggttatagttgttctagtttcttttttgtcatttaaaaagaatccagattattttactatccactcagctaatctgaaagaatgaaaatgtgaggaatagtggaaaataagaatgatcatctttttttaaaccctttattacaattagaaatttttttgtcacttactgagtattcagtatttcatgcctcagtcctgttaactttgaagaatacaaaaaatacataaagcatgatgtctgcccctaagtttctgnnnnnnnnnnnnnnnnnnnnnnnnnnnnnnnnnnnnnnnnnnnnnnnnnnnnnnnnnnnnnnnnnnnnnnnnnnnnnnnnnaagaatgtgggctccctaggcatcactctcaccagaacatagccaccatcttgagaaatcattcacgcaaaatgagtatggcagccttctgtgatttcagtttgtttttcatctaaagtcgaatttcttatcagatgtaaaccatgcagaagaaaagttgccaatgacgtttggaaaattatatttccatttcaaagggcttaagtgggaatttgggggcaacttggcccagaccctgcaccttatcagctgaggcagttcttgaaatgctagcgtgtcgccccaaggggccacctctcattgcttcctcgttatattagagctcgggcaaggacagaatgtggccttctaaggagttggtgtcacaagtctttttatgttatatgtgcccttcaaacttcaaactcaggctcgttttcttttggctcaaatgtttgtcctccagttttctgagagaaattaaaatgggggaggaaaattggccagtgctttcccacttgtcagttcttctgggttgtcttcagatatatagattcctgtgaggttctcaatgtaaaattcaagctcagaggaactggtttaaccccagtgaaaaaacattttacaaggctgaaagactaacagtgaaatagtagagtctagaagaaaaattcataaagctttctttttagactttaaaatttgaagaataacaatatgtccttaataattgtaacctgccatattgaagtgtggggaattattagttctataaggagaaatgaggcacataattgaaatatacttgtataagtaattgcaaacatcatttactgattggtggtaatggctttattgacggcagaatagtacagatacaacaaattaatgttgacgtcatgattaaggaaaataagcagaaacccatattgcacgatttgaccacttgctaaccttaccccgtgctcaggtgagtttctttacgacatgtgcagatatttagccaaatacaaacaggtacttgttagaaatgtttttgttttcttttaacttttgtatcttgcagaatttcagatatagacacaactagtctggctgatacaacaaacctctgtgtacctatcacatagccccaatgattttctcttacctacagttaacacataaggttgtttcagtcagtcaatgatggcggtaccataacagtatcacggagctgaaaaattccagctccattaatcacctagtgatgctgtagccatcatgatgttgtagcacaaggcagtgctcacataaatgtgatgatgctggtaaaaacaaatctgtgctaccagtcgtataaaagcctagcacatatgattatgtacagtatataatacttaataataaatggctattattagcttattatgtatttattatgctatactttttttctttcttttcttttttgagatggagtcttgctctgtcgcccaggctggagtgcaatggcacgatcttggctcactgcagcctccgcctcccgggttcaaatgattcttctgcctcagcctcccgagtagctgggactacaggtgcatgccccacaccaggctaatttttgtatttttagtagagacggggtttcaccatgttggccaggctgctctcaaacccctgacctcgtgatccacccacctcagcctcccaaagtgctgggattgcaggcatgagccaccgcacctggccttttattatgctatacttttattgttattttagagtatactcttacttatatataaaaaaaagttaactgtaaaacagcctcaggcaggaacttcaggaggtattccagaagaaggcattgttatcctaggaggcggcagctacctgcaggttattgtcctcttctagtcacctccacagtatagaggtggaagacagtgttattgatggtcctgaccttgtgaaggtctaggctgataagtgtttgtgtttcagtttttaaccaaaaagtttatacgtgtttgtgtttcagtatttaaccaaaaagtttaaacggtaaaaaaattaaaaattttaaaaatagaataatagaataaagatataaagaaagaaaatatttttgtacagctgtgcaatttttttaaatttttaaatttttgtgggtacataggtgtatatatttatggggtacatgagatgttttgatacaggcacacaatatgaaataagcacatcatgaagaatggggtatccatttcctcaagcatttatctattaagttgaaaacaatttgactacactcttaagttattttaaaattgtacagtgtgtttttgttttaagccaagtgttattacaatggagtcaagaaggttaaaataaattttaaagtttatgaagtaaaaacttacactctaaggttaatttattattgatgaaaggatttttttttttggtaaatttagtgtagcctgagtgtgcagtatttataaagtctacagtagtgtacagtaatgtcctaggccttcacagtcactcaccactcactctctgacttacctagagcaacttccagtcctgcaagctctattcatggtaagggacctacaaaggtgaaccatttttcatcttttataccatatttttactctgccttttctatgtttcttctttctttcttcctttcttcctttctttctttctttctttctttctttctttctttctttctttctttcttttcttttttttttttttttgacagggtcttactctgtgcctaggctggagtgcagtgatgtgatctcggctcactgcagccttgacctcctgggctcaagtgatcctcccacctcagcctccctagtagctgggactgcaggtgcacatcactatgccttgcctggctaatttttttgtagagaggaggtctcactatgttgcccaggctgttttctatatttagttgtgtttagatacacaaatagttactattgtgtcccaactgcctatagtattcagtacaggaacatgccatacaggtttgtagcctaggagcaataggttctaccatctagcctaggtgtatagtaggctataccatctaggtttgtgtaagtacaccctgtgctgttcgcacaatgaggaaatcacctcatgatgcatttctcagaacgtatccctttttctagaaatggaatctcataatatgtggtcttttgtgtctctttcatttagcataatgttttagttttttttttaattaaaacatttgtgtgggtacataggtgtatatatttatggggtatgtgacatgttttgatgcagacatgcaatacataataatcacatcatggtaaatggggtatccatcccctcaagcatttatcctttgagttacaaacaatccagttacattctttaagttatttaaaatatacaattaagttattgactatagtcaccctattgtgctatcaagtagtaggtcttagtcattctttctaactagttttttgtacccattagcaatccccgcctcgcccctactctctccctgccactacccctcacagcctctggtaaccttccttctactctctgtgtccatgagttcaatcattttgatttttagatcccacaaatgagaacatgcgatgtttgtctttctgtgactggcttatttcacttaacataatgatctccagttccatccatgttgttgcaaatgattggatctcattatttttttttaatggctgaatagtaccccactgtgtatacataccacattttctttattcatctgtcaatggacacataggttgcctccaaatctcagctattgtaaacagtgctgcagcaaacataggagtgcacatatttctttgatacactgatttcctttcttttaggtatatacccagtagtgggattgctgggtcatatggtagctctaattgtagttttctgaggaacttccaaactgttctccatagtggttgtactaattcccaccaacagttagcataatgttttaaaggctcattcatgttgtatgtaccagaatttcattcctttttatggctgaataattccattatatcagtacatcccattttatttatccattcatcagttgataggcatatggtgttcttccacttttggagtattaagaataatgctgatttgaatatttgtgtaccagtttttatgtgaacatatatttttatttcttttgaatacatacctaggagtggaattgctagatcaaactgtactgggagctgaaagcattcaaattcaatctcagtaaggtctaacatttcaagaacagctgggtcttgcagttatgtaacatgtaaagtggaatgattgcctgatttcagttgatacaggtaaatcaacaatgaaggaagaaagattcctggataagtttctcaaaatgccactaggaattcttaaatctcaccaaaagctttcccaagatgtctgtcttatctctgtgtggtgtgatcaatggtattaattttcttctttttggtcagttttctattacttttctatttgaaatttctatttgaaatctgccaaatttgttcaaagttttgaacttcgtcttctaaatttttggaaaaattttgcagattttggtaaaaatgaagcagaaattaatttatgtgatttgcatctttcatgagcattatgttattgcttcttttgccctattgtaatttacatatttttaaaaaagctattcatgtgttgcttttggtcccatgattcataattgctttgaggaataaatatgtttgtggttatacagaagagattgctgaatgaaaaaattgtgattcatttgtatataaatgtaaaagctactctagctgagtaattaatggtttatttaaacaatggcacttgacaggttctgtggccaagaacttcttcaccaaatcaaagctttccattccagaactctcctatatatggtaagtacaattaatgccatatgacattcataccatcatccataactcatcctttagttcctacctttgcattttttaaaggcttatgttttgaatgatgtttttaacagactacaggaatgaatacaactcagatttttgttgctgtgaaaattaaatgttatatgaaaagtacaatgaacaatgtctggcacgtattaagcactatgagtgttaactattattttaaagtaatttcctaattattatccccatctcaatcccttttcagtctaggcagttgtgggcacatgagacttaccatcctgtagatttcattttcagacttttctgctaggtgtgatacaagtaaccagaggagcttgacaaactattttttatattttataaggctgagtgaacagaaggttgaggaatattttggagttaggttagatttgactattctagctgcctctgagctttgcaaatttggctggtgtttatcagttgggccctaattcagacttgcagctgtggtatccactgcacctttatgcactctggttccaaaagggctatgctgggatggtccagatggctctatttgcattcatgaaaatgcttggtgctgctgtaaactctcggctgtgtgtgggctagttcttccccaaaactgggcaggagatcgcactgctataaatatataattaaaaacattataatgtttatataaagctttttgcatgaggatttacagaattatgataggatttaaaattgcttgtcatgttttgtgcatcttattggaaaactactccaataatactcatgcatgtcaatgtatctgggattctgagctggatttaggttcttcaacaatatatactctggcataatttttttgtttttacaagccttatattagttttgtttttgttttgttttttgtttgtttgtttgtttttttggagatgagggctcactctgtcacccaggctggagtgcagtgacatgattatagctcattgcagcctctgactcctaagctcaagcgatcctcctacctcagcctcccagctagcttttcatttttttctagagacagggtcttgctatgttgaccagtctggtcttgaactccttgcctcaggcaatcctcctgccttggtttctgaaaactctgggattacaggcatgagccaccatgcccggcccttatattagattttctggctagggaagaataaagaaattatcattttgaaaagaataccatttgttttggcagaattcccagtctaaacattgttggcatgagacctcctatctttttgttgagacacgcctatgaaagctgaatggtattctttcgatctggcgtatgaagcagtttcctgacccctcactctggggaacagctatttcagggccccagtgcattcgaaattggaggaggaggatgtaaatggtctaaaggaaagttatggagcttaccttagaaatatattttctttcaaatagtaatacctttctagaataattttgtatttgtcttatctctatgcttgtcctaacacaagtacacttgtccctgtctacctaagagatggttaagcttatggggtcttagatataatactttggcaaataagtttcttttgtgctgagtaaataggtctgtgccttttagtgggaaataatgactgaagttaagcctgtttgagactccccctttcttcctttttgtcttatctggttccagtcagctttagttactagttttatcctaaaacataattcattccattttttattgagcttacttgtgttttcccaggagggagttctcaagcaaagaacagtttggtacaaaaatttacgtgacttgaaaagttcacggttttcctttaaagctgaaaaacaaagagcttatttctgtgctccaggtaaactgcataatggctaggacaactataaaatggctggggccacccttcctctgactgttttgaacaccatgtccagggcttttcaccccatgcagcctgcatttactgaatgactgtggacttctgggtatcatttttatttctgtgccatagtttcttgtcctatgtcctcagtgttgtaagacacaccaactagggaacctgaagaatttaaatttttatttataaaatgctactgatgctgatcccatcaatcggcatttttcttcctcggagtggcccccagagatttcaaatggatttggctaggagggtttgggtatctggtagggccatcaccacagagtctgggagttttattggcacgtttgggccaagtaacttgttctgtaagccccatggtaggtactcatgacatttgtttcatttagggagcttagtgatgctgactgtgatggagccctgaccctgcctgagttctgtgctgcgtttcatctcattgtggctcggaagaacggctacccattgcctgagggcctccctccaactctgcagccagaatacctgcaggcaggtaaggcctcaccatcaactgtaaaccttaagtacttttcctccaggctgtgtaaaaaacttttgtttcctgactttttaatgattgccattctaactggtgtgagatgatatctcatagtggttttgatttgcatttctctgatggccagtgatgatgagcatttcttcatgtgttttttggctgcataaatgtcttcttttgagaagtgtctgttcatgtccttcgcccactttttgatggggttgtttgtttttttcttgtaaatttgtttgagttcattgtagattctggatattagccctttgtcagatgagtaggttgcgaaaattttctcccatgttgtaggttgcctgttcactctgatggtagtttcttttgctgtgcagaagctctttagtttaattagatcccatttgtcaattttggcttttgttgccattgcttttggtgttttggacatgaagtccttgcccacgcctatgtcctgaatggtaatgcctaggttttcttctagggtttttatggttttaggtctaacgtttaaatctttaatccatcttgaattgatttttgtataaggtgtaaggaagggatccagtttcagctttctacatatggctagccagttttcccagcaccatttattaaatagggaatcctttccccattgcttgtttttctcaggtttgtcaaactatgcagccataaaaaatgatgagttcatgtcctttgtagggacatggatgaaattggaaaccatcattctcagtaaactatcgcaagaacaaaaaaccaaacaccgcatattctcactcataggtgggaattgaacaatgagatcacttggacacaggaaggggaatatcacactctggggactgtggtggggtcgggggaggggggagggatagcattgggagatatacctaatgctagatgacacgttagtgggtgcagcgcaccagcatggcacatgtatacatatgtaactaacctgcacaatgtgcacatgtaccctaaaacttagagtataataaaaaaataaaaaataaaaaaacaaacaaacaaacaaaaaaaacaaaaaaacttttgtttcttaaaatgatgtccagatactttggggagtccttggtatttacagttattgttctttaactgctattagactttcacatctcataatgtgaggaatagggctgatctgggtaagtgtgtattacctgtttttctcattctataccctctggatggatttgaaccaaagtcacttaccctttcatgacagttgtgaaataggcaagtactgaacctcccagctggtataaaatgaagaggaagatcctgtagagccaagtgttaacttggcatttttaggcacacccgagtgtctccgggtggccctgggcaatggagtggaatggaactcttatacctaatttaaaagtcaaaaaattagccgggcgcagtggctcatgcctgtaatcccagcactttgggaggccgaggcgggcggatcatgaggtcaggagatcgagaccatcctggctaacacggtgaaaccccatctctactaaaaaatacaaagaaaaaaattagccgggtgtggtggcgggtgcctgtagtcccagctactttggaggctgaggcaggagaatggcatgaacccgggaggcggagcttgcagtgagccgagatcgcgccactgcactccagcctgggagaaagagtgagactctgtctaaaaaaaaaaaagtcaaaaaattacatgcagtgaaatgtgcaaagtgttgtcaccttaaatgtatgcttgatgaatttttgtatatgtatacacccatgtaactacaatcagatgaagatatagaatattctagcatatcagaaggttagaatagaactgttatatttctccttaataaaacagtctcgctcaaattattgttttggaccctttagatgggaaagagtcatggtgagtataacatatgtattaattcctttgggagagtagaaaaattaatagtgtgtcttgcccttttcaaaggcaaatgggcactggtctgatttccattattcatggaagtatagtgctcattgagaggccccagaaacagctggtgctttcaacaacctttctcactttttagggaagggctgttaaagaaatgagagcttagtcatgggtgattattagcaagagagagcagtgtctaaagaaactttaattacttattagtagagtatgaattttgtgattagatctgcaaaaggccttagattatcttgtctagccccttcctcatgatgacaccagattcaaagtggcaaatgtcttatctaagtttgtctcggggcctctgactctcttaaataaaaagtctgtcattttctgtgttaaatagtgagaggagaggaactcaaccaaagggcagaggccaagtttgtggctgctgctaagtgacaggtaaacatgttgggggaagagtgacccattctgggatcttcttcaaatgtcctcataaaatatgtgaaggggagagttcagagagcaaaacctactaatttctggacttggattttgctaacaatacctgctttctgcctattgcaggctgtaactctagcctgctgcccttccttagatgcttggaagactctcatgggtcccaggaattagcttgcaattgaggagcatgggaaactcctcttttctctttggtgtctttctgtctccatttcattctctccctcgtcttgtcttgtcttgtctttttcttttcttttcttttctttctgtttcttctgaatcagggcaaagaagcactggcattctgggggctatcttgacgcctacatggctctcattgccaaggcagtgcggggtcatagaggagccccttttcttgggattggagacacatggggcttttgtctctctctaaagggaattaatagctggcaaaaggccaagttctgttctagggttatatttaataccttcgccgtgtcctctttcaagccctggagagagtcctgggtaacctcatctcccatacccacactgagttttctgtttgggggtcatgactagtactgttttattgttttgatgccatatggccatggaacctgtgggacatgccatgactccttatttgataagtcacttttgtaggtgtccaagtgtttcacagactatttcaaaagtcactgacataacggctgggtgtggtggctcacacctgtaatctcagcactttgggagtccaaggcaggtggatcactggaggtcaggagtttgagaccagcctggccaacatggtgaaaccccatgcactaaaaatacaaaaattaaacagatgtggtggcgcacacctgtagtcctagctactagggaggccaaggcaggagaatcacttgaacctgggaggcagaggttgcagtgagccaagattgtgccactgcactccagcctgggtgacagagctagactccttctcaaaaaaaaaaaaaaaaaagtcactgacataatttttagacatctgaaagccctgagctaaaagtatgttaacaggaaagaagtaatctcttgattcctttcctactgccaatggcttcttttgacctgcttattcagtagaggggaatctataaaaaagagtgccaatgagccccatgtttcttcctggacttttatggagactgtcagcatgcatttatacaggaacaagggaagaatccatcatatacacttcaattaaacaaaaattgcacatcatttctagggcttgtgggattaatcttaaataataattatatagttctaacagaaaacatgaaagaacccataaaactctatcaaactcagtgacggtatattttaaaatgctttatcacctatgtttatcattgtatgaagcttaagaaaatggccagaaccacctaggtctcctctgtgctttttttgcttttctttgcaaaatatgagtgatcctattcatttttttgttcattttaatggcatctcatttagtgtttttcttttttctttctttctttctttttttttttttttgagacggagtcttgctctgttgcccaggctggagtgcagtggtgcaatctcggctcactgcaagctccacctcctgggttcatgccattctcctgcctcagcttccaaagtagctgggactacaggcacatgccaccatgcccggctaattttttgtatttttagtagagatggggcttcaccatgttagccaagatggtcttgatctcctgacctcatgatccacccgcctcggcctccgaaagtgctggacaacacgcccggcctagtgtttttttttttttttttaaagcttaactcttacctttttccaacttttttctaattgatctatattcagtctttaaaaaatctaatccagtttttgataagattggtgaagagtataaatttggttgatatcttcatgcattcataactagacaagcttgttttctaaaataataattttttttttgagatggagtctcgctctgtcacccagacttgagtgcagtggcatgatcttggctcactgcaatctctgcctcccgggttcaagcaattctcctgcctcagcctctcgagtagctggaactacaggtgcctgctaccatgcctgacagatttttgtattttagtagagacggggtttcaccatgttgaccaggctggtcctgaatttctggcctcaagtgatccacccacctcggcctcccaaagtgctgggattacaggcatgaaccacccaccacacctggcctgttttctaaaataatggaacaggaattgtatctgatgccattttacttgcaattatggaaatagtcccttttccctaatagtaaaacttcaaggacagagttgtattagttggtggcttacccgctagccttttgatagtttcatcaaaagtctccttttgatagtttcatcaagagtctccttttgatagtttcatcaagagtctccttttgatagtttcatcaagagtctccttttgatagtttcatcaaaagtctccttttgatagtttcagctgggtggggtggctcacgcctgtaatcccagcactctgggaagctgaggcaggaggatcaattgaggtcaggattttgagaccagcctgggcagcatggtgaaaccctgtctccaccaaaaaatacaaaaattagccaggtgcggtggcgtgcacctgtggtccccagctactcgggtggctgaggcaggagaattgcttgaacctgggaggcagaggttgcagtgagccgagattgcgtcactgcactccagcctgggtgacagagtgagattccatttcaaaaataaaataaaataaaaataaaaaaataaaaaaagtcaccttttgataggtgattgggtgggttctggtagaaatttttgccatagagtttgttaaaaaatacctatggagtacttactgcgtgagaggtaccacattgttcactgtggtcagaatgctgtatgacagagctcctactcccatgaacttgtgggcagttgatacgtgccatgaaggggaagtacaggtgcagcaagagggtgcatgatcttagggaagatttccttaaacgtttgggctgagatgtgaaggctgagctaaggactacataggtgaagaagagagaagcttaggttctgggaagggggaacagcaggtatgctggggaggctctgagagggggcttggagcataggaggagtgggaatttcaggccacagtggctggcgtgcacagaaccggggtagagaggctgggttgaagctgaggaagaaggtggggaacatatgacgggcaataatgtcaccttattttaggcagataagtgacacaatcagatttgctatgtgaaatgatcatgcaggttactgtccagagaacaggttttgaggggcacgggtagaaaccagaagactaagttgtggtagctggccagtcaggagcagcggggtgcttgcaatggggaggtgacagtgatatggagagatgtggacaccttggagagagatttagcaggtaattgacaaaattatagttttggaaagtgttagctttcttcacaggaagatccgctcatgataaagcatcagtcatataataccagtcagagccttgattgatagactagaaagagaaatcggtgaaattcagaccagagtaagcaaatgaacaaattaaggtgcttgtactcaactccatgtggtgctgatactcagaccagtacttccttacttacttactgtatgtatgtatgcatgtatgtatttatttaaattagatagacacgtaggtaggtaggtaggtagatacaaagacagatgaaacagggtctcactatgttgcccaggctggtctcaaactcctgggctcgagcaatcctcctgccttggcctcccaaagtgctgtcattacaggtgtgagccaccatgcctggccaatggccagtactttactgcagaaggatattggcatttcagtccctgatgggagtgggagggtggggaaggattaaaaacaatgccaatccacttttcacatttgattcaaatttttttaaaccttgcattacaattttatttcctaatagcttgttgtgacaaatttgatttgtagcttctgtttattatctgccacagtctgcttttcctctttggaatattgacaaattttctagctgttgagatatttctttcctaattactttgtgacaaagtagtgaagcagaatccgcttctaagacatagcctggtgtgaagtaattagcttaccaagtagcctgatctttcctcgtgtgaattcactcaactaccgaaataacagccagtgtcactattgcatattgaaagaaacccttaatgtgattctttttttctttgttgtaaatcagcaagaatttatgctcttatttttatcattcctgccaaccaaggagataaatatttcgtaaaatcatgttgggtgcacatcattataagatcttgcctatttctaacaatagttaaatgatgtatttccttagttaatgtccctatacattagaaactacactagtaacatagttaagacttacatattgtgatagtgatggttattgtggaaaattactatgctataacatgaagtgttcagagcacatacccttcagccagactgctgagagttcaagtccctgctcttccatttatcagctgtatgaccttgagtaagttgccctgttctcagtttcatcacatgtgaaatggggataatagaagtactgggttgtccatataaagaactgaaagtactacctcagcatgatgaatgccatatgtggtctatcagagctagctgattttgttgttatatttaacaagcacagaaaagctgatgggaaacactgattactatggctataggaaatattctgatatattctttttgtttcttcttagcttttcctaagcccaaatgggactgtcaattatttgattcttattctgagtcactgccggcaaatcaacaacctcgtgacttgaatcggatggaggtaaaagatcttcatatgctaataaataaggatgtgtatggagctaaatccattggcctatgttctttacaaattctggaaaatgaactttttttttgtttgaaaatgagcttttataacatttccttttcatacttggtaattattaatactttgatgctcagcctttcagatctagacaccagatgtatctataatttttttcccttttctccctaaaactggatgtggtaaagtaagtaacataatctctagaccttctagatgtgaaatgtagatatagccaaactaagacagaaaattctagccaagttatttactttaaccaagctttaattccctagtaaacaattttgattgtatttttatcagttgggcattaataagctatactgaatcagaactgttttgagaagaggtttgagaactttatttgagggccccaaatcacattcggaactccctcagggtttttagcttttgaaccaaatgaggactgatttggatgatccccagaaggaacttggagaattcccccagtgttgggccatggatggaagggcttagccaagtgcttaggaagccttagctatggatcaataaataggagttgttatagttattgttgtcatcaccattgtcattatcatcatcatcaccattatgattactgtgatgacaatttaggatacctgcttttcccttccttaaaagatctggaaatgtttaataaatggagctttattcacagactccataatagtcagagactattagagtcctctgaccctagttgaaaccactgcaagatgatagaagtcaaagtcagggaacagggacatttctttaatttcttgtgactgtgcatgatgatttattctctcacatgaggccctcatgcctgtagcatgtgttatggatggcaccgtctgctcccctgtgagccagtcaagcctgcctttccagtgcccctctgactaacatctctctgccattttgcttctctttctttgagttgtgtcctccatggtactttcctcagatttctactcatgggaaaaagacataaagaaaagtcacttcaggaggaatgacagatgtgcatttgaagaattttggttaaaattttttttttctgcagaatgcttatgacaaagagagagataaaatagtttgccacttttcatggccctcagtttactttggggcttctagcagtgtttaaagagctttgtttatcaagccaggatggatacatctatggctctctgactatgtgtgtgtgtgtgtgtgatgggccccctgcttgcataaaatgatgaagttattagttggtcttctttaaaacggccataaaatctgttacacatgcacacgtctgttttactgttacacacacacacacacacacacacacacagtctctctcgcttgctctttctctctctctaatgtcctggatggcgttacatatattcacctttgtggattttatatgcagctagttttatatacttttgcatactttaagtggcctccttggggaggggagattaaaaactacctagtctttttttttttttgccctatccaaagaagaaagcaaaacaacaacaaaaaatcccctcttttccaaccaaattgttatttttgaggatgctatggttttagacaatgaatgcagtaaacagaattcaaggacaaagtaatagggtttattgatggtttgttcatttaagaagtacgggtcagattgcaataatgattcaatatttcatgttcttctaaactattactgattgttctttctactagtcttttaatctatcatgaatgcatggagtttaattagattttggaaccagccctgtgatcgatgactccagtataggtggttgtgttctgaacaaagctgcagctgatttaggtctcaggtcatgagaaattggcttagtgatacatctttttctaaagacagcagagctgttagccatgtacttatttccattaagaattacagatgataatttcaagtatatttctttttatgagtgtctcttacattactggatttctttctttttctaaacagctttattgatagagactttacataccatacccatttaaagtatacaattcagtaatttttattatattaacagttgttccaccatctctacagtttaattttagaagaacatcatcagcccaaagagaaacccaatactcatgagcagtcacttcctattccactgtctctgccagcctctgataatcactagtctattttctgtctctagatttgcctattctggacatttcatataaatggaagcatatagtatgtagtgttttgtgaccgtattctttcacttagtataatgttttcaaggttcactcagatcataacatgtatcagtgcttcattcctttttaatgctgaataatattgcattgtatggatatgctacattttgtttgtccattcatcagttgatggacatttgcattgcttccacttttggctattgtaaataatgctgctatgaacatagatgtacaagtttttgtgtgggtgtgtgttttcggttctctcgagtgtatacctaggagtggagttgttggattgtatcataacttaactttctgaggaaccaccaaactgctttccaaagcaactatactattttacattcttccactagcagtgtatgagggttccaattttcccacatccttgttaacacttattgtctgcctttttgattttagacaccctagtggaatgaagtggtatctcattgtggttttgatttgagtttcctaatgattaatgacgttgagcatctttttgtgtgcttattagccatttgtatatcttctttcgccaagtgtctcgtcctttgtccattttaaaattgcattacttgtctattgaattgtaagtgttcttgtgcttttggcatcatatctaagaaaccattgcctaatattaaatcacgaagatgtacttccatgttttcttctaagagttttgtttgtttgtttttttgttttgttttgttttttgagacggaatctcgctctgtcaccaggccagagtgcagtggcgtgatctcagctcattgcaacctctgcctcccgggttcaagcaattctcctgcctcagcctcctgagtagctgggactacaggtgcgtgccaccaagcccagataatttttctatttttagtggagacggggtttcaccatgttggccaggatggtcttgatctcttgacattgtgatccacccacctcggcctcccatagtgctgggattacaggcgtgaaccactgagcctggcctcttctgagagttttatagttttagacctttacatttaggtgtgtgattttgagttaatttttgtgtatgttctgaggaagaggtccaactttatttttttgtatgtggatttctagtcgtcccagcaccatttattgaaaagatgtttttttccccattgaattgtcttgcacccttgttggaaatcaactgaccatagatgtaagggtttatttctgggttttcagttctattctattgatctatatgtttatgattatgccagtaccacagtgtcttgataattttagatttgtagtaagttttgaaatcaagaagtgtgaatcctttaacttttttcttctttttcaagaatattttgctattctgacttccttgcatttccatatgaaatttaggacaagcttgccaaattctgacaaagattgcattgaatttgtagatcagtttggagagtatggccaccttaccaatattaagtcttctaactcatgaacatgagatgtctttccatttatttagatatttaatttctttcaacaattttttgagatttctttttatctacattgcctacttctaaattatgttattctccaaaggggcctgatttataatgcaggtgggaaaagacaatgaaagaaatgcactgttatgatacattgtctgttctattggagatagtagactttgaatagaaaattatatctggatacttcgttttaatgagtaaatcccagcactatgtgaggccgaggtgggcagatcacgaggtcaggagattgagaccatcctggctaacacggtgaaaccctgtctttgttaaaaatacaaaaaattagccgggcgtggtggcatatgcctgtagtcccagctactcaggaggctgaggcaggagaatcacttgaacctgggaggtggaggttgcagtgagccaagattgtgccactgcactccagcctgggcaacagagcaggactccatctcaaaaaaaagaattacctgagtgaagactgttaaatcttagaccagttttctactgagtaatacttcagtctctttcttcagaacagtttaaaaacaaaagtattgcttatctctctggggttgtttaggttctgagaggtaaaccaattaactttttggaacaccagatggctccaggcatttactctccttccttcaagataaatgttacaatttatctttatttaatttgtgactatgttttaaatataaacaatatcaaaagacatatgttgacaagtcttcctcccatctaccaactcacctttcaattcttacatatctttccagagtttgtgtatataaataaagcaaatgtgaatatatattattcttgaacttaatcttataggcattagagtgcatattcttttccagctttgaggtataattgacaaaaaatatatatttatgatgttttcatctatgtatatattgtgaaatgattactgcaatcaagctagttaacatacctgtcacctctcacatagttacctttttttggtgtggtgagaacatttaacatcaactcccttagcagttttcaagtataccatacattgttattaactatagttagaatgtgtgttaaattgagaatttacaagaagtaaatttacagtaagtagattttaaacggtttaaaactaattcatacttgatagatttgggtattcatattagtgtgaggacttcccccctgtttgcattaggagaaaattttaatctgctcatcagtaaaattcttttatcccacaacaagaaggctggtttaatcaggtttagacaccatctgcatgacagatcttggcaaacacccacattgtggggccacttgtcagaacttctttgtgtttgtgaaaaaatacataaagaacaggtttgttcttggccaaatggaccagagttgctatgcaattctgtggctgaatcccagtctgaattcagatttaatacatgtgccttaatctgaatcatttttttcctctgtgtatgtaaaatttcaatacaaattaacatatacctcactaggaacctaaaaaaaataaggtagtattaaatgcagggtttactgcagatggaaatggtggcaagaaataatagcttttaagacattttcggctgggcgcggtggctcacgcctataatcttagcactttgggaggctgaggcgggtggatcacgaggtcaggagatggagaccatcctggctaacacagtgaaagcccttctctactaaaaaatacaaaaaattagccaggcgtggtggcgggtgcctgtagtcccagctactcgggaggctgaggcaggagaatggtgtgaacccgggaggtggagcttgcagtgagccgagatcgcgccactgcactccagcctgggcgacagtgcgagactctgtctcaaaaaaaaaaaattttttttcatcatatgtgcgcatcacttaatttctgttccaaccagtttaattcatttacttttctttttcaaagaagacatctgttaaagacatggctgaccttcctgtccctaaccaggatgtaactagtgatgacaaacaaggtaggagaagaatgagttttcttctttaaccagcgttctacctgttaccttatctactcctcttggaatggtggcttctagagcatatgagggtggttctcagcatgtaaacacatttggatagactaagtagttcaaatcattgtcataaaacaatagttcacaaagtggtagcaagagcttgagtgtccagagtcttccaactcattggccccttagtcattgctgaccctcagcctactcttaacaccttacactggaatctgatcgtagcaattaggaaatgacaggaagctgaacgaattgagaacatgttgtgtttgcggatgtgatcccagacatcagtgtaaatgcacatttgcatacagctctaatccatgaggaagttctcttctggacacagcttctgtccttagtgtttatctgtttcttggctttgtgagtgtgggagtgtgacatggagcccagctacaattttcctatcttactgggcagctgagaagcagtgcagcacagcattccgtgttagagctactcccagggaagagttggcttgggaatatctagaagtgtgggagggaccctctcccccacctcctatactttgtatagtgctttataatctaccaggtccttgctcatatactgtcttattcagtcctcacaaaactgaatggaggctggtaagttttatcacctgaaatttagagatgagtaaactgaaattcagacactatgaatcatttgcctagttattaagaaaaagatttgggacaagaaccaagattttttctaagcctcaagccagtattctgcctgttatttgatattgatttactacccatgaatgagaggcttatttgaagggactaaaaatcagtgaagctatttcaggttttattgttaaggcctgccattgattaggcattgtatgggggcttaacatgaaaaataagttttccattaagtgacagtaattgcatgttctctatttaaatacttgcttgggagagacaggtagaactggacattgtctgcagtagcgtgtactctgaccattctcctaactgcacagtggaataactgggcaaactgtaaaaatattgaagcctggatttcactcccagggattctcatgtcatcagtctgggtgtcaggaatgaaagagggagaaactcccaatacttcctggtaatacttctcctatctgcttgaggtgctgtctctggaaagttgaaaatacatctttgctctttgtagaaggagaacctatttccatactccaggaggtctttattgttttagtaaatgctatagcaacttttagaggtttgtgagacctgtttttgtaagtgatgactagcgattctttgtttgaatccaatttgcctcagaaataacattttatagttttaattttttttcctcttttctctttctttttgcttaaaaaacaaaacacaactagctttgaaaagtactatcaatgaagccttaccaaaggacgtgtctgaggatccaggtaggagaaaaccatttttgtatactttatatataattattttaaaataaaaaaacagcaagtcagtgagtagaagattgatacctctgtgatagtgtgtctgtttctctctatttatttgtcttgtattttattacaaggaaaccttttggctttttaccctttctctcttttcaggtatgagaacggggtgatatcttttcaagtttttaagtttcactgaaaggatcacgaaggatcactccgtgtgaatatagggtcttgttactaagtgcaaaattgagaaggcttgaggttgagatgatttcaacaagccattttgggttttgtgtagagtaaggaacttatagggtagatcaattggaggcccagagttggtattttccatttccaaagcagaaatctcaaatatttttattatgcttcaccaccaggaaggcaactatatgtgcttatatatggagtggattccaaggagaaaaataaaagttgtccagttttttggagagtcagacctgtgtctgtggagtcatggagaatggctgcccctgtgtccgcagctctctgttgatggagccatcattgaaccaagttgaatctagttaaaaacaaagtggctacagaagacattactatttggagctctagttataaggacatgaaaaaagttgttgctttctcttttgctgttttatttcttgtatatttttaataagtcaatcatgtttgttgtgataagctagctatcatcctaggcttatttgttgaacattggaacagaggaatcaatataatgttgaggcttatgctgtggtacaatattttccaaatgtcaagttcattcagagtttcaaagagagatgggtggagggagaggaaggagttgggggagtgggagaaaaatatggtagggggaaggagagagagagagaacatgagaatgagaataaatatgaatgaatgtggatgatgaatttcaattatggaagcctgagaaggtgtatttttaggcagctccccagttggttctggtacatagcctattttgggaaccaccagctctggaaggtgatgctacaaaatagaaaattaaggttatagatcaaccatgactccaaaagtgatgggaattcccaagcttaattttgactcttgaaacagatttgaattcattccttattgggtgaaatgctctgttaatgtaggccaacgcctggggtcagttctttctagctcttatttctggagctaaagtggatgcattccagtttttgtaaacttcatgttgtagtattagtaaaagctgtttaaatttggagtgttaaattggtgcttctccaacagcctttgaggatcataacttttcctactttttttttttttttaagggattttagcacaagatcaagtgtcctctggggcatgagctttagatctcatttttaacattccttcattgactaggacatggcatcaccaaataaaacttgtcaggtgtgccacagcatgagaagtatgtcggaattgatttctcgttgtgcctggcagcatgctatgtgttttctgatttgttcttcccactactgcccctctctgggtatgagggagttcctcatcttaaacatagttaatccctccttttctgggaaatgtttggattcccagtgggagacacaagcgtttcaaggtggtgatttagaattctggatggctgtccttgccatgtggacctcagttcagttgctgctttttggagggttaatctctaggcctgctcctctttccattcccatttcctggaaagatgacatgccttgagtgttctaggaaggtggcagtccttttccctctttccagctacacgagaagctatgatccacttgttgtaattgctgagagtgtctatgttagtggagccttaagagattttttaaaccaatatcccattccaacctaattcagcagagcaccatgcacaatgatggtctttttcttgatgtttctggcccatgttgaggtgttttcagctggttcaccctcacagtgctgtctttagactgttgttggtgattctagcagctgctccattgccaactatcaccccatgtttttattggagtagagcagttctgtccttgcattacctgctcctacctgcacctcctttgctgtcctagaagaaactaaatttagaaaccagatttccaggcttaaaaaattaggagcctttatttatgcactctacaatagtaatattttgcaattctaaagtacgttcagtttttaaattactttcaccttatctgtccctgtgagaaagaaactgcatttttattgcctttgttttctaggtgaggagactgaggttcagggaagtaacagctagttagtgtcatggccaggaggagggccttagtctcaggactcctggcctggtctctagtcctgtctctccactactcatccacaccctcaccccatctgtctgtctgtctatctctcaccagcagggctcacccctccttccacacccatccctaccagcaaaaagacaaagataatggcacttgacaaaggaattaacagtcaccatggtctgatttggggaacagtattttatcatggcggggacctctcctacccatgtatttcttgaaagcagtggggcctgagggagaagagggccacggagccagctgcaggcagcctgcgtagagggcttccccagctctgtggtgagtctggtccactctgtccacccagccccaaggcagcctcctgagctgggagagaggcttcctgaggtcgctttctttgctgcctggggtttgtaggagggagggaggtctttttctgtctatatccaggtgtgggtgcacgataatgggcaaaaggggactcaaactccttgggctttccaggctttcctgcactctggcagcgtttcagctgtttgaagttggaagatctctgtgttctcactacaacaagccaaaatgcttgggttgggagaagtgtatctcttgtgcagctgaccagtagtttgctttgtgccttgttagcatttatgaggattttcacctcccctctctgtcctgttatctaacccaaggattttaatgatcatcataaattcaggctgcttcataccaaggagggtttttatctttggagcaatgtaaaagaggatgagataatgcagtgagacattttctttttggaagaattcatgcagacaaagaaattacattcttcttgttctgtgttactagcaccttttctatgattttttatgacattttatgatgaaaaatttgcaatgtttgtaacacctgagcatagctactggttcctaaagttgtcttccatagaggattgaaagcataaaaagaggatcagtgtttttgtaaatgtttctaattactcctcacaacttgtgatggggaagaaggctgtatgggcgttggtagtgagcaagttagtttatgatttaaatttgatgaggaaaagtcatatggctgggaaaagattcagcgatattgttcataattctctgtatgatttggtcacagacatgtgggacacaaggatattttcttacaggagaagctgtatagctcatttccacttacttgtgagagctttgtttttttgtggccatgctgctctggtagtgtatttttttttttttaaaacgtgtagttagatagacttcttcctatccttcagggtagactagttcaaaatctattactagactatcatgatagaacaagaaaccctgaagtgtgaatccatcattatataaaaagacaaccccctttcaagggggttgtctttttatactggaatgtcttcattaattaacttggatttgagaatggcctctcaaatagtgcttgaccaaaggaaaaatatgctggtttttctttccttttaatcgtttctttagattttgaaataaaacaaggaaatcatgaaaatgtgggagccgtccagttctccacatgggcacttttacctcacatttaccttttgatgtgttctgtactagcccaggtgctgcatataaacttgtttaactgcagaaatgaaacccaagcaatatctttgtttcagcaactcccaaggattccaacagtctcaaagcaagaccaagatccaggtagtgttcgtttaatttctgctttaatgccctttgtgccgtgcccctgcctagaaataagaaccacaaaccaaaacccaacccatgatttcctcttcctttagatgtaaagcttaggatatgagccatttcgctcgtgcatggcctgatgggaacatgcagtaatgctgggagccttggtttctgtggtcattagtgctagaaggtgaccatgaatgccctacggcccctcaacgtgaagtggattgtgtgagacaacccagttgttgcaagatgataacttatagggggaagtagctttggaaagaggaaaatatgggtaaggtaacagacacgaaaatttgctatcatgacaaggtgaacaccaaaaagtaaaaagtctgggtaataaaatctacagtagggaaagaaaatgcttctgataacttcagtgaagcttgcagtttcaggtaagcgatgtttatggtctgtttgagcctatcttagtgcccctctaagcttcacattttttaagaggctagtacaagagagaaagccagtaaggcagagctgtggttgatgtgagactcagaagagaggtgcagaggggaaatacagagacactaatagaattaatccattaaggaagggaaatggtattggtactgtatttcactggtagaactgcagtgtaagataggataacgaggataccatgtgtgtgttttctgttttgctttggctgttagtgacatttttccctcctttgcctactagacacaatcctgaaaaagtaaatttaagtctgatcatattttatatgcttgaaatactgatatttaaggaacctcatctctttgtaagtcaaagagttatcctttagtttatatgtgcattttccaaattggggttttgtttccttgtttatgtaagatacagatatctatatttttatatttatgtgtatttaaaaacaatagagtaattcatttaggtaggaagaaaaggtgtaggcattctttctgtggtcaacacatttactcatcctttgtaaaaggatgaatggatcttttacaaactagtctgtactagttgtgggatatgctttcatagtaggaattgcctttgaattgcagaaatctgttatgtgtactatgttaaccataaatcgaacctcaaagttttagcttctgctgacttcctctctccctgaaagccagtgaaattataaaatctcatagccacacgttctgttattaatgtgtctggctaaattttacatattatcctttcagagattgcgcttttggtctaatttggaggattttattttcattacttctcactgggaagaagagaattgaattgtttttatcctcctttttgaaataataaagttttgtagaaatataagggaaagagggaaaatcaccattttaacaccactgcattcatcattttgttaactccctgcacatttatgttttaattggttgcagcagtcatggttatacaatctcacttattttatattcagtaactttccatatgaagatataaacatacaggttatatatgaaaataaaatgaaaatgaggaatgtgcgctgtgggattgtgtgcttaacagtgtgcacgcatacacattatttacacacacattatttcttttttgagtgaaagatgtcactaaagctatatgtggcatagaaagctcttttcatttctagctagggtctctaattgtcttttttaagtgaagtgttcccatttaagaaccttgtccttccgtatcagttccctttgattcttgttgaaagagccagagcattcttccctgctagtttctgcctgttgctgccttgcctgtcttgccagttatgttacagggaccaccccagaacacgtcacatgccattatggtggctttattaaagttacaaccttgtaagacagacagaaccctcaactaccacaaagaatccttgagaaatttattcaggaaaataaaaactcacaatgtcaaaaacagctctgtcaagaactgaaggggtttaatagtaactgatatattgtaacttcataaatgccactctaatagctaagtacgaagaaggttttcagaggttaatttgtctctctaggatgtacctctgactcagaggtcgttttctgctttgacatgaagctagttgagaagctaaataaaacagatgtatacatctacatcttagggccttttcgtgatcatcgtattgggaacccgtccttaaacctattcctaagcagtgtatggagttgaattttatttggaaagtaagtaggtctccaataaatattctagttgctatcaccaaagtattcccccgccaactcataggcagtatgagaacattttaaaaatgggatatagaaacagagattggagtttgaatcgaactgtgtaactttctatctgaccttttgcaagttatttagttcctttttaaaaagatgatattaccagagttacaatctcagaagttgcctagttaattatgccttgctatagattgaggaagaaggttgaaaatgagacttttgctttctcagggaaagacaagctagacccctcaatctgattgatgtgtgttttcctttcccagcttcgtttgtggcatattcccctgaacattgaattcttaccctcagcttatctgtcccaattccacatgagcctgtcatcacatttgcaagtgaacaggagaaaagttctctgatcagtttataccatgaaataccatgaagcccttctgttagaacatggaaatgcctaagctgaggggctccatattattcttattaacaattccaatagaaatggatttgaatttacacaaagttttttttggggggttgattcagatctaaggtataataagaacaaagaggttgaaaagatcccaattcatagttggatttggacaattattgtacatagtggcattcaatgggtaatagaatttatggctgctttggtagctcatcggttctttgtagtcactttgacttcgtgggtattttccatttcaccccaacttcagagagtaaagctttgctatttcgcttctgaccttcccttattttgctacagatcttactctagcacctccatagaagaggccatgaaaaggggcgaggaccctcccaccccgccacctcggccacagaaaacccattccagagcctcctccttggatctgaataaagtcttccagcccagtgtgccaggtgaagtgccccttgccccctgagcccttccatttcctgttggagccagcggatgtgtgtctgccacagtggcctctgtgagtccggagaaagagcagacctggcagtttcgcattccgtgaaggtcttcacgtggctatggtattcttgggagagaaagcaattctagacacatatgtagcacatgtgtctggagccttgcccacacttgttatggatcaagaattaggaaattctctaccaagaggataaaaatgcttcactcccatgcagcctgctgagtgtgtggctggggtcttactctctgcatcattggtaatttgtgaacaagatagatcgctgtctgtcatttcctcagatgcctgtgtggtcttctatgaaagatcttggagattaaggcctagccagaaccttctcctgcattttacacttatggagaagatcctgtgtcctgtaggatttaatgctgaggggactctgaatctgactgatggttgggtggttggtggagggtcctagggcaagggctccttcaggtgggctgctctgggcttctggggatgggatgttcttgagcccgcagttgtgtagtggggctggaggtgggggaggcccagaggggccctgtctgctcccttggcttcctgtgaagtagaagataccctcctaaggaacctaaggaatagaagatgggaggcatgcctttgctttagtgaaggtgataggatacggtgctgtcccaagtgttattttgggagcagcaagggcctttccactgactcatgcaggcaagctataaatacaatgatttcctggaactttttctccatctatgtgcattttaaatcaggccagcctcagatgctagtgatttgcagattattatcttttctgctaaagcaagaaaagactttccttggctcacacattagcatgacctctgtgtctgggcagagctcagcatgttttatttgttctaataaagtattctcctcacagtaaagttatagattgttttttaatatactaaaatctggaactctctatcaaatttaattctgtgccatgagttcatcagacaaaaatttgccttgaatttcctctcatactttgatctgaattctggcataaatttcatagtgactggtatgtagggtgggagtaaccacaggtgatgatgctataaaaatttcacatggctggcggattatgacctggaagattttcctatggatgcgagaaaattaaaacaatctgggaagctatctcagtacctttaccttgcaagaagggaggctggaaatgctcacaggtctctctcaggttgtgtgacccagtaaggagatgccagctgtactggagaattcacatgctgtggtttttacgacactgcatcacatagtggaagagacaaaactgggtttggagctcagctcagctgcttattcactgtttgattttcagcaagtagcttaatgtttatgcatctcagattcctaatctgtacagtagagccaatactccatggagttgtaaggttttggtgagataataaacataatccaaatatgggttgaatattccttatccaaaatacttggggtcacaagtgtttcaggctttggatatttttggattttggaatatttgcattatatgcttaccaattgagcatataataaaaaaatctgaaatgcttcaatgaccatttcctttgagtgtcatgttggcactaaaaagtttagggttttatagcattttggattttggatttttgggattagggatactcaacctgtagtactgtatttggcccacaggccttagtaagcatgtaaggcccatattcccgtggcctgcaagtatcaagaatttaatgcctgaaatggcaagcctccaccgaggaggataacaccccgacttccttgacccctagcagacaattctgtgattcctcctacccagtttctcagaaggctcgcaaaaggactgaaccccagttgcctgccgtagtacaccattcattgatgtactttttcttgttttgcttccctcctgccctgtctcactttcccctcactcgaataatatacctgttctcaagttcatatgtcaggggcttctttagagaaaacctgaattaagacagctttctttgatatctctgtgtcaatgtgacttcaagatgaaaagtattttggtttgataatgccctgacgatctcccttgtggtagggcctgataaatctaagatttagacaaataatagctaggtgggtgatgtctctgttcatagcctaattccattgtcttttcagtacaaatttatacagatgaaattttaatgagcagtttaaatttatcacatgaagaatagaacatttctgcagtatgaaaagcaggtggtataattgcatctactttatttattttcatgttggttaattctcacagaaaagtataagggtctgtctaaattatataaaattttagtgtattgcatattgctagaaattatcgaaatgctgacaaactagaaatgcatgaaatagagcttaaacctaccagaagagtctactcactgagaatcatggtgtacatttaggcatccctttgctgcacttatctttatgtatcactttagataaatgggatcacactatgcttgctgttctgtatcctgatctttccaattaaccatctttctatttcatatagaggattgcaccgttccctttaaggtgtgcatgatatggatataccatggttgactgtgctttgatggagagatctctcccttcttctctctgccttttctcttccccatactttcctcttaagctcacccaccaccccacgaccccagcccccgttcctttctcacccttgcaaacaaacctctctctctctccaccccgacccctgtgtcctcttcatacccctctgtttctctttttgtccttctcccccatcactccttcacaggtatgagcctcccctcactctccccttgccaagctcccccacaccaccaccttgttcttataatataaacgaggcagaggttattaataatttcatgtccgtatctttgtttcatcatctaattattttcttaggttaaatcctgctggttggagttgcagggtcaaaggctgtagatgtttaaagtgtagctatatgttgccaaagggtgaggtggaacacctgtcaacttgctccatcatcaacactgtctgaaagtgtttcctcacaatcttgccaacactgcttcatgttcatctttttaatcattacctgtgtaataggcagtttcatgtccctgattcctagtgaggctgagaatctttttgtattgttattggccataaatattccttctcttatgatttgcctgctcagaaggcttggccagcttctgttgctacatctctctttgcctaaccacggggaccacttctttcttcttcattttgcctacgttctggacctccctcctgtcaggcacttgggaatgtgagggtggccatggggaagcctacctcacctgctgctgtgctgttccttgtccctccagccccgccccccatatcccctccttctgccaactttatcacttaagacagactgcctgggtcaccctgtttatgacaatagaagaataaggaaaggtaaagaaaagaggggaaaataatgtgagatgaagcaagatgtggacttgagttgaaagggaaagataaaatgaagcccttgtttaataaaatgagactcaggattgtgaaaagcagtgattgaagctaaggtgctgatacagagtggcttaaagtggagtgatagtgtggaaaggaaataggatggagagaagatgcaaagaaaaatgaaaggaaaatgaagggaaagatgggatggttgttacataggagtgatgatgtttatccaaaggaataagcaggaaatagaataaaaaattgtagaaccaatggaaggagagtccacagactcttggtgtaggattcaagcagcatttaaaggaatagcttagaagtaggtggcattaatgcctttacatttatgaaaataggtaacatgatatggggaaaaagaacaaagggctgatttagaatgtaaatctataaaaatgaataaggccaactttggaaatatagaacagttggcttcaactttggtgtctgtaaagagagtgtgaatgtgtgatttatagtagcctagatgattccagggctctctaggtactggcatcagacccgaggcatgtgttttcataaggagaagcggatacactatgatcgctgtgtgtaacagggagatcaccatttgtaatagctgacccagttcttggagccattgcctcacagtcccacacagctgctgtgtttgagagatagcaaaaatgtgcaagaaagtctaagtcagtgacaatgcaagtatgcaaaacctagaggcagtcagacctggaatttgctcagtgatgtttggattttatgtctctatatttatagctatgaaacatcttttattactgagattcctgtaagaaaaatcacactaagctggtacctaacctccttttcctcaatgaaacagttattttcatgaggtaatttttttttcataaaaaggggtttcttctgtccacggagtcagtaagaactacccctctcttctactcttgattcagacctgcctcttctcaaagccatgcctgaggtttgtagcctgaggtttccatggtgacagtaaaaagccttagctctgccttgttccagtcattgagcatctgcctggcagaaggggcagagatggtgtggaggagacatagccattcctttaaagtttcagaccgggcattttcatcatttccactcaaatctagctgggggacctaggcccatggatagacctagttgccaggcagctgggaaatgtagtccttggcagggcagccatttcccagaaatacgtttcttactgcaaaaaaggagaaggggatgttgatggtcagttgtttttttttaaaaccacatcccatatggccaaatacattgagattcacacattaaaaccattgtgatggctgaacagaacacatccagggctagtgtctgtccatgggtagctaatttcctatctctgctttagatatactgataataacaactcattccatggttaagagactatggtacatccatcctatggaattgtatgaagctgttaaaaagaacaggcacgtatactacatggagagctatctcggataaattaagtgacaaaagtatgatgcagaatgtgtatgtttataaatgtgtagacaatttcaggatgatgctaaagaaactggtaatgatagttgcttctgggcaaggggaacagtatgactgaggacaggactgggaaacaagcttactttctgttgaatgcctatttgtatctttttaattttggctcatgtacagatgtcacctattataaaaaatttgcttttcactctttagctgcaatgatggtatctgaaagtaccagagatgtctttcctgcctgaggttacctatctcaatcttccctacgattctgtattcagggtatctttatgaccatctgctaccacctcctggaatgcagctgaaatgacagaaatgttccgagcactttttttttttttttttttttttgagatgaagtctcgttctgtcacccaggctggagtgcagtggcgtgatctcagctcactgcaagctccgtctcccgggttcatgcccattctcctgcctcggcctcccaaatagctggggactacaggcacctgccaccacgccctgctaattttttgtatttttagtagagacggggtttcaccgtgttagccaggatggtctcaatctcctgacctcatgatccacccgcctcagcctcccaaagtgctgggattacaggcatgagccactgcgcccagccccgagcactcttttaagctctgatgcgttcttcagattccatttcagtgcctttccaacactgaggagtagttctggaggacctcccaaagattacattgtgagatgtatagttgggtaaaacgtcatggtaagggctctgtcttaacttggaagtggctgtgtttattgagtggcgaattgagaagtctttcctcggttttctataaatgaatatttgtttctgtaacttaagaagtaggtaaactccttgggagtaagagatgttcctaataccaaacttacctttcaggttctctaaaagatgaatttggccacaaaagcagctctgaccttatatatttccttactgtatttttcctgtgagtgctacttgtttcttttaaaatctggtaggactatgggattcctgacccaccccaaacctttgggcccacagtgcacagctatccaagggttcaatttggcagtctgggcagtttttttgttttgttttgtttttttgttttttttaaatgaaagcgttattgagatgtaacccatatactataaaattcacctttttaaagtgcacaattcagtgatatttagtatattcatagtgttatatataactatcagcactatgtaatttcagaatattttcatcccccccaaaagaaaccccatacctattagcaatcattcccattccccccttttcttcctctatcccttggcaaccactaacttactttctgtttctatggatttgcccattccggaattctgtattaatagaatcatataatatgtggtcttttgtgactggcttcattcacttagtataatgttctcaaggttcatccatgttgtagcatgaatcaatacttcattccttttatggctgaataatctttcattgtatggataaaccacattttggatatttgggttgtttccactttttgactattgtgaataactctgctatagacattcatgtccaagtttttgtgtaaacatattttttctttctcttgagtatataggtagggctggaatttctggttcatatggtaactaactctatgttgaacattttgaggagctattgaagtattttccagagcagccaaaccaatttatttcattagcaatttatgaggattccaattgtgtttcttcacgtcctcaaaacacttgttattgcctttttaattttagccatcctagtgggcatgaagtggtattgtgattttgatttgcattttctaatggctaatgatgttatacatcttttcatgtacttattggtcatatttatgttgtctttggagaatgttcagaatctttgctcatttaaaaattgggttgtctttttattgttgatttgtaaatgttctttatatattttgcataaaagttcctttacagatatttgatttacaaatattttccttcgttctgtgggttgtcctttcatctttttgatggtgtcctttgaatcataaaagattttaattttgatgaggtctaatttatgtattttgttgcttgtgcttttgctgtcatatctaaaaaaccattgcttaactcaaggtcacaaacactcctcttttcttctaaaagtcttatagttttaggtcttacatttacgtcttcgttctgttttgagttaatttttttatatggcatgagttaggagtccaaattcatttttctgcatgtggatatacagttgtcccagtaccatttgttgaaaagactattaattatccatttaattttcttggcacctttgttgaaaatcaattaaccataaacataaggatttatttctggactctcagttctgttctgttggtctataggtctatccttatgccagtaccacagtgtcttgataattgtagatttatagtaagttttgaaattgcgaagcgtgagtcctcctgctttattctttttcaggattgttttggttattctgagtcccttgcatttccacatgaaatttatgatcagcttgtcaatttctgtaaaaacaaaaaagccagctgggattttggtatggcttgcattgaatttgtatatcagtttggttagtattgcggttttaataacattaagttgtccaatgcatgaacacaggatgtttttccatttatttagatctttaagtgtctttcaacaatgtttcagtatacaagtcttgcatttcttttgttaaatgtattcctaaaagttttattctttttgatatacattatacattatttcttggagatatccatgtcagtactgataattttgtatttcttttatatatcatctatatgctggctgctctgttaaaaaccgtattatgaaaaatttcaaatttatgcaaaagttgagaacctccacccccatattattttgaagcaaatcccaaatatcatataattgtatatataaactctttgtatatctctctaagagataaggtcttaaaatacttgagcacaatacctttgtcatacataacaaaattaacaataattctttaatatcatttaatatttggccagtgttcctatttcctgaattgtctcaagtttgtctttttatactagtttgttccattcagaattcaatcgagggctacatgcacattgcacttgttttggcatattttaagtctcttaactgataggttcttctctcagtcttttttttcctctttgcttttcatttattcataaaaagtcatctaccttgtagactttttcacattctgtattttgctgattgtttgttcttccatcccatgtatttcctataaactaataggtaggtctaggcttgattagagttagtttagatttttgacaagaatactacctaaagatgctgtgtacttcttactgcaccacattaagagatctctagtgtctaatgcctttatttttgtggtgtttgattgattaatgggtttacgtagtattggcctgatccatgtgttatgataaagatcccagcgacctttcaaataatggttttatcagctattgatcatcattgcctacatccagtggtgtgtcagtgaatgtttaacaaccggccacttgccaatttttatggtgtaaacactcctgccatggctaatttcattcctactgatgtgttactgaatgtggagtttggaacagatgcacacagttggctctcacaagctggcatgagctttttccagcaaaccactgcttagatccattatttcattggtagttgcaaaatggcgatactctattttttctacctttattaattgggactatggtttatttaagcattttcctattgttggacatttaatttgtgactattatgaagcttgtgagctgaaggagatcataaaacataattctcagtacatcagtaaattctttatatacatctgaatttatagaattgtatgaaaactgaaatagacttcagtaatggtgaccagaaaagtgtcttattcaaccagtatttaatgagcatttactgggtacttggcactttggaggatcccaagagggatatggatatgcccccaaactctgctaatcaatgtcacagttgtgtgtgattgttagaagggtttagagtttgggtggttgctaactagaatgatcagtggatttgtgggcagggggtgcacagggctggtgagctaaactttgaaggatatgacttttcagtcaaatcctattcttttttgacatctgtcttgatttacttcttatgactagtttcctgggtgtctactatagtagcctcaaatctggcttgcttgctttgttctttccttcataaagcaacaggattaattttctgcagcacacctatgatcacttccctactcaaaactcttcaggacctactatgtaatcaccaaatttctggtggaactgaacccgaagccatgtgattatattagctcagtaagggacacagtactgtggcctggagtgcctggggaggagtgtattacaggaaggaagtagagactagaagattcaagttggctggctggccaagaaaaatggagactggtggagaaggagtttgtagacggtgtctttgggaagtcttaggagaacatcccattagggtggtagggttaagccagattgcaaaagattgtggcataagcaaggaactttggtgtggagaagttgtcatcacaaagtcattttgaaatgtcgaaggtttagcagttgttctgactgtatgtcacattttaaaaaataatggtagtggccaggtgcagtggctcatgcctgtaatctcagcaccctgggaggccgaggtgggtggatcacctgaggtcaggggttcaaaaccagcctggccaacatggagaaaccccatctctactaaaaatacaaaaattagccaggcgtggtgatgtgtgcctctaatcccagctattcgggaggcttaggcttgagcctgggaggtggaggtttcagtgagccgagatcgtgccactgcactgcagcctgggcaaggacagagtgagactctgtcgatagatagatagatagatagatagatagatagatagataaagatacataagatagatagatagaggtagaagagagccagttccaagatgatagactgtttttatagattgccttcctcctaacacacatttgtattctctctctctcccccaccgcattattcagcgctaatgaaagtgtgatggaaacagctgctagtgaatgaatactaactaatcctgaaaaaaagatgtgtacttcttgaaattttagtttgatttacctgaaaacatatacagaaacacaactagtgatttcaaccaaccctagagttttaatagtaaaatgcttaggaggaatgcatttgtgtaaatgtaatatgagagaggaaaccagacacccatctttgaccaagattgaatctcatgcatttttgtcacttaagtctgcccatgtctccatccaggacctagttaacccttattgcgtatcctatggtacaggaaaaatgagttattagtaaacatggataaattttagaatcatgaagtgtcaatgctaaaagagaacttgaatgtcatcttggccaactctcacatattaccaacaaggagactaagatccaggcaatataatggctttgttctccatcagaatctttctttccttttttttttttttttttaagatggagtctctctctgttgcccaggctggagtgcagtggcgtggtctcggctcactgcaagctctgcaggttcacgctgttctcctgcctcagcctcccgagtagctgggactacaggtgcccaccaccacgcctggctaattttttgtatttttagtagagacggggtttcaccatgttagctaggatggtctcaatctcctgacctcgtgatccacctgcctcggcctcccaaaatgcttggattacaggtgtgagccaccacatcctgcccagaatctttcgaagttgggaaatctttgtttagatctttgttgcagcagatttggtatcaaagaaagctatctacattaaattaatttggagggcacaccctactacttttctacgggcaataacactaattaatatctaaagttaaaggatgtattaaagaatgaatatggtaacctttgcaaggcactcttcaatgtgtttttttctgtgtttccttctatgtgatttaaaatgttagtagatttctctgaggtacttcagggagataggaaaggagcttttgccctcatagatacttggaaataatatatctattttctttttttaatttcaaaaatgaaattattattaaaagctctaaatatagcaagaatataagacaaatagtatactgaacatccagcttcaacaattaatcaactgtgtcccatcttgtttcatatctgtcttcccccacattattaattatacttttttctacccttagcttaaaaaaaactttattgaggtatatagatcataaagtttatccattttaagtgtaaaatttaatgatttctagtaaatttatcaaatagtgcaactttcaccataatccagttttaggtcattttcagcactccaataatactgcacatacctgtttacagttaatccccatgcccagccccaggcaaccactaacctattttgtgtttctgcagattttccttttctgaacatttcatataaccgaatatacaatatgaggtcttttctgtctgactttgtttacttagcatgatgtttttgaggttcattcatgttgtatcatgtatcagtacttaattcctttttattgctgaatagtattccattatatagctatatcacattttgtttatccagtcttcagtttgacagacatttgagttgtttctgctttttgtctgttatgaataatgctgccattaatatttgaatacaagtctttgtgtgaacatatgtttcatttctcttagctagatatataggggtggaattgctgggtatgtggtaaatttatgtttaactttttaagaaatggacaaattgttttctaaagtatctgcaccattttacattcacatcagaaatgtatgagggttactatttctttatatcctcacccacacttattattatctttttgattatcctacatcctagtgtgtgtgaagtgatatctcactgtggttttgatttgtattcccctgatgattaatgatgttgagcatcttttcatgtgcttattagttattcctgtattttatttgatgagatattgtgttagtctgttttcacgctgctgataaagacatacccaaaactgggcaatttacaaaagaaaggtttagttggacttacagttccacgtggccggggaagcctcacaatcatggcagaaggctaaaggcatgtctcacatggtggcagacaggagaagagagcttgtacagggaaattcccatttttaaaaccatcagatcttgtgagacccattcactatcacgagaacaccatgggaaagacctgcccccatggttcaatcatctcccactgggtccttcccacaacacatgggaattatgggagatacaagatgagatttgggtggggacacagagccaaaccatgtcagatgtctactcaaatcatgctcattaaaaaattgggtgtttgtcttattgttgagttgtatattctgtaattctttatatattctggatacaaatcctttatcggatagatgatttgcaaatattttccacagtctgtgacttgtctttttgttttcttaatgatatgttttgaagtacagaagttttgagttttgacaaagtgtaatgttaaattttttccttttggattgtgcttttgatgtcatatctgagaagtctgcctaacccaaggtcttgaagattttttcttgttgtaaaatttttatagttttagctcttacattaagatcttgaatccattttgatttaatttttgtataaggtgtgaggtaaggatctaagttaatctcttcgtatatgaatatccagttatcccagcactatttgtcaaaaaatactctccttttcctgttgccttggcacctttgttgagaatcacttgtctgttaaatataagggcttatttttggacactgcattctgttctgttgatttatatgtttatttttatgctagcactatactgaatgttttttaacacaggggagtcatacataatcttgcaaagaggtaatcccacgactcagaagtctttaagtatttgctacaatggcatattttttagatagtatatagtagcttatttacttcatttgtggtttgtagcatgttcagaaggatcctttgagctccttgaggttgcagtacttctttgctttgaagccttctgtcatgtttattccctgaatgtagaataccctctgtctagctgtttatcctccatctctgcatttttctgctctacctgccctgtaggttcaaaatgtggtactgattactgctcgatagtagccttgtgtccttggcaaggtcattttatttctccaggtcttaattttctcatctgtaaagtgaaagaatcagattttatctcactacttttctaaactctgtcgttaatattttccttgttgaacagttacaaggatgtgtaagttaatctcttttaactggtgaaaaagtatattctgttccatagagaattaaatgagcttgtatttcggggggtggtgtgtggtcatcaggggatagaggcaggtatttctggaaaggtgttcttggcaaacattttgttacatacactggtgtatatgacatacatgtccatcactgtatgctgggtgatcaagagatatgtataaggtcatacatgcttttatgattagaaaggagagaaagaatgaacaatttctgttacaaagaaatagccatttttatgaacttgccaagaagaggaatggtccttactgatgaaatccttaaagctttgcatgtggctctttacttgattgatatttaaaagtataggtcccactgggaggctcctttcaacattttccattccttgagtgtttttcccccctttggtattcgaatgcttttattttcttcacataaaatattcctagttaggggggatgggagcccctttccacagctgaagttattccaagttttgttccccctgaagaatcggctctctgttcctgaagctttcaatggccacatctgctgctttatttccactcaataagttggaatatattttcatttagttattgattaggggctatgtaaaaatctgaaggaaattagtaaatagtaatgtttatgaataacattttacctagaaatttctaagcgtaatgaaataagaggataaaaattgttagaggttggagttttggatgaaggtaccaggaagcagagatccaataaatcagtatcagaatctgcatgtctttcaataaacttaagaaattgttttaaacactaggaattattagtctgtcttctgaatttaggattaaatgacagtttcttttcctgaagtttttaatgtggttttcaggattggggtatttattattttcctttggattacacttataaaaatttttggctggacaaagccttgctgatacctagtatcccactttattaactataacacttgacgaataaacctgcaattgcttgacgaatatggtcactttttaaagtatgtgggaacaacattcttctctcgtcttcttgccttcttttccctcccaggaaagcagttgttactattaacaagtatattgtcatcttttgcaactgcacactagattattcagctattttttttcttttttttttcctttgccttccaccatgcgatcaaagtattttttaaatttcactttgcatgaaggtgtactttttcttttgactgattagggcatactggataaaatatttggatccaattttaagtcaagagcagactgaaaatattgtaagagaagatttttaaaattaaatttaattccaattttcaaccactgtgtgagtacctactaaacataaggcagtgtgtttaggtgctgtgggagacaaaaagatgaattagacagaattgatagaatgtagctagattaatatctcccaccattaaaggaaaggaacacagaattataaatgcaaggaagagatttttcagcagcaaccgaacaaggaaaaatgcatgagttaatgctatatatatatatatatatatatataatttttttttggaaagagtggcaactgagggaaacctgaggctttgggtgcacttctgactctgcctgcttccttgcagaagctgtgtgtgtgagtaggcaaatcttgagagttctcatcgagaccctaggtctagagcaaagtgaaatgaatgagtactcgtaattttcctttttcttgactaagtggaaatgacttcaggaaagagagttggaaaagtaaataatcatagctgatatcctgatattgtagaggggaaggcccagagcttcatgctgaactggggacaaactgaagtctgagaagttcctccaaggccattgatagaactccaagacttaggagaatgcactctgctgcagggttttaaaatgttgattattttggtatttccttcgtaattctaaatagcatatttgtgtaacttcttgtagacttcaatttttgccatcatcttccctcccccagtatctttctcctccacccttccaatatagttatattataattttggttagattaatatttagtgtttatattattattgttatagccatgtaagacatatagtaaattactttttttttttacttgcacaggtttttgtttgccttggagtgaataatcaacttgtttcttttcaaagtacttgcccttgattcaaccacagacgtcttcaattttccagagttcctcttatgaaattctcacacctcaggtgttctgtcagtttcagctttttgaagcaatagaaactgattgtcttcaatgcctggtacatagttttcatcatgggatctctctacactgtcatccaaggattcccttcctctttttcccatgttggatttcttttattactgtatcctgtgtctttctctttctttgtttactttcttgttttggtgaagcacatccttcagcagcttccttagaaagggtgcatggagctcaatttgagaccctgaatgtctaaaaatgtatttaattatatcatcatgcaggctgctagtcttggatatacaatcatcagttggaaataagttttctttagaattttgatggaattgtgccaatggattctagcttctaatgatatatgaagaagtctaaaaccatttggacatctgatcctttgtatatgacttgctctcttctcctatgccctgctgaaaacttgtaaattattttgactctagtactttgaaatatcatgatataccttgtcatgagtctgttttcttccattgtcctggatattcagtgagtcctttaaatttagaaattcatattcttcatttctgggaaattttattgaaccatttaattgattatttttcctgctgttttctctgtttctctttgtggatcttttatttggctactaccctattttctggaagatttcctcagattatttttgacctttctattctctttctgctatcttttaatttccaagtattctttttgttttgttttgttttctgaatgttctttgtaaatagcatcccattatttcatcttagcaaatagcatttcttatgtcttactgagactttctctggtgactctagttaaaatttcatctgtcactctctaccccattgtctcttttctcagtagaatatgagcttcataagggtatagctttttttttccctgtttttcccatggatattttcccaataccttgaacaatacctcccacatagttagtgtttaaatgtttctggaataaacttaatgatcattctgatgatattaataatatatattttaacgttttctcctagtaaaggtctagtctgtttctttgaggtcatttcttcctgtttttattgatccctaccttaggttagaacattttctgcagatatctggtaatacttagtcatccacttatatttaataatgaaggataaaaagttgcttggaatatatgagcaaattgatggaagttgccagctattggcttcatggtagaatggtctggccaggccatcctgttggagatcccttgatatcaactctttagatgtctcttcctggctgatctgattctctggaacacattctcctaatctctagaaggaagcagcagtctgggagcagaagggaagaaggctggaagaatctcagcatccaaagtgcatatttttactgaatctgtctgttttcagcatggccctcatgccttcatctgggcctggtgccttccctgaaaagaaaactatatctagcattttgctggagtgagaaacatgctgaaactgtgcagaatgtgggagaaaaaactgctcctaaactgcttcaatcagtcttttttttttttttaatgaggatggaacataatcctatagattttaagatagtttaaagaactatttgttgatcacttactgtattttgagttatcaggtgagacagatataaggcatagctactacagcagaggggactgtaagagtagggcccctgaagccaaaaacagcatgaagaatagctagaaccagatcctgaagggtcttgtcaaagtatgcccttttcctgaagggtaggaaataaatccactattagttcattgctttaggtttttattgctttcctcattttacccctacattcagaggtgtttgatgccaccaattcctgagaactggggggcttctgtggtacaaatttgttactccctgctttctcagatctgtctagtcagctattagttgctcatctgttttcccagttccaaatttaaacaagagcatttaaacagttctcttcatttttgtgttaatgagttaagagtgagattagttacatgtatttgaactgctgtctatactcaaaagtctttggataggacatttaataaaacgttgggtcatacacaagaaacaaggaattttacacagtatcaagccaagattttagtttaaagtggtcccaggttgatagtaccctcagatttctggcagaagcgatagagggaagaggaattcactttccacatgcctcaaagttttcctgtcggtaaagttccaaggaatttgagtttagagtcacaggttgctaagcacactaggaaatgaagcacaatgagcaagaacaaacaggaaatacaaagccctcagatactgaaattatataaatatgttgaaagaaaagaggaagaggccgggcgcggtggctcacgcctgtaatcccagcactttgggaggccgaggcgggcggatcacgaggtcaggagatcgagaccatcccggctaaaacggtgaaaccccgtctctactaaaaatacaaaaaaattagccgggcgtagtggcgggcgcctgtcgtcccagctacttgggaggctgaggcaggagaatggcgtgaacccgggaggcggagcttgcagtgagccgagatcccgccactgcactccagcctgggcgacagagcgagactccgtctcaaaaaaaaaaaaaaaaaaaaaaagaaaagaaaagaggaagaaaatgaatggccaagaaattataaaaatgaaaaaaacattttcaaaaaagaccaaatagaacttctagaaaagaacaattctgtaacataaactcgaagactggattttgttagacattaagaacgactaaagagggaattggttacttggacagtagatcgtagaaaattgtctagaacacagtacagttagaaagctcttgaaggagaggggagagaaaaatggtagaaatacaacatttaaagaatcactgagaattgaccaaaattaatgggttgctacatggttcagaaattccagtgaagctcaagcaagtgataaaatgatggtagagaaatacatgtgcagacataggataaagtttgatatttcagagtacccaaaacaaagaggagatcttaaaagcaaccagagagaagatgggccatctaacaaaagagtgatttgactgagagctggcttcttaatagcaatagtagaaaccagaaggcagtggaatgttaccgtcaatgtgctgggagaaaatagctgtcaatttagaattctatacccaattaaatcctctttcaagaggggaaaaatgacttttcaatcaaataaactaagtttgctactaatagacttctcaattaaggaaattctaaaagacatactttagacatcataaaataaactgtaatggaaattaggaagcttttagcactgagtgataatatcacaaataaaaacctatgatattctactaaagaggtacttggaaaaaatttataaccctaaatgcttacattagaaaataaaagctacaaattagtgaactaagcaaccaatttaagatagaaaaagaacaagatatgcccaaagaaagtaaatggaagaagataagcagcattaataaaacagaaagcaaacatacaatacagaggctcaaaaaagttaaaagttggttttttgaaaagagtaacaaaactgacaaatgccagctgagattagtgaaggaaaactggagtatgaggaatgggaaaagacaattacacatgcagagattaaaataataataagaggggggtatggacaccattatgctaataaatttgaaattttaggcaatgaataaatgcctagaaaaatatcatttatcagaatcgacttaagaattagaaagtctgaaaagtcctataacaattcaagaagcagaatcatagtttaaaatcttgtttaaagaaaactccgggctcaggtggctctcctgggaaaatttttatttgatattcaagaaaaaatttccaatcttatacaacctatttaagagtataaacagggcatggtaggggtttgggggtggtgctctccacctgaatgaagcataatagaggaccatatgagaaaggaaatcacttgcaggtctcactcatgaagatagttgcaaaaatcctaaacaaaatatcagctaaccaaatctagcagatataaaaaacttaccaagttgagattatcccaggtctgcaagggtgttttaatattagacaatccagaatgtaatttaccacattaacaaattataaggaaaaaataataccataatctcaatggctagagttacagctctgattaaaatccaacaacaaattatcctgaaaagaagtctcaaaataaggataggaattttcataataatctatttttttcagggattatatatctatagttttattaagacaaaaactgagagtgtggtgtgaagtttacattcaaacaaagttttcaaagaaatctaacacatgcctaaaaagattttacaatgtagctctagatccaagtctagataatatcaagaactgatggatctcatgactcaagacagagcattttgggtatcagttacttcttaggatttgttaaaaaatggttttgtgtgtgtgtgtgtgtgtgtgtgttttaaagtgaaccactgcccagtatgaaagtttaatctcctgagaccaaggcttttgaaatcactcaactcttgagtcaattcagtgaaacttgtgctgtcagtgactgaactctgccaccaatggtttcagagttcaaagctcaaaagagaatggctccaaaagttgtcccaactaagagcatgggccctttacttccctcctgtcttatctcctctaccaccctctttcccttccccaacacctcagccagtggctaggatgaacaagctgatatttataactttattattggaaaagaaagggtcttctaatttcaggaattagcacctctgaggcagaatgatctgcttgtactgtatactctccaataaaagaccttccttcctcagtcaatttccatctccaaaatggcaactctggtaacttattaactggcttagtcctttgtgagactaagtacattaagtttaggcagggaacaccatggcttatagatttcagacattcacagcttttaaagtctctcacagtccgtatttatggtgccagtgacatttttttcaaaggtaaaatattctggacatagaagcaaatcattagttttctgttctttgcattgcttcaccatgtcccctatcaggccccaaattttaatcaaaatgatgctacccatctccctttccaccctccccattcctccctctcccacataatacaccagtaatagccaaaaactacacatgtgctacgctgtaaaaatgtagagttaacactattgggaagaaagttgtgcgttgcggagatgctctttgattatctacagtatttttttgctctcccacacacccagttctgcaagttttgtccttcataaagggccctttgctttttctcagcaaagtgcagaaaaggttgccttgaagcacttatcccccttcccctccactgggacgggtgtgcaaactatacagcttggaatggctttaaaacacttgggctgctgcagggcacagaaacgatactggctcttcaaagggcatcttctcaagctacctctatggtgtcaagacaagtagaacttctttccttcccacctgaaacccacagtcagatgtgatagaggctggtactcaggagagttaattcttgtcatcatcctctttggggtaggaatgccacgtcagcctttcctcatagaaggatatgacaacccgtgggcatttgacattgacttccttggcagggacgaggtcagcctcatcagaatttttccctttcatcaggaacatgagctctccactggagtctgtagctccaataatctgctccggctccaaaccctgagcaaagcctcgtggcttttctgactcttctttcttcttctttggtttgctctcctctcccttatcttcagaatcagaatcagctttgtgcttgcctccctctgatttgtctatctcatgtgctgttttctgtgacggcagaaactcatgaggtcagggcaatccaagttctcttctgactcccatgtgttgtcctcatctgagaatcccttccactttaggaggtactccactttgccctttaccaatcgacggtagagaactttttccaccacatattcctgttcctcctcttctagcacctcctccactttcttcttgttttgttttttctccatagcgtgtgtgtaaagggtgatgctgctcagagcagtgcccaggagccggaaaggaatcggtgctgcgctattggcgcattgggtcggccagggcagtggcgctcagaaaagcagcaagggtagctgcaaaggagccccttgctgaaatggtgtaccgcaggcctcggctaatggccctcctctcagccgaacaaaagagccctgcactctgtgctgcccactgcccactgcctgcaccgccttcataatctattaaagggtatctacaacatacctacagcaaacaccaacaccataccttatggtgagctagtaaatgctcccctttgagatcaagagaagacaagaatgcccattatcaccatttaaattcaacttttacagtagataattctaactaggtaagactggaaaaataaaaaacgtggcaaaggtactgaaaagaggaaacaaagctgctcttagtatttgtttaatatggttgggcacagtggctcatacctgtaatcccaacactttaggaggccgaggtgggaggattgcttgagcccaggagtttgagactgcagtgttaatgatcatgccactgcactccagcctgggcaacagagtgatatcctgtcaagtataatatttttgatataaatgtgggggcttccccccaaaaaatgctctcagaatttaatgaggaaaataacctatgccaactcttgtttttttttctttttctttttctttctttatttttttttttgagatggagtctggctctgtcacccaggctggagtgcagtggtgtgatctcggctcactgaaagctccacctctcgggttcacgccattctcctgcctcagcctcccaaatagctgggactacaggcgcccgccaccatgcctggctaatttttttttgtttttgtatttttagtagagatggggtttcactgtgttagccagtatggtctcgatctcctgacctcgtgatctgcccgccttggcctcccaaagtgctgggattacaagcatgagccatcgcgccaggcctctatgccaactcttacaatgagacattcagaatgaacaacggacacatacctgtgatactgttttgttgcttgaagctcaattgtgagaaattaaaacaattccatattaaatggcctcagtcttttaccctatttcttcttcatatttggggcaatttctgataaaccacaataaatgatgttgtaggtgacatgcttttatctaaaagtgtattcagaaatagacccacacatcatcttttacaagagcagggcatttgtctttaaaaaaaattaaatcatacaaaagaacttaatgagatccgaatcaggatctaaatactgtttctaataactctcaaggcagtgagtagggacagtcagccacagggctcacctggttggttcctctctctcaggggtcactgtcttttgttgcctgattttctagtgccttgaaaactgttgtttcatatttttttttctatgtgtttttggttgttttaaatgggtgggtaaatctctctgttacttcatcttggctggaagcacaagtcaatttaattaaatggctcatcatttcttgtatagtcctcttttttgttaataaggagttgttttaacacacgttaatacaattgcttggcctttcccttaaagtttgcgtagatttattttattttattttatgttatgttatgttatgttatgttatgttatgttatgttatgttatgttatttattttatttatgaatgagacagggtctcactctgttgcctaggctggagtgcagtggcacaatcatggctcacggaagcctcaactcctgggttcaagtgatccttccgtctcagcctcccaagtagctgggactacaggtgtgcactaccacgcctggctagtttttgtattttttgtagataaggggtttatccatgttgcctatgccagtctcaaactcctgagctcaagggatccgcctaccttggcctcccaaagtgctaggactacagcatgaggcaccatgcctggcttgtttcatttgttttgaaagtaactgttaattttaaaggtccaatctgtgaggatctaaagagtaggagccctgagatgaataattcctgaaggctttcagcattctctcctgctgtgtgctttgttattgacagctgttcaaggtctcaccacctctggagttttaacccaccgatgtgtttcataaattttaatgaaagacagatagagagaaatcatagataggccaacatgattgtaccatatccatgcactggctcaaaatgaaaatctctgtgatattaccctgagttacatttgtggaacacaccaaactccgtcttctagcttgtctgatccagctagctaagggaaatcaaaagtaatttgcaaaatcttttatgttcttttatgttcttggtacattgctctgatttattttttaaggcacagaaaattgtccaaatgcatagtacaaatttgcaaataaactacatatagttatttggacgatggtgtttttctaaggagttttgtaaagaatgtggtttaacttgccagtgtgtaatgctaaacttatttcttgtgtgttattatgaactttatttataatttcatagcagctgtttattttcattgctaaggtacaattcagatgttcttggcttaactcagtattctctatctcacaaaatttaaaattagactgatactttgtaaagattcttcagatgtggccagattattttagaaacagctttagttatccctgataataaatattagggagagaaaaagaaattgaggtctttgaagaatccctaaatatcatttcagtctatcactgtcagcctccctcactgctttcagatccattcccaggagcatttacagggtggccaagcttcctcatttgggttccagctctcttagtttctgtagcctactcattgagctaatgagcagtgtagtggctgagagctagggagaaatatgagagaaatcaaagaagaccctttctgacttttgccctagattgtttgaaacgaaataacattagaataatgaggaattgaccacctttcccttgctgcgttttaggtgtcttttctgtaccattttattatgtcgtcttaatcataacagcctacataaatacttgagtttgggttaggatgacaatgaaaaagggattagaaataacgtgtactcttttttcttaagccttcagaaggactgtaaaaacttaaagatgttaaatgcaaatgccattgccattccaagttaacaagcataagagttttttgttgtttatttttggggggtgatccttaatagtatgtgtttttcttttcagctaccaagtcaggattgttacccccaccacctgcgctccctccaagaccttgtccatcacaggtaggagacatatttgatttatgtaaactgttcggtggtagggaagttgtcctatcgctgtgcttctttgcaagggttgatcgccacagatctggtccatgagattcccaagctgataccctgtgaagagagcagagagtggtttaatttattctcatccagccagctccccagcctcatgtggaagagagaaagtttcctcaataagccaccaagcatacatatactagttcactcttggctgtccaggggtgcgtctgttttcatccccagagaagggtagaagaaggggcctctctctaattggaggtggagacatggtttttctgtatagtatgtgcaatctgggtgcctatattttcgtcagtactttaggagctatgttaattctacataaatgaaaaataaatggttatcaacatggggttagtgccgtggttttggcctatggtgctttctgtaggatggtatttttcctcagaacaaaaagctgagatagcaggagggggagaacatgtcaccaagatctgtttcacccctaaattaattctgccttatttacatgtgccactatggccttattcatcaacactttgcagagctgaaaatgagaagcaaacagtggagtgtggtatatggtgctacagatctttccttttgttaattgctgctgaagaaactttctatctttaaagaccctttctgatttttggcagaaaattttgggaaatttctctgtacacagtccctgtttctacttcattgttctgggtggttcagagctatccttccatacggggacatctcaggactcatgagtcactgaaaccacttttaacacatgcttgtccttctttcagtgaatgaaatggtttttagcatccactcaaccttgagatgcaaatactatgagatattggcttcctgctttagtgcgaagggtaataaaaagcccatttcttcctgacctgcatataaaccagcgagaactcctttccaggatgtaacattggccttaagagatattggttgaaccgtcaacaagtatttattgagtccctgctgtatatctaatgccaaaccttagttttgccctaagcctttcattggctgtaatttcttctcattcaaattattagctgtgtctgttgagcatctccaataaatcaggcattgtgctaagtgctttcagtgcattatttaatcctcacaaaacccctctgaggtagatacaggtactaatattatcccttttttttttttaacagataaggaagttgaagtatatgggggctaagcaagttacccaaggtggcatagctagtaaatagtagagccagctcccaaattgcaatctgtctcctaaaggctcctcctgtcaccatcactggagtctgagtgtctatgtgtacagccagacagcagatccattacacttgcaatggaggctttcatcacaggcccctaaggaggaccttgatgagatgaggctcctgctccacaccaacagcaaacctggacttggtcacaacaaaatgagcaggcatttgctagctgctagttcaagcctggggcttgagagccacctggttgaatgcatggaagacctgtctgaattgacttttgtaaccaaccttctagctttctcttcctgcacaaatgccagtagttactacccggtcccaaaatatgctgctgctatcagcagtcttcatctgagctgcttgaggtgggcttcttgcctgcttttggagcttagtcaccaaagatctgactgggggatctgggaattctctagtcactgttaatgaatgagtctgcttctttgtctaccagatttcccatcacaatataaacagtgagcccagtactcagcctatcagctgcctaactatggagatttcagatttcaggaacaggtgtgtaagaaatggaggcagaagatccacattccatttctctcccctattccctcctttcacccactgtaagtgggacacacatattcagatatatgaagtcctgggcaataaacacatggttatatttagtttttgtgccatgtcaagttggtattgaccctatgagcgtcttactaaccactttgtatgggacacctatatattctagtctttcccaaactgcttgtgataaaacagtctctgggagatattaatagggctctgtggtacagatttgcagactgctgcccctctacccctctgggagagtcgctgtgcaagtgagctcactaaaggctttggaggcctacagtaagtaaagctagtaaattttgttaaagccagcaatttcctagcttctgtgaccattgatatctttatttataaaatacctgttaggatacaaaatcagtgtgcaaaaagcacaagcattcctttacaccaagaataggcaagcagagagccaaatcatgaatgaactcccattcacaatcactacaaagagaataaaatacttagaatacagctaacaagggatgtgaaggacctcttcagggagaactacaaaccactgctaaaggaaattagagaggacacaaacaaatggaaaaacattccatccttatggataggaagaatcaatatcgtgaaaatggccatactgcctgaagtaacttttttttttttttttgagacggagtgtcgcactatcgcccaggctggagtgcagtggggtgatctcagctcactgcaagctctgcctcccgggtgcacgccattctcctgtctcagcctcccgagtagctgggactacaggtgcctgccaccacgcccggttaattttctgtattttttagtagagacgggatttaactgtgttagccgggatgatctcgatctcctgacctcgtgatccacctgcctcggccttccaaagtgctgggattacaggcatgagccaccatgcccggctgcccaaagtaatttatagattcaatgatattcccatcaaactaccattgacattcttcacagaattagaaaaaactgttttcaatttcatatggaatcaaagaagaccccatataaccaagacaatcctaagccaaaagaacaaagctggaggcatcatgctacctgacttcaaactatactacaaggctacagtaaccaaaagagcatggtactggtatcaaaatagacatatagactagtggagcataacagagacctcagaaataacaccacacatctacaaccatctgatctttgacaaacctgacaaaaacaagcaatggggaaaggatcaaaggtcaaaataaagggctctattttaaagtgaaatcaggttctgataaatttatcatttgccctagataacattgttttaaatttatcaaggttgaatattcaagtggaatgcttgttttgtgtaatgtatttttcctttgttaactttggcagtaccttttactgtatgttccctagttatagaatcggttcatagattgctcagagctactcatatctctggattcatgtattatgaagaaacaattctgtttcagaccagcttgtgttgattgaatctcaagttttggaagttctcttgtgaggatttcttaaatttgaaaactactattctcaagtagttagggaccataggcacacactaccaaacctggctttccaggttttaagtatgtaagaaaaatgagtttgtacatttgcaatatgcatacagagatatataaagattgtttctacatacaccaaaagcatatattcttttatcaaatgagagagatgaagtataggttttcagcataacatgcagtttagctggctcatacttattcaagcaccactgtgatatgaacatctggattaagttatacaaatggggccctggagttaggaaaaggaataagttaaaagaaacatctttttatttttcatactataggtaagatcaagaagaacctagtgactatatacaaaattaagtagtttgtgtttcacattttcctgtggcaagactagagactagggcatggtcttttggctcagctcagaagaggtgacttttttttgaaaaaagacttatttatagcataaataaccaaaaagcaattaaagtaaactatttcatatagagcagtgcattcttttgtttgtttttgttttgttttcttaagacggtctcgctgtgtcacccagactggagtgcagtggcatgttcagggcttactgcagccttgacctcccaggctcaagtgatcttcccacctcagcctaaagtgttggggattacaggcgtgtgctactgtgcccggcctagagcagtgttaaagtgagagttaaatgtattagcccactgtttgtatcattttaataaatccagtaaattgccatctgtagagtttgtgtttattcttttttttttttttgagatggagtttcgctcttgttgcccaggctggagtgcaatggcgcgatcttggctcaccgcaacctccacctccccggttcaagcgattctcctgcctcagccttccgagtagctgggataacaggcatgcaccaccacgcccggctaattctgtatttttagtagagatgggggtttcaccatgttggccaggctggtctcgaactcctgacctcgtgatctgcccacttcagcctcccaaagtgctgggattacaggcatgagccaccgtgcccggcgagtttgtgtttattctgtaggtcagttctctgccaagggactgtttggtacttcagtagctaagtccttttaatagtgttgatctcatgacagttttcttatggcaattgtgatagagccacagcttcagtgtaactataataaagaaaagattttgggggtgcaagacattatcttttaagttttctattagcaccacatttgataaattggggttccctgcagactaatgtgctcagaattttcctatttctgccactaatttctcaccttatatgtaacaaagttttcctcactagcaatgtaatgagtactaaaaatagcactggaaggtgaaagcactgtgggagaagcatttgatgaatacctttaagcttagagagaccaagaagactcatggaaggggtgagatgaccaatgaaattagttttaaagaaacaacagaactttttttttttttttagctggctaaaagatacagagctttactgcagatttaaaaaaaaaaaaaaaacccaaatgcagagaaacaggcttgcaagaggtcctggtatgtttgaggagctgcctgagatttggaaagccagattgtagggaaaatggctgtagtgttctggaagtggccatggggagcaagcctcctgctcacttccagttccagttctggtagggatgtgggagagaaacagcccctaccaaaggagttctgtctggggagcagaaactgacgggaggacagggttttagcctagtggttctcacccttggctgcacagtggaatcatctgggggagctttgaacgtgctgaggcctggagcccctcccagagattttggcatggggtgctgaggtccggccactgggaggtttaaaaacctctccaggtgattctgaagtgcagccagagttgagaagcactgaattagggcaagaggaaggaatgctcagagaagaggttgagaatatagggaattttattgatgagttcttatagggcacaatgaaaggggttctggagttggggaggcatgaggtcagcttaggggatgtactcagaccctatggggacaagaactcagatcacaaggggcctgggagtcaagggattcttgtggtgactgatgtgaacagggctagaggatgtgacaggaaggtcctgctggaagaactagtcactgtgtgcctcaggtcctgtgtgtactactgtgagaggctagccatgaacacagatggcctcaagaggaaaccagaacaactgtggtccattgagttaattcttcatctaacttcataatctggctagaatcaggtcctgaaagtgatattgaacccaataggaatatggcagtcatgctactctttttcaaagactaattttttagacacaactttttataaaatactacatttgttttatttggaagtaaaaactgcagctcacttaaacttaaatggcagttcgtaggccctgaatttgtgaaatattcaacaccattttaaatactctatccttttaattaatatcctgtcatttaaattattctttccacaagttaatacacagttggtgattcaaaatagtaaattcttctgggagaaattaagagttttagaccacacatacttttttggggcaggggaaggaattcctggtgattatgtaagtctcttacagggctatctaatccatttttaagtgttaattttattaaagcataacatacatactgaatctatttttaatacatactaaatcaatttttaagatagtaaaatgaagtataggttgagtaccctttgtctgaagtgcttgggaccagaagtggtttagatttcacttttttttttttttttttgggaatatctacgttacacttacctagttgaccatctcaaatctgaaaatccaaaatcctaaatgctccagtgagcatttcctttgagtgtcatgttggtactcaaaaagttttgggaggccgaggtgggtggatcacctgaggtcagaagttcgagaccagcctggccaacatggtgaaacctcatctctactcaaaaaaaaaaaaacaaaaattagccgggcggggtggcaggcgcctgtagtcccagctactcaggaggctgaggcaggagaatctcttgaacctgcaaggcggaggttgcagtgagccaagaccacgacattgcactccagcctgggcaacaagagtgaaactctgtctcaaacaaacaaacaaacaaacaaacaataaaaaaagaagaggccaggcttagtggctcacgcctgtaatcccaacactttgggaggctgaagtgggcagatcacctaaggtcaggagttcgagaccagcctgaccaacatggtgaaaccccatctctactaaaaatacaaaaattagcctggcgtgatggtacgtgcctgtaatcccagctactcgggaggctgaggcaggagaattgcttgaacccaggaggttgaggttgcagggagccgagattgagccactgcactccagcgtgggtgacagagcaagactctgtctcaacaacaacaacagaagttttgggttttggagcattttggattttgtattttcggattttggatacttaacctgtattatattgttgtcagctttcaaatatctataagaaaatagcaagaaacattatttaatgtgaacaatagagaaatgtcactgcttttaaaattgcatgttttttttatcaaattaaaactccgtgaataaacaccaaacatcatgaaatctcttgctgtaatatattcaaatgacctcatgtaatatataagtcattgaatcaccttaagatactgcctgttaaagcatatttatgaactttcaaaggtatatacaacatcctaatttttactcatcaaaatacgaatttaatatgtatcaagatagtttctattcatgcatgtattagaaaatcagaaattattccaaagtgaatttataaacgtatatcacttaagatgccaccttcattttcttccaaagtgttactttgttctgtcctacagtgtatgctgtagattagctgaaaatcacaacatgttaatgagtatttcagtgattaaggaaagaagatataaaccaaggctgtaccttcatttgtgatgatgaaagaacatactgaaagctgtaccacactgtgctgaatgtagtaatatgaatgtgtctgtctgtggtcttatccttagtcctgctactgtgtagctctctggctttgtgggaattaagtaagttagtctcatggacctatcgccccttctataaagtaagaagattggactagagggatcctactagtgctaagatgtctgattctattttgtattctctgttcaagaattttttttgtaatatagataaaacttcatgaaacacagttgagggacaagataggttggactaattttctctgctcctccctgctaagtacaactaaaacccccagaaatactataatggaaagaggattttttttttttgagacagggtctcgctctgttgtccaggctggagtgcagtggtgtgatcatggcttactgcaccctcaacctcctgggctgaagggactcagcctcctgggtagctgggactataggtccttgctgccacaccgagctaatgtttttattttttgtagagacagggtcttcctatattgcccaggctggtctcaaattcctgagctcaagtaatcctcccacctcagcctcccaaagccttgggattacaggtgtgagccatcatgcctggccagaacagactttgaaaggtttaaagaggaaagaggactggcatgacagtgaactagagacttcaagtagacagaagaccaataaggaaatagaaagcttgaacaataccatggttcaacttgatataacataactatagaacacccagcatcagcacaatagacatttttctcaagtgcacttggaatattcttcaggatagaccatatgttaggccacaaaacaagtctcaataaatttcaaaagattgaaattatattaaacatcttctctgatgtcaatggaatgaaactagaaatcaataacagaagtaaaatggaagattcactaatatgtagaaattaacatactcttaaaaacacaaagaagaaattataagtgaaattagaaaataccttgagatgagcgaaaacaaaatcatatcaaaacctatgggatgcagtgatagcagtactcggcgggaaagttttagctataaacacttaacattaaaaaagaagagatccaaaatcaacagttagctttacaccttaagaaactggaagaaggctgggcacagtggctcacgcctgtaatcccagcactttgggaaaccaagacgggtggatcacgaggtcaggagatcaagaccatcctggctaacacgggaaactccgtctctactaaaaatacaaaaaaaatgttattctgggcatggtggcgggcgcctgtagtcccagttactcgggaggctgaggcagaagaatggtgtgaacccaggaggcggagcttgcagtgagcagagatcacgccaccgcactccagcgtgggcgacagagcgagactccctctcaaataataataataataataataataataataataataataataataataatatttgtgcatgcattttgtataaacattttacatcataagaaaaaactgtaaaaatatattgaactctagctaattatacgcatgctaaaatattcagggaaagtatacagatatctgcaatttatttgaaaatatgtcaaaaataagatgaactgatggacacaaggataaatgggtagatatgtgattaaaaataagtatagtaaaatgttattgtagaactgaagtgatgtctatacaagcagtcacttatgattctttcaactttcctgtatgtttgaaaattttcatactaaaatattggggcaaatggggttggggtataaaagttaagtcagggaaggaagagacagcagagaatgaaaatgggaagcaccagtgaagcagaaggaaaaccaggagagtatggtatgtcaaaaaccagttataaaagccannnnnnnnnnnnnnnnnnnngactctgtctcaaaaaaaaaaaaaaaaaaaaaaagaacctggaagaaaaagagcacactagatccaaagctagcaggacagaaataataaagagtagagtggagataaacaaaatagagaacagaaaaacaacagagaaaatagttgaaaagttgattttttgcaaagatcaacgaaattgacaaaactttagctagactgaccaagagtataattaagcatgtgttaacctctggtcaaaataaagggctctattttaaagtgaaatcaggttctgataaatttatcatttgccctagataacattgttttaaatttatcgaggttgaatattcaagtggaatgcttgttttgtgtaatgtatttttcctttgttaactttggcagtaccttttactgtatgttccctagttgtagaatcggttcatagattgctcagagctactcatatctctagattcatgtatcatgaagaaacaattctgtttcggaccaacctgtgttgattgaatctcaagagttttggaagttctcttatgaggatttcttaaatttgaaaactattctcaaatagttcgcactgaatgacaaattcaaaaggcaaaggaaatggccatagtgataagtgcaaggagaagagagggtgagaattagtaatgaaataccagcattggaatggaggagaaaagtgtaagcctgtcccccttccttctttttgaaagaagtgctcagcattttgctctttatcaataagtgtctttagaattaatcctagtaactaattcaaaagaaaggaaaagttctatgatgacatttattttagtattataaaaataagaacaatacagaccaccttaatatctaggaagaaggcactggtcaagggtaatgtatatctgcctgattagaatattaggcatctattaaaatgattacatgacaaaacagtagaaaagaggggtaacagctgaatacagaggtgtttcctgattgtaccacataagtatatggtagacctttgatggtaaggttttctcatctctgaggatgaccttgaaggtccatggtgcatggtaattggcccctttccagtggtcggatttcgaattacttttacattagccactgttccctccccagtagggttttgagattcttagctgcttagtgaatttctactaactctttttaggggtctaaagggatcgcttaggtgactcatttataatttacctatcttgtcttataacttgtttttataagtttttatattttgggagatgatgtatgtgtagtatttatgtgaattgggatatctgtgaaggtctccagatggttcagtcctaaatgtcaagtgcctactgttaaatacttggagaagactgctaagtaattggtagaagtttaaatggctgttttggtggggaagttatgcagtttttcttttaaaaattttgtcttaaaattaaggattggggaaaagaaaaaaaagtcctctgatatgacaactagaataaaaagtcatttgaagatttaccagaataaaatgacctttggaaactacttttagagaccagctctcagaaatagtgataagacatatattgcataattacattgttacgatgactctagcaattgtgaggttcaaagaaatagtgtactgaagtattatcatctagtcattttttaaatctatgttctttggatagtaaactcttattgccctcactcttaaatagtaattctgctgtgtacagaattttagactgaaagtaatttttcctcagtattttgaatgcattacctcctcttctagcatttattgctgccactgctccggattgtactgtcaatctattttttattcctttggtgcagctttgtctttcctctgggattgcttttaaaagtttatttttactttctgaaggggtgggttgcccctccacacctgtgggtgtttctcgttaggtggaacgtgagacttggaaaagaaaaagacacagagacaaagtatagagaaagaaataagggggcccaggggaccagcgttcagcatatggaggatcctgccagcctctgagttcccttagtatttattgatcatttttgggtgtttctcagagagggggatgtggcagggtcataggataatagtggagagaaggtcagcagataaacacgtgaacaaaggtctctgcatcatagacaaggtaaagaattaagtgctgtgctttagatatgcatacacataaacatctcaatgcgttagagagcagtattgttgcccgcatgtcccacctccagccctaaggcggttttcccctatctcagtagatggaacatacaatcgggttttataccgagacattccattgcccagggacgggcaggagacagatgccttcctcttgtctcaattgcaagaggcatgccttcctcttatactaatcctcctcagcacagaccctttacgggtgtcgagctgggggacggtcaggtctttctcttcccacgaggccatatttcagactatcacatggggagaaaccttggacaatacctggctttcctaggcagaggtccctgcggccttccgcagtgtttgtgtccctgggtacttgagattagggagtggtgatgactcttaactagcatgctgccttcaagcatctgtttaacaaagcacatcttgcaccgcccttaatccgtttaaccctgagttgacacagcacgtgtttcagagagcacggggttgggggtaaggttatagattaacagcatctcaaggcagaagaatttttctcagtacagaacaaaatggagtctcctatgtctacttctttcgacacagacacagtaacaatctgatctctcttgcttttccccacactttcggtgttctgttttgatggcgctgcgatgggtttaagcgtagatttaaatttgtttatgccaggtgacacttggcatgcattttccttctggaaaatcatctttaattttaggacatttagtgatatctctgtgggttttgcttctctacttatttcttctgttttcttctggaactaactatatttctgtcaacacatttaaaaaaaactctagtaatgtgtctttcatcttttttttttcttttttgagacagggtcttgctctgtcacccaggctgtgcaatgggatgatccatggctcactgcagcctcaacctcctgggctgaagctgtcctcccacttcagcctcctgagtagctgggactacaggcgcatgccaccacacctggctaattttttgtattttttgtagagatggggttttttcatgttacccaagctggtcttgaactcctgggcccaagcagtcctcccatctcaacctcccaaagtgctgggatgtacagatgtgagcaccgcaccttgtcactttcatctatttatgttgtgatctttctgggcttgctctggatgaaatcttcatcttccaaattaaaaatcctctgcataactatatagcctagaatttttcctattctgttattaagcctctatcactattctttgattctaggttttataatccattcttttttataacaacctgttcttgttttacttttccctatttttgttttatacccatctattcttttttaggatctattctccacttttaactttgaggattctaaaatacttactttaaagttatttttaacttgttctatttttgtttttgtcaggagcgaatttgccttttttatttggctgttctaccatgctttttggaattttgttttgtaggcttattttgagttggagttcaatctcattctcagttctctgagctcctcactttctgccagttcagtggctgtctctaccaactattcctggcatccatggcctccagtcaagagctgattcttatacttgaaatacagtacttccatctggtgcaggtgtcaggggtcttgtagatggcacccaatggtgcttagcccagaaccaggcttcagtgttatatctgcttcagttcctttcctaagtaggcaacccagagcttctccacaggcttcatcttggttttgcagcttcacaggtagcaaagtgataccttagcctctggcatcagggaatgagcttggtaccagtcccctgcctcatgcgggacatttatttatttttattttttattattattatactttaagttttagggtacatgtgcacaacgtgcaggtttgttacatatgtatacatgtgccatgttggtgtgctgcacccattaactcgtcatttagcattaggtatatctcctaatgctatccctcccctcttcccccaccccacaacagtccccagtgtgtgatgttccccttcctgtgtccatgtgttctcattgttcaattcccacctatgagtgagaacatgcagtgtttggttttttgtccttgcgatagtttgctgagaatgatagttaacagcttcatccatgtccctacaaaggacatgaactcatcattttttatggctgcatagtattccatggtgtatatgtgccacattttcttaatccagtctatcattgttggacatttgggttggttccaagtctttgctattgtgaatagtgccgcaataaacatacgtgtgcatgtgtctttatagcagcatgatttataatcctctgggtatatacccagtaatgggatgactgggtcaactggtatttctagttctagatccctgaggaatcgccacaatgacttccacaatggttgaactagtttacagtcccaccaacagtgtaaaagtgttcctatttctccacatcctctccagcacctgttgtttcctgacttttttttttttttttttttttttttttgagacggagtctcgctctgtcgcccaggctggagtgcagtggcgggatctcggctcactgcaagctccgcctcccgggttcacgccattctcctgcctcagcctcccaagtagctgggactacaggcgcccgccactacgcccggctaattttttgtatttttagtagagacggggtttcaccattttagccgggatggtctcgatctcctgacctcgtgatccgcccgcctcggcctcccaaagtgctgggattacaggcgtgagccaccgcgcccggccgtttcctgactttttaatgattcatgtgggacatttaaatccctgttattaggaactctcagctgcctctgtctgcttctgcaccctctgcctgcttctgcaccctctgcctgacctaccactttgtgatttggccccacagagacctttatcttgcttctgagtgggactgagtcttttaaattttaacagttcatgctaacactctcacatctgtcattgcatatcattttatgtaaggggaagttgagattcagagagcagaagttaactacttgggcctcgcagttggtaagtaagccagcctgctgtagaagaaaagggctggaaaaggtttctggggaagtgctagaaatttaataagcatgtagagagagaaaaatcattcattatacatcacaaaaattaactgtagatctgctaagtaaaagttgattaaatttctacactctgtgcccaccaataattttctaaatgtgaactctttcctacattaatctcaaatgcttatttttaaagtgccttccccagtgcagacttacattcatcttagccaaaatggccttcacatttggtctgtgggacatatttgatgtagcaaaaggccaagggtaacccttattctaccccctaaaagggaacagaaagagaacttttgcataataaataattatttatgcatttcaaaattgattttaagagtacacaaaccatagaggctttgcgattcttcatgtattttattaatttatcaagcacttcaacagagtgcccgatgctcttctagatgctttacaaatattaactcatttaagcctcacaacaaccacgtgcagtgggttctattgctatcctaacattgcagataagtaaacaaggcacagagaacctcagcaacttgcttgaggtcagtgacagaaagaaagagttaaggctatgattcctaccttggctatttagccccagtgtaccagctcctactatactactatgctgtgctgtgaaaccacgtctcacaattattttattaacaatcaaactgacacactatctttgtcagggacacattttatttcatggaactagttaaaaattagctttaactcacttctggtgacttgttttctttcttaggttcttcctcattatattatgcccatgctattgttatataaagctcactctgctggtatcattcttctggaagatgccataaattcatctaatcatttcatcagatgttaacggaatgtgctcactgtaggcccacagtttgctgagaactataggagcacaaagattgtgatgtgatccttatcctgtagttcctttatcctgcgtcaccctctcacagcagtcatgcccaacactatctattctatagtctctcatggttcttacaactgagtcattttctgtgtgtctcatttaaacccatttcttaatgctttattgacacaggttgtaagcaataaactggtcaccatgtttctaataactaccaatatagcccagttttcccctggggggctcagttatggtggttttctaggtttctgagcaatggaatcctcatttctcttctctgctgtcccctatcgcactgtgacttttttttttttttttttttttttttgaaaaagagtcttgctccgttgcccaggctagagtgcagtggcgcgattctggctcgctgcaacctccgcctcccaggttcaagcaattctcctgccttagcctcccgagtagctgggattacaggcacatgccaccacgtccggctaatttttgtatttttagtagagatagggtttcaccatgttggccaggctggtctggaactcctgaccttgtgatccacctgccttggcctcccaaagtgttgggattacaggcgtgagccactgtgcacggcccacactgtgactttaaggaagcactcctgagggggtcaggggaggagcagatgtggattgggaggatgcccaaatgtgctactgtgctaatgggaaaggacaatggaggacaaccaggggttgggctcagggaggcagcttgacagaggatttaagagcatgggcttggggtttcaaatcctatctgcctcttactggctttgtgactttgggcaagttagtctctctgtgcctcaatttcatcatctgtaaaatggggatcatggtagtatccattttcatagggttatgatgattaaatgagtgaagatctctaaagcacttagaatgatgcctggtgccatagtcaaccctcaataacatttagctgttataattatcatcaccacaggcctagtgaaacagaggtggggtctagttggcaaacacagaacagactccagatagctagaaattagttgcaaccagcccagaatgagtgctgaagtggctcgctaaagcacttgcagtcaaagcacattgttaccctcatctgtgacctttcatgggctgtctctctgcctatgtcaggggttggcaaactatagcctacaggccaaatccagatggtcacctgtttctataaataatggaaatgtgaaggagaatcaattggcaagaggcacgcatagcgcatcttcaaccttttccatcggggaacatgagtcttgagaatcctgccatagatcaaaagaatggcaatgagaagaaccagtggacaggtggataggcctccccatcagcctttaaccctcctgctcttatctcaaggatcatatgcccgtgtctgtggtttctgatttttccttgaggacctttgaccgagatgatctgtctttcagactttactagcaaaattctgagcagtatcttttatacaactggcagcttcaaaggcttgcagtgggtaggcctccccaactctgtttcgcaagataattaaaagaagccagactccttcatccttgaaggagaggaagaagaaaacaagcctgtccagagaaaatggggtgaaggaatttttctccccaacttcctcctaaataccctgctctgcccatcaaattttgtaagtatcacccagtggtgtgttggtaaaccttctcccctgcggggtgggggaaagccccaatttgcagccgttgttgctgtctgtgttgtgaatgctcccaccatgctgactgcaagtggagctgggaagagatgtgtaccatcggctcactaacactagcatgctctgtggtagacagcttcccttgcctctgaatccttgtgtcaggattctacgtgccaggcaacaagagctttttttctttatgtatcatgccagtgattttagtctagggcactgttttagcccaatcccagaatgtgctattagaaatggggccatatttttgaagttgctaggggcaaaacttccctcttgtttatgtttaacttgtgccactaggtggcactttaaggacattacaggaaatcggctctactggatttttaaaacttttttttttttgagacggagtctcactctgtcgcccaggctggagtgcagtggcatgatctcagctcactgcaacctccgcttcccgggttcaagcaatttagctcactgcaacctccacttcccgggttcaagtaattttcctgcctcagccttccgagtagctgggactacaggcatgtgccaccacacccagataatttttgtattttagtagagatggggttttgccatgttggccaggctggtctcaaactcctgacctgagttgatctgcccacctcggcctcccaaagtgctaggattacaggcgtgagccactgtgcctggcccaaaacactttttattgaagtataattgcatatagaaaagcaagctgcacatttaatgtgcaactcaattttcacaagcagaacacatgcatataatcagcacccaaatcaagaaacagaatattactagcaccccagaagccctccttgtgctgttttccagtcgctatctcttattcttagggttaccactattctgacttctaacagcataaattagtttgacttgtgttctactttatataagtggaattatgcggtatatactctgtgtctggctttttattaaatgatgtttgtgtgatttattcatactgttgtgtgtaattgagatcattgctgtatagtattccattgtatgtgcaaatataacactgttttctactattgatggacatttttgtacttttcagatttgggcaattatgaatagtgctgctgtgaacactcgtatccaagttgttgagtggatgagtgttttcatttctcttggatatatacctaagagtagaatttctaggtcatggtgtaggcatatgttcagctttagtaggtactgccaaacagttttacgaagtgtttgtactgatttacactccattaatggtgttcccactccagttccatgtcctcatcaatgctgaatttattttatggatggttcctaactcttaacataatttttatagctccctttctggccagctatttctaattgaaaaattttaaagccacattattctgatggacatggctcatgcaggaagggctatgtcaacccaaaaggggacatttatcacagtctaagtgtgaactatcagtaagtcggaaaggatgttactctaatactccatcacactgatacacagagcaaagaaaccaggaaaggaattcagattgtaagtgtgataaaatatcggttcataggccagggctctgaggcattttgaaatttgtatatacatttgttattattgccaggcctatatatgtcagagattggggcccaacagaaagaatttctaaaggcctcataatgaagtgcctttcaattgtgctgctggtgggtgcctgttttactaagggtctctttggtttggcaagaggcatgcatggggcatctttcttcaacctcatccctggggagcgtgagtctctagagaatcctgctttagatcaccttacctgtgaggctcatgttgttgactctgcagatggtgttataatatggctttaggtatgtgatatagagagtacagttcagacttgactcagatttctgttccattactagaaattggacatagaagaacaaaacccaggtcatggtcaaaatatttgtcttttagaccaaaataaagtgctcatagtcctttagttgtaacagtaagtctgtctcatggatgttgtccataatctaatgggttccaagaatccccaaggcattctgccatgtgactcttgaatccagcaactagttgcccattatagtcactggtacccactttcaccaaagttgttcctgagcccctctgtcagtgttttcctgagtgtctccagtgttggattggtctaccgaggggggtgcccaccagagatgttcactgcacactgcctgagatatccatgttaaagcagccgtgaaacatgaaagtctgaccgggcttttatttttaaaattttctccccccaatattagtagcggtaatatccagtggcacagatttagactgtggatagcctgctttgtgggatctgcttatattctaaattggagccagcattttctcagcctaggttttcatctgtttggcaaggaggaaaatgcccttatgttggattggctgctgcttgcagtaggaggaactatgcctgggaaaccaatcataattttaatcctaatgataatagtagctgctgttgtcaaacagttactgtgtaattgtgcttagcacactagacagatattttgcttaatcttcacaatattgtgagttaggtgaattatcccactttgcagatgaagaaattgcagctcagagagactaagcatgtgaccagctcacacaatgagcaactgcaaagcctgggtttgactccagagcctatatcctgtaactgttctgtgctctgtgggtgcagttaccaaggaatgaattactgacctcttctccagtggaacatgaaacagtattgggttcattgctggcttattccacacattgattagaggacctgttgtttgctggcatgcagcttaggtatcaagaaaatgatagggaagcaagacagatcctgccctccaggtgcttaccattcgtttatcatgttctgtctctcacaggtgacttgagtcatggattttggtaatcattcttgctgagaattcagtctcttggaccttcttgaggctctatttacccctctctctgagcctggttggggaatgatggggtggaacagtggtgtgctgggccattggttctacatcttctgtgactgggtttagcaaatggctttctgttgtgttcttgcctagcggagatgggggacaggtgaaaactaggcaccaaatgacatttagaatactgacagaatgctggaaaggccctggaggcagcagcaggattgtcttcttgtctgcctagaatttagctgctgcctttgtgatccccattcttggaatccacctggatccttggatgataaagcctgagttcgtttttctgacctgccaatattgcaaacctaaaaaaaaaaaagttacctattatccacaccttggcaaagttctacagatggacttcttttttttttttttttttgagacagagtcttgctctgtcacccaggctggaatgtggagtgcagtagcgagatttcagctcactgcaacctccgcctcccgggttcaagtgattttcgtgcctcagcctcctgaatagctgggattacaggagcgtgtcactacgcccagctaatttttgtatttttagtagagacggggtttcatcatgttggtaggctggtctcaaactcctggtgtcaagtgatccacctcccaaagtgctgggattactagcgtgagccaccatgcccggccagactattttttaagtgggatttgactttttttttggttgcaaatttgacttttaaacaaaatcttactgctgaagattttgcccagctgcaaatatttatctatagaaccatgtggcatatacccccattccctctatgatgaatggatgagaaaacaattaagaagcctagttagttttgcaagagcacctgtggccttgcccagactagggccttggagacttggttttctcatctcttaaatgaagagtttggaccatcagtggttcccagttgatctgggctggctacataaaaatcacttagggtgcttgttaaaatataagtttctaatgccccatccctaagggattctgatgagggaagtctggaatagcatctacaaatctgaatttataaaaagttccccagataattatcctgctctggttatatttgggagccactgggctagagggtctagaacaaacataattaagttagggagaaacttctgatgtgcttgaagatttggggaatacctatatgcctggagcaggttccatatgggcgaactaacccagttatgttgcagaggtaaattggagccagaggatggaagacctttaactggctgagggattgtgttgtgtgccataggctttggggagccagtgaagggctttgagaaaaagcattttgattagatggtgctttaccagattaatttctcagtggtgtgcagggtggatcagagtgcactagaactgaaggctggaaaaagacccagtgaagtctttgcagtggcccaggtgataagtgtgacgagtacctggactcagatgggaccagtgggacctttgtaaagctaacctgcctcagtggaactggaatctgagacatactgttttaaactccttaaaaaatgcataatttattaatgtcatgttcatctgcctaaactattataattaactatttttattgtgtttttgtccaagaggttttaaaggagccctgtaaataaattcatgcaaagaagtagttggcagcagcaacagctgctaccgcagggagaagggacccccttctggccaggcagcaacctcattctcaccctgtctccatactctaagccaaagcgagaggggaggggagtgcaacaggggcccctggagttggatctgccaaccacagtggagaatgcacctccccaagggttaggtgtggaatatggcgtttggcattaagtcaaatagaatattcttcctttgttcctctaaaatccagtctatagtcaatgtttctcaaagtatgttccacagaacattagttcttcaggatgttaatagaagttacatgagaataaggagatgaaaccaaataaatttgggaactgatgggctacgcaaaggcaagtgacttcctttcagaatttcagagtgtgtaatgttctgtgtgctcagtgaatctccaagggggagatagaccaggcagtgtttcctaagcttatctgtagattcttcttccccctaggccaggggctgacaaattatggctcataggcctcatctatcccaccactttttttttgtaaataaagtttattggaacacagttgtgcccattcatcgtattgtctgtagctgctttagcacaacaggagagttgcagagtggctacagaggtagtctggccctcaaagcctaagatatttactatctgcccattacagaaaggtttgctaatccctgctctagacaattcatggaactggtgcttcctggtaccccctttcagagatgctactagaagaagatatacatgggttgttctagcactgctttatgataaatctgcctcattttattctgtttccatactgccatcattcctgcctcttgctttaaactactttatctctcaaccatttacccattatccaggatccaaacctgggttccatgtgtccttatcttttcttgcactcacaacattccaaaaatggccaagggtgtcttcaatttccagtctgggtagctcttaagtcagcccgaacccattcctaccaacctggcctacatgaccgtcatcttttctttttcagcattcgaattaggttccttttccccagatatgagttacctctagtcctttttactcactgaatctagaataacctttgtaaaatacaaatctagtcagattgattccttacttaaaatccttcagtggtccctgtggccctcaggataagctcagatcctcaggatggatgtgtgtcagtctggttgggcaaacagaaactactcctggtatttcgtactggaagagatttaatttaaggaattagttacttaagaaaaggagtagatatttccaggcttctgcctgctgtggcatagagaagggcatggaaatgggggatggtgttgagtgtttagcaaatgacccagaacaaaccaggtctgggaaaccatgtgttatcccctgctgcccttctccagcttcagctctcccatttttctcctgactcctcacccttcctccaccctgcaagtccccaaattctagatatatcaggatgcctttttgtccccccagaaacttaaaacaactgacatttacgaactcacagtctctttgggtcaggaacttgggagtgacttagctgggtggttcggggttacatcctctcatgaggcttctgtcaagatgtcttccagggctgcagtcatctgaaggcttaactggagctgatgatccacctctaagatggctcactcacagggctgttggcaggaggcctcacttctttgctgtatggaccccttgttaggactgcttgggtgtcctcacaatgtggcagctgactgtctccagaacaagtgatatgagagtgagagatagagatagaaacagagacaacaaggaggagcatactagagtgctttcagtcccctctcctgggagtacgttgcatagtgtctcaggtcagcttccctagaagcagaacctgagatgaggattcttgaaaagtgatttgttgaaggagtgctctttaggaaaaaacctagaaggaggagagggaagaaaagtagggaaggggaaggagccaagcaatgatatagtctcagataaaatctgaccttggcctgatccacacaggcaggattctggtacataattgcataatagagttaaccctgtttgagacaggggactggccttttatatccttctctaagtcagtcattataggctgctggaggtgggggtgggaggtaggctcccattagttgagaataagtctctagagaagagggtggctgtgagtcctcagtagctaacactcagagcagctgggggatggtgtgccagccagggaaaggtgacccaggtggggccaacacagcacctactacagtgggcctccccgtacccatgtcccaagcacctaccatggtccctgacataccagaggtacgaaaaaaatatctgtgtaattgaataaatgaatgcatagaaatgcttagcctctctggacctgtgtccatttctgggaagtcagctcagcagggatcatattgtcccatcaaccatgggaatggtcgaagacccaggacagtttgccacatcatgagtggcagcactgtctaagtccaggattttcattgcaaaattagagtgaaagtatatttgccatttgtgaataaggaagtattaatattacaatattatatatttttaaaaggaactttagctcacatttcagtgagctctttgctaaaagtacattttcctggtttgtcacatcctgactgggtacatgttgttacacatggaaccgtgagggcagaactgccatttgttatattaattgtaatccatatatctgtttttttcccacaagaatcagtcactggatttcagttcagaaaaccaaaactgtcggacaaagccatattatcgtgttggcagagttgttccccatgaccccaaatacacagaggaggaagagaaccactgaggccccttgttttcttggattatcattcttccaaagttggtaactaagaaaagtctcaagaaatagcaaagaaacctccccaccttattctgctttccacatcccaagcctaacataagcctcaaactatttttatgaaggaaagcttattgtgaagagggtcttttacatgcctaaatctcatctttagtttttcttatcacacagccggttatctttgcccatctcttttcctgggataatgtctggctctgtcaaggctgtgccttattctgggaccttcctaatgcctgtgttccaggtccctcctgagattcgctcctccgaatgcttgatagatggatcaatttaggggattgatggtcagatttagcctgacataacaccatgcagtggtctgttaccagacatagagctggaaaacccaggcccttgcatacaagttcaggaaggtaaatttgcaaatgaaaaacattttaagacacatctcacagctgcttcctcatcccccaccctattgtttgtgtttttagagatgtttaagagaaaaggaggcaataacaaagacgctctgctgtgctttggaatcctcatttatgttgaaaaagggtccatttatcatctccttggatatttccacaaggagactttgctcatctcaccagggaatggagtggtagagcaaacacttctctgtccacctgatgatggaggagaaccaactaactgaaaggcagagagcctgaaattattatcctctctctgcctgcctgctgcaagatattgctgcatacctgtggtccctgcaggaggctgcatgcgtagacttgggccagaacatatattaccttccaagcaatagatttctaggtaaaaggcaagaaggggcctcaggttcaagttgcattcttcagtggggttcacaggaggccctgcattcagggggttactgggccctccttcagctgttaataaaactgacttttggctcatagagcttggagtatgcgtccatttgtatgaacctccagggaaagcagggtgagggcttgtgttccctagactcctggcagtgaatggctcctggacagctttgcttggttgtttcccaggtacttcaaactcaatctgcctaaagatgagttccccctcactcctgcttctcctgtgtttcccatcttggggattgaccttagtgttcttgtggtagccctggctgaaattatggatgttggagcatgggaggccctttgtgaacttacttttgggtctttctcaccattcccacacattgctcttttagcccaggcctcagctgagacatcacctgctcctgagtctttgccgacccatgagactgggtgcttctgtattccccatacttgccctccacagtccactgaagcaagttggctttgtcacttccctgttgctcccactagacttcaagcttctcttaagcaggatctgtatcttgttcatccttgagtgccagtgctagcacagggcctgcctgtagtagctgcttaataaatatgtcttgaatgagtaacactcaggcctgagaatacctgagactgtatggcatagtggttataagcttagctttggaaatcaaggcctgtgttcagactctgctatttgtgtgattttgggtgagttccttaacttcttgatcttcaatttcttcaccaataagatggggataataactacttcctagggctgtgatgatgaattgcaatgatccatgcaaagccctttgatcaatgtatgacacatagtaagtgttgtgtgcatcatagtacctattagtaacagcaccaccccctatagttatcgttaatggaagggagaaagctataagaactagttggaactagaagtcaggaatattgagtgcttgcatagtggatttagaggagatggggaattgcttgggataaaatgtaggacacagatgggattaccctgggagagaatgaacagggagggaaaaatgggtggagcaactaaagacagaaccttgagaaatcctacatttgagggataagaggagtcaaaacaggaaaaagagtgaatgactacagttaggagattgcagcttctcagatgccaggggcaggagtttaaaaaagatagtcaaaggtgctatactgggcagaagatcaatgaggagaagacgagaagaggtagccataacgtgttaaatgggggtatgttagcgcccttgggaactagccatttcagtggagtcagaggaagaagccatgctctgaaggaggttagagaaggccacgttagggatgaagtgggcatactaagtcagtttgttgtgctacaatgtgtgtttctgtaatgaggattatctgtgggtcagtagatgactggtgtcagtatgatgtagaagtcacattggttcatatgtagggttcattctcagcacatgaatgttttggcatcactggctactagtggctgaaagcagactaacacacctgaaggcagaagactgggggaaatgggggacatagagagctgctcatgaggcgcagtcaccctgtgttcttccacttgactgattggcacccactctgtcttgaagtgctttggggacattccttgccaatcttggtgagtttagtcactgattccattccactcagcacccttgacccttctgataactccttcgaccacagtcccccttccttttttaagaagggccatatttactagagtttttttttttttttttcccaaactgtgtccaggtttattaaagatactttttgtgaacagtcatggtatttcaggcaggacatgagcgacaatcattaacagtatacaactttcagactccctccttcaatggacttccaaaatcagaaagccatggtaaaacccaatgaagtcttcatttggtaccctgaagagggaaagttcagagtgagggttgacatttcacattcaacgtgctgtttaacaacttttcatgagctgaccctgactttcaggaaatgaaatgaaaatggcagaatttatctgaagatccacaatctagaaacagagcacgtgtctttcaagggttctcgctggaaagtccagattgccagcctgactggtaaccagttattgggggccagaccccaacaggtatctgggtttgagggagttaagtgtatactgaaggcagagagggagacggggaaataaagaggaatttgtttctccacaccacaaggcctttgtgcgaaggtgactgtgtgtgtcaacgtcagacagtccctctttctgggagccaagaagatgtctttaaaactagaagggaaaggtgttttctccacatcagtccagcttcatagacattctttttcttttttttctttcctgagacgaagtcttgctcttgttgcccaggttggagtgcagtggcacgatcttggctcactgcagcctccgcctcccggcttcaagtgattctcttgcctcagcctcctgagtagctgggattacaggaacccatcatcacgcctggctagtttttgtacttttagtagagacggggtttcgccatgttggtcgggctggtctcaaactcctgacctcaggtgatccgcctgcttcggcctcccaaagtgctgggattacaggcatgagccacggtgcctggcctcagagacattctattagtgacatataccccttctccataaaacaacaatgacgtgttccgtgtgctaacaacatggcttaaaataaaggcataaaaacaattctgcatttttataaaacttaataaaaaaataatacttcaaactgcacagtcaccagaaatacacagttatcaaaaatgcacacacttcccttggcatccccagcgccttcaactttctgtgcctgctctgttttggcctctgcattttctgcagagttattcccctccttgccagcatgggctttttcctttttcccctttaccttctctcccttctttgcaggggcctctttaggcttgggcttcggaggagcaggtttggcagacaaccttgcagatcttctctgtggtttgtccttactttggttttatctcctttagcgtccccttcagcctttctcttgggcatggtggaggcgactgcagtggaatgtaggtgctggatctggggatgcagcagtgcgtgggctttggttggcctgggggatagttcttacctcttcttcttcacactgctcatagagtatttctttattagaaatttaacatttaaaaaattcagtgtttttaatgatgttgattgtttttgttggtgctcaagttaaaatctttgttttcaaccctgtttttccgataagccttgttacttttagagtttgttgttgcgaagcattagttttttagcaatacatatgttcaattacagaagaaattcccatgattccttttcctaaggttgaacaatctgggaaggagggatgggaaggttaatagcagcatctatgggaggtttttcccaaggatcagcagacttaagcattcttggctgcaacttggcctaaatcagttttcccttggtgactatcttcctaagtgctctttattgtatatttaggtgattgtggttttgcatttctgtcctctctctgatctcttgctacagtctgaacaagtgtcggaggccgagttactcccacagctgagcagagccccatcccaggctgcagaaagtagtccagcaaagaaggtaaggtcagcctgaggatgctgtcagatggcgttgcgagtcccaccccgggcttcttatctctattagctgatctattgttttaaggtttctgtgtcctgaaatgaatgtcaatgatccagatttcctagaatgtgggttctttgtgaagattggggtcctgaagattcctgggcttgacccttgatgcattttgtacatgacagtacatactcaacctccttagccccccagctaaacatggtggccttgtttatggcaagagctaaaagggctgtggggagggacagatgtctttagcaaaaccccatccacctgctaagcctctgtgaatacctcttggggtggggtagtctctcctttttggtctttgtaccatggtttcctcttgcatcgtggcattttcacctggcatctgcccagccatgccattgggtcacctgtaatttgctcagtaagtacccctcactcatcatgctctccattcatctcctcaccctcttcttgtccttctcccaggctcttctttcagagagagtgggccttgggctcaggagcacaggtgaggtagagtcctccaaagaagcagaccaactgtgtccttccagaatacactgtggctctttttcttgactttatgtaggaattggggataggagaatgatgagcatatgactaagacctttaaaaacttccaaagcttaggtttttttttgtttttgtttttgtttttttttcctgagacggagtctcgctttgttgcccaggctggagtgcagtggcgcgatctcggctcactgcaagctcccaggttcacgccattctcctgcctcagccttccgagtagctgggactacaggcatcttccagcaggccggctaattttttgtatttttagtagagacggggtttcaccgtgttagccaggatggtctcgatctcctgacctcgtgatccgaccgtctcggcctcccaaagtgctgggattacaggcatgagccactgcgcccggccaaaatttaggtttaaaaggcttcaaagtgaggcaggagcctatcttgtcttcagttaggaaaggccccatggtgtgagatgcacacagggtctgtgtgagtttcaggtgacaagaagtaatagacttcttgaaacatttaaaaagaaaaagaaaaaagggaagaccactggactctgatgcctgtgtccccccagttcttgctgagccatgggtcagtaaatagagtaccctcctgatcttggggttggggctaaaggcatgtgggacactggaaggaagagtggagggaacattgaaatgtttaactttttaatttttattttgttttaaatccacaggatgtactgtattctcagccaccatcaaagcccattcgtaggaaattcagaccagaaaaccaagctacagaaaaccaagagccttccactgctgcaagtgggccagcttctgcggcaaccatgaaaccgcatccaacagtccaaaagtaagtagaccacataaacaagagtgaggtaggaatctcgctctgagatgtcgacggatatgtaaatgtgttgacatttacgtgcgcaccaacagaaggatttcatggttgtaagtttatcttgctcatctctgtgatgggattcaagtctcccagtcacatagaaggctttataagctataggacttaacctgacctaaaggggcaggcgagtcctaggctgtggtgtttggtttggtttgatttctttcccttcctctcaccttctgttgtttcctactcctcttccttgtgagggcccaaattttcctggcaagatgaaagtattgtaagtggcaattttgcctctctgcctgtgttatctccttttccttcagggcaaatggctagctccttcacccacagacacactttcagtaggtgtggtatgtgattcttttaaaatctccgtaaagagtttctgttgttggtcgcctcagcacagaatggatacatgcagaacttccattatatttatctaaccagctggaacaggtattggagggagggtgaagacacctgtggacatggccagggactgagacaatgatgctctggacaaactatccttctctgtaaaactttggctttgagaagagccatcacttgcttcaatttctttgtagtgaaattgagggaggtgttgaggacagaaacctgctcctgtcacttgactgcaagtgagcctgaccggtcactaacataaatgctcaagacccatcatgaccctgcttttggggtcttgcaggtctcagatgctgctgcagattttcttctgcttacacgttgtagaatgaaaagcagcaggttctgtgggagatgttagcaacttgtctttgaagccaaagtcccattctgaatctctgcagccctctccttcagaagattttctttttttcaaatggacaggtccctggtggtatcagtccataaaggaagtatattttgttcatcacattcaccgagaactttgaccatcttccagcccctgttaagcctggaaggtgaagaatccctatcagggacaaagatggctcaattttcttccatgttctaccccagcactccactttaatttcagctttatgttcattttagtcagcagtggcttaacagtctccagagtagatgtcagggcatctggtggagttcatacagagatcttttctttttctcttttttataacagctttattgcaatataattcacatagcatacagttcatgtttttaaatgtacaattcagtggttcttagtttattcacaaagtcatgcaaccatcaccacaatctaacttttgtcatgcctaaaataatatatatccacgcccattagcaatcactccccattctctccttccccctcagcccctggcaaccacgaatctcctttctgtctccatggctttgcatattcttgtcatttcacataaatggaataatgaaacgtggtcttttgtgactggcttctttcacttagcataatattttcaaggtttatccaagttgtagcataaatctgaacttatctttttatggctgaataatattccattgtatggatagaccacattttattcatccattcatcagtcaatggacattttggttatttctgcttttttggctcttaagagtaatgccactatactgtttgtgtacatgtttttgtgtggacttacattttcatttctcttgggtctgtacctaggagtggaattgctaggtcatgtggtaactctgtctttaatatttcgaagaactaccacacttttcatagtggctgcaccattttatgttcccgttggcaacgtatgagggttccaatttctccattttgtcaacacttatcttttttttttattatagccatcctagtgagtgtgaagtgtgatctcatggttttgatttgcatttcttttgtggctaacgacattgatcatcttttcatgtgcctattggccatttgtttatcttctttggagaaatgtgtattcacaccctttgcccacttttaattggattattaatctttttacttttgagttatgaattctttatatattctggatacaactcccttgttagatatatgagaaaattgagccctctttgtaaatattttctctcattctgtgggctgtcttttcactttctattttttatttttattttttagagacaaagtctcactctgtcacccaggctggggtgcagtagcatgatcatggctcattgtagcctcgaattcctgggctcaagtgatcctttccccctcagcctcctgagtagctggaactacaggcatgagccaccattcccagccaatttcattttattttttatagtgatggagtcttactatgttgcccagtctggtctcaaactcctggcctcaagtgatcatcctgcctcaacctctcaaagtgctgggattacaggcctgagccactgcacccagccaattatcaatattaatcagatctgtacagtggtcacagtccattctagttcagttgctcttttctagaacctatctcccagtaatggcacatatggctgtttttctaggagaacatcagttgctcttttgctctaagaattcggtgtttcttgctgtgggatgaaaggttgtagattatccctgtggtaactgcactgatttatcatcccaaccatggacggttttgaaaagtaaagagagtgctaatgtacttatgctggacagacagttttaaatggagactgtaatgggcgcagtaggatgcgtggtcactctggttatgcgtgttctgtgaatttgttgttaattgggaaatactggtattaaaacgttctgtatttttctcaagagccacagatatatgctggtccatgcacatacacgagtgcacatttatgcacacacacacatatacttaggcattcatgcctaataatacataaggtagaggtaggtagtctggctaagttaatgtagaatttttgctaaaaataatgttcttgtattattttccttcagacttgttcacaggggacacctgcaggtcttctaagtgctattaattcttacacaaaaagggcattccagttaatatggtttgtcaggaagaaatacttattaaaatgtcttggaataaatggaacacaaatgtttgaaaaggcccatttcacagcttttattcaagttataaaatgggaattacttcaggtgtaaataattcatcccaataaatttgtttcatttggtgtctatcttcctgaccgcctgtgaatatgagattttatttttggagccctgtgttgttaaccacttgttagtttaacacctctcatgaatcagagttctgaccctcaagggtccagacctctaagtcctttttcactgaagtgtttgtgcttttctataggcagtcttccaaacagaagaaggccattcaaactgctatccgcaaaaataaagaggcaaacgcagtgctggctcggctgaacagtgagctccagcagcagctcaaggtaaggaatgagtcccagatttggatgaccaggcttttccctggcttttaaaaagctttttttaaatttaataggcatataataattgtacatatttatagggtggggtacatagtgatgtctccatacctatcatgtacagtgatctgatgtgtccattggctgaccatttagttccatccctgttgataagacttgcctcttcgttctcaaaccctttttggaaggtggagaattactgtatttaagtttcatgggttggttcttgcatagtcagaggaagactagtgactttaatatgtaggcttcatattgtgtatgagttaaaaggaaagacaatctattacgaaggctgtttgaagcattctttattatccaaagcttctgggtaagcccttaattatttacatcctctctgaaagaggatgtaaatacttatttcagtagaaggaagtcaccttggtactatcaaagcccagcccctcctctggtgccttgcaaatggttccatttcaccttctcaatgacatcacccctgtttctcttcatcgttactctcccctgtgttagtttctcggggctgctataacaaaatactacaaatgtggtggcttaagataaccaaaaatgattctctcacagctctggaggctaaaactctgaaatcaagatattggcagagctatgatctctttgaaggctctagaagatgatccttccttacctcttcccagcttctgatgttgctggcagccctgggcattccttggcttgtagctgcgtcactccaatctctgcctctgttgtcacatggccttcttcctgtatctctctgtgtctgtgtccaaatttctcttcttattgtatcctcttataaggacaccaatcattggattaggacccaccctaatctagcatgacctcatcttaacttgattacatctgcaaagaacctatttgcatataaggtcacatttacagatactgggggttaggacttaaacatatattttgagaggacatgattctacccactatatcccccagttctctactggatcattcgccatccacatgtaaatatgctccagtattgtccattacacttggccaattactgcctcatttctttggtccccttcacagcaaagtttcttaggagtggttttattcattatctttactttcaaaccagtaattttctcttccttccacttcagttggcttcgtcctcctccactcacacccgtcttgtggctaaatccaatagggctgttttaatattattatttttttttcagaagaattctacacaattgatcatttcctcctctgaaatggcttttataactggtttttgacataccatactctcctggttttccttctgcttcactggtgcttcccattttcattctctgctgtctcttccttccctgacttaacttttataccccaaccccatttgccccaatattttagtatgaaaattttcaaacatacaggaaagttgaaagaatcataagtgactgcttgtatagacatcacttcagttctacaataacattttactatacttatttttaatcacatatctacccatttatccttgtgtccatcagttcatcttatttttgacatattttcaaataaattgcagatatctgtatactttccctgaatattttagcatgcgtataattagctagagttcaatatatttttacagttttttcttatgatgtaaaatgtttatacaaaatgcatgcacaaatattattattattattattattattattattattattattattatttgagatggagtctcgctctgtcgcccacgctggagtgcggtggcgtgatctctgctcactgcaagctccgcctcctgggttcacaccattcttctggcttagcctcctgagtagctgggactacaggcgcctgccaccacgcccggccaactttttgtatttttagtagaggtggggtttcactgtgttagccaggttggtctcgatttcctgaccttgtgatctgcccgcctaggtctcccagagtgctgggattacaggcgtgagccaccgcgccagcgcacgcacaaaccttaagtgtacatttgctgagtttgtaacaagtacatgtacttacggaatccaaacccccaaaaagatagagaatattaccatcaccccaggaagctccctcatgctttttcctagtcaattcctgccctacccacacagaggcaatcactattctaatttttataccatagttttgcctgttctataactttatataagcggtgtcttacaacttatacttcttgtaaagcttctttcactaagtattatgtttttgagattcatttatattgttgtgtgtatcagtaattcattcatttttattgatgagtagtatcccattgggtgaatatgttacagtttggttatcaattctattgacagacacctgagcggtttccagtttttggcaatttggaataaaactgcattttttaataagtctctgtatggaaatatgttctcatttctcttggattgggattcgtaggtatcatggtaagtgtatgtgattagtttctgagaaactgctagatcattttccaaggtggttgtagcaatctgtactcctaccactaatgtatgagagttccaattgttccgcgtctttgccaacatttggtgttatgattcttattaattttagctagccctgtagtgatatagtttttatcatctccttgctgactaattatgttgtccacttttctttgtgattatttacctttcatatcttactttatgaaatatcttttcaaatgttatttttctccaaagtagtctatagatttattacaaaaccaataaaaatcccagcaggattttttgtgagtatagacaagctaatcccaaaacttatatgtaaaggccaaggagctggaattgcttaaacaaatttgaaaaggaagaacaaagttggaggaatcactttactgtcaagctccagtaatcaagatgctgatgcacaggtcagtggaataggatacagagtcctgaaatagaccacatgaaaacagccatttgatctttgacaaaggtgcaaaatcgattcaatgagaaataatagttttcaacaaattgttttataacaatttgtcatttgcatttaaaaaaataaccttgatctaagcctcacatctatacagagattaacttgaaatgagtcatagatgtaaatgtaaaacatagagctataaaatttttagaagaaaacagaaaaatcttcatgatctggagttagaaataacaccaaaagcacaatctataacagagaaaaactaaaaaaattggacttcatcaaaattaaaaccttttattttgccaagcacagttaagaaaattaagagacaagctgctgagtgggagaaagtatttgcaaaacacgtatttgataaaagacttatatctcaattatataaagaactcttaaaactcaataataagaactctcaaaaccaaagcatctcaatttaaaaatgggcaaaggatttgaacagacacttcactaaagaatatataaagatggcaaataagtacatgagaagatattcaacatcattagccatttgggaaatgcaaatttaaaccacaattacataccactatacacatactagaattgctaaaacaaaaaatgtgacatcaccaagtgctggcaattagaactctcatttattggtggtgggaatgcagaatggtaccaccactctgaaaaatcgttcagcagtttcctatgaagttatacatacactaaccatgtgactcagctgtctctctaccttagtgaaatgaaaatttatgttcgctcaaaaatctatatatgaacttacatagcagttttattcatgatagcccaaacctggaaacaacacaaatgtccttcaaaagatgaatgaataaattgggatacattcatacaatggaatagtactcaacagagaaaagaaatgatacacaacttggatgaaactcagacattatgcagagtgagacaagccagtatcaaaaggttgtgtactgtatgattccttttatttgacattcttgaaaaggtaaaactatagtgatgtgaaacaaatcagtggctatcaggggttatgcatgagatgagagtttgtatgagtagtcccagggaacttttggggttggttgaactgtaatgtgtcttctttgtggtggtggttacacaaatctgtacactaaaagaaaaaaattgttttaccctatgataattttaaaaagttattttttaaatttcaaagttcattctgttttctaaaactttgtatgtgaacttgttttgttttgcattttgtttggttttggttttctcctctctccctctgctttggggtaggccagtttcatccattgttctctacatttggtgggccctttaatttggaaactgatattccccagttctgaagggttttttattttcatttttgttgtcgttgattatttcctcccccctgccctcacccccatttttttctcattctcccttactgatattcagacattggacttcttagcttagttctctaattttctcatattttctcttctgttttctttcttttctcttcctacattttcttctttatttttgtctatttctggaaacttaattatatattctaaatcttctgttgtttaataaccaataattttttgttctctgtttatttttgacggtatcctattcttgtttcattgttgtgatcttttttttaattatactttaagttctgggaaacatgtgcagaactcgttgtgatctttttttatggtcatttttctttcttcttcctgaatagtttgtgtttgttgtgttgtgttgtatgtgctttatcttagatgctttcctttgatatctgatggcccttctttgctcatatttaaaaggaagatgaaaacactgattagaagttcattgtacgttgtaaggcttgtcaactctgagcttcactgtctggcaatttggctcggctgtatagttggggaacccccaaagggagtatgattagctctttcctcttggtctggttggagtgtccagagtggagactgttttggtcacctacatggagggatagagttggttcagtggagcaagagggctgtaggtctcagcattccaggatattcattcactctccctatttctggcccagtatcttgtcctcaactgtgcttgtttcttgctaatccagatgctctctgttgtaccttttcaagaaataaaccttcagcattctgccctggtggcaggaatgatctggggatctaattgcttctgaaacagattttcagccaacacttattttagccaactcccatctccccttatgtactcccactttaataggtatctggtgttgccaatttgagtctttcaggaattctcctacgtaaaatcaagttggttcttatttttcttcatgttagcctgggactcagctttctttacttgatctgtatgagtggaaaagttctaagtctagtgaacagaagtctgaagaatcattgaaacagaactatagtcatagcccctcaattaattcccaggctaagccagtttatagatccagaacctcttgaatgatgaaggggcatctatgtctccttaaggaaggaccccactgtgcagccaaaaatttacactgcaaatctttctcctagcctttcctaagggggaccctgctgccatttaccagggtgactgtgcattagaggaagggaaataattagacttttggggaattaccagacactggctctgaactcacactaattccaggagatgcaaagtgtcactgtggcccatcagagttggggcttagggagatcaggtgatcaatggagttttagcttatgttcgtctcacagtggacccagtggactcccaaactcaccctatggttatttccctagctctggaatggcatgcttggaatagacatactcagcagctggcagaattcccacatttattttcctggatttcctaagtcatttaccattcaccagtttgccactcagctttcaaattttattgctatcatcttgtcccttttgttttccctgtcttgtgggtccgtgactttgaaaagttgctgtattgttttagtggtgctccaggagggagagagtgtggtacccctggtcagtcttccatctttacctgaaacctctatctatactgttttgctagatgatgttatatggtctcatggctttgaagaccatccataaactaatgaaacctaatttatgtctcaagccctacttctcctttcctctgtgctctagacttgcatatataacttcttactcaatgttttctccttagatatccaatacacatctcagataattaattgccaaccctctccttgaaatactcatttcttatctaatcttctcattctcaatatcactaccagccagctactttcttcatacaaaaatcccaggagtcatcctcagatttttcttctctcctacatcaactttatcagcaagtcctaccagttctagattcaagatttatctagaattcatccacttctcttcatcttcatggcttctaccctgacggaagccattttcatttctcacctgggtccctgcagtaacctcccagttgctcccctgcttccactctcatcctgctataatctactgtctacacagtagccagagtgaaaattttgaattttaagttgggtcatgttccttccctgattagaaacactcaatgccaggccgggtgcagtggcccacgcctgtaatcccagcactttgggaggccgaggtgggcagatcacgaggtcaggagatcgagaccatcctggctaacgtggtgaaaccccgtttctactaaaaatacagaaaattagccgggcgtggtggcgggtgcctgtagtcccagctactcgggaggctgaggcaggagaatggcgtgaacctgggaggcggagcttgcagtgagccgagatcgcgccattgcactccagcctgggcgacagagtgagactctgtctcagaaaaaaaaaaaaaaagaaagaaagaaaccctcaatgccatcccccctacatttccatactatttcctctgcccacaaggccctgtacgatctggctccttgcttaaatctctgacttcatttcctgccaatgtcttccttgttccatctactctggtcacacaggctttttgttcatcaaattcaccaaactcactcgctcctcagggcctttgcagttgcccttttgtctctgtgaatatccttccccccatatcttcatatggctcactcctcatttcattcaagtctttgctcaagtattgctaactctgagaagccttcccagggcactctctctcctttctcccatatccccctctgttactctctattatgttatcttatttccttctggaagtatcttgttcattaactttattatctttctcaagtcatttgaatataagccctattgctctgatctggcatattctttgctgataccatcacagctacagcattacctcacctgtaggagatagaaaccaagagacttccggctgggtggctaggagagcatgtgaataaatacttgtgaagttgtatactgactattagtatgctgattcttctgaatctcacaattcagcctttctacaggattctttcccaccttgactgattctacttgaatacctttatgtgtcccctctcttcctgccaaaaaaatccgttttaggcccgaaagtttgaattcccaaagagcagattgctcagcctcttttctgcctttcacccagatgttgtaccttacaccatatgttgtgcagaaacttggatgagactttggtggaggggcaactagcgtacctttttggccctcagacctaactgagtatggtgcgggattacgagccagagattgcaactagaaatttaagtcctgttggctcactgctcagtattgggagtctgtttttgctttctgctttctcctagtcttttaatttttaatgactctgtctaccagctactgatcttgtcaaaacaggctaaaactagggcagggtggtagaggggagtaggtcagtttcatttcatcacgttcagaaaggagttgagagattacaaattgtgaagccccttttgtctggtcaccagcattaaatctgatacctcccagtcctcctgttcttgagttatacagcacttgtatttgtgggtccagttataagtttccttttaaatctgatgaagtagggatgaattcaagaaatgacccctttgcttttttgtttttcttgtgttttgtacaactcaggaggttcatcaagaacgaattgcattggaaaaccaattggaacaacttcgtccggtcactgtgttgtgacccccccatggttcaagtgacagtgggtgaccttgtctgccaagatctttcttttgaatgttttgaacccaactacttgtcatagatgtttgactgtgtcaaaagctgtgagcagcaaaatataatccatatgaccttttctcttgcacttcacttgtatgttttactgtggtggaaaaaatacttcaactgattatcacacttgaaatgctaattatcagtggaatttgtctcctattcttaagtacttctgcaaggtattagatgctgctccttaccaaaaatcagtcttctagcaaataaaaataacttagagcattatttatttaaagaatttatgttttctataaaaccttataaccaagaaccttcaggatgcttgtaaccaagtactttcaggatgctttttgtatgtatatcacatagagtaggttggtttcctgagtaattgggattccaactagatagtcattggtgtgaccataataaaaacaaaagctaaaataaaagcatcagatttagactggcgctgtgccctctaccactatatgccaaaaattgcttctctagtgccattttgatattatatctagctataaataatacatgactattgttttctattgaatgtcaaagacttactgggtctttacacctctgtaaagtggaggttttggcaatgagctgtttaacttggccaagctaggctgtcaacccagacaactcagtcctttcatgtaaatttttgggcaagagaagtctgctttgactgccttgcctgaccaaattaaataaatagttgccagatctctacttttatcctgcatgggataatatatctgtaaatgcatgagtttggaaaccacccatcaaatatgaaaggctgatgagactgttaggattgataaacatttgttgtttgaacccagctatccaaactggggaagaaggggaaatggttgttaccaacaatctctagtagttattttaatctttattttaacctggattgcaaatgtatggggtatgaggagataatgaaagaaaagtggtcctcatgctggatatgtgactgttttgttctctgtaaagtgtattcttgggaagtgattggtttatatcagattcagaggagcccaattaactccagtgtaggtaatgtaaaacagtaagctcaaattgcagaagccggtatcctacagaaatttaagtagctactgcttctcctgaaagcccaagttgaaaatgggaccacaggggcacagggctactgaccctcacagggcatgccagcgttaacaccactttgagagaccaatggcaagaaatgctgtctcttgtgcattttactaatttccccattcttagggtagcagggtgggggtgtatagggtctttttgaagcagttttggataggtttgcaatatgtgggattcagcctttgatttcaatagagctgagagcttttagaacaagcaggcatttatttaatgtttccttagtccattggcaagctttatcaatagcttaatggcagaggataaaggctcaaacagatgatgttttttccacagaaaaacaaattgttgaatctattccgtgcatatttaaggattttgaattgattttgaaaatcatgaaacttgaactatttttctattccctttttttcttccccatttgctgccttttttgtttttgtgggggaagggttgggagtaagtttaaactcttccgaagattatgaatgggtcagcacaaatttttaggcaactgctttttccatgttctgagatctacgggctacaacaaattttatcagcagtgttttttgtttttttgagatggagacttgctctgtcgcccaggctggagcgcagtggcgcaatctcggctcactgcaacctccacctcctgggttcaagcaattcttgtgcctcagcctcccgagtagctgggattacaggcacccaccaccacgctcagctaatttttgtatttttagtagagatgggattttgtcatgttggctaggctagtctcgaattcctgacctcaagtgatccacccgccttggcctctcgaagtgctgggattacaggcgtgagccacccgcccggctatcagcactgttctgattgcagacgtttcacagcatgtttggcttttggtaaattcaatccaggaaagactagcatgtgcactttatctcataatcttccagtacatatgctctcagttgggatagcagttcatttccattaggcagacgtataaactaaggaatgttagtctgcagtattcattttaaaaatattgacatgcttttcccctcccctccatgaagtcagtgccagagtgagccagattgggaggttggggttttgtttggttggcttggttttcattaagggaaaaaacttgcattggacaatcaaattcccctgagtttcataatctcatcaatattttaagataggcgagcacacactaataatatctatgcctaccttcttgggtggactcaactgtaaccacagtttattagttgcttagaagtggatttttaaaaaacagttaaatgtgtgtgcataacacacaagtaatgacacactactattattattacctaagtagtgctcatcctctctttctgtgttttcttaggatgtgcactttaatttaggattgtaacgcctaataatatttctgtgagcctttaatgtgatttataagatggccgaattactgaaatcaccattatacctcttccataaaacgactccaaagttagacctgcctgttggggagaattctatagacagaaggtcaatgttgtccccatccataggggttgaattaccttgctgttaagtggtcttcccccattgggatcctacagtcccacagatgaaagcacagtagtagctgacagctggcttatttggtccctcggcatctctcgtatgtggcatattgcttttgccactttcctatccagcagacatcaaagcaaaactaaaaggtagatatctggaatgaatgtatatgttgtaattgaggcagatatttgccttaattggaaggatctaactgctttacaaatattaaacaagtgcttgggcatgattgggagaggaggcagcttagctggaagctgtgcccatcttactgtcactggagaataggatgtcagagctgggcaggactggtacccatcatttgcagtttgcatgtggggaaaccaaagccctaagaaacaacagttcctggcccaaaaaatccatagaaagaggtaactagtggcagatttggggcgccaacctgattttatggattttgagttagattctctaccctctatcaatactaaaaatagattaggagggtttttttttctgtttatcatgttgaatttcattgacttaattagtctttaaatttgaaaacatgttttagggagtttagttctagaaatttctcttagattgaagtgacagaatctgaaagaaaagaatatgattgagctatttgttttcctgaacacctcaccttttatgatgcaataagttactctgagtttcttggcagagtttttgacagctgttgctttcaatggattccattcctgtattccttatgggaggttgtttttaaaatagactactgcgattgaaatgaactcaatatgtagttaagttatagttttcttcaatgtatttttagttacttgggtcacaaatgttcaatttcagcatattttagggtgagtaatcaaaaatgtgaatttgcctttgatttcctaccactgtctgagctatcataaagcattctctttagttgtgatttgattctatagtctgtttctaaatgacatttgtctgtttcttaaatgatctcacagccatggtaataatagatgtgtactcagaagatcaataaggtaatattggaattcatgtgttttttgcaattaaggcaggcatttgccaatgtcttcttttaagcagtagttggaaacatctcaattacagtgtaacaccttagagctaaaaacatttgttcaacacaaactagaatcacaccttctcactagatatcaccaagggaatgtggttttaaaaataaaaagaaaacaatataacgtatcatggcaaccagagcttcccatattattgacaagtagggatcattaggttctggtttgaacattctgaatgtgaacaaaatgaaatagtagttaagaggtgttttcccactgtgtttaaagagaacactagtaattctggtttttctttctaactgctttactgtttcaagggtattcttttaaaactctgatttcaaaggatcagttgaatttatactttagttatgggtgttttgttactttttttttttttgtatcatgactcagtatggttcaatttcctagtaagaagtggggatttgtgtttttggagtcctcagctcacatgtcttgttcctccttcagcacaagctaggggagatcctaccaacactgataggtcagtcattgatggcaatttgaatgtgggtattactctgtgagccaccctgcttcgcttgtttgtaaggagaaatgcatctggttatgtgaatttcccgagagcagcagacatggagggccagactttaaaagcaacgcaagcagattcgaagagctgttgccctcttctaaaaaaggcttttggaggctgtgttacatgcatgccctaaagcagtcagtctgttagtatgagcaagacatctgaagtacacagttgcttttaggcttgtatagttattttctacacatgccaacacacatgatgataaaggaaccttttctaggaggcattgcagggtttcaatacacaggacatgttctagttacagaagccttgctctgctgtcaacaattgggaaatgctcattttttcatgttttgtgaatactctggtcttgctgtaagctaatgtcatggctgtgggatattagagaagtgggtttatgactctgaagaccagcagacaccagactttaaaagtgcttaaattggaatttggaaactacagtaaagaaaccttcagataccagttccatcctgaagccctctgttgaacaacagggccagatcctaaagctctttcagggagctcttctctggggctggaacagttgattatgcaaccccattgtgtggagattggatcaactgagttgtgttatttttgttttaagtcaccttgtgcgagaacctcaaccgcacctatcttgggaaccgggtatacccttttctttagcactgctatcctttttgtcttcagcacaaataagatgttcaagtgagccagaagcaagaagagccattttagtcttcatagctattggctaagagagataatgagctgatggtctattttaaccttgaaagtaaaaatgtatattttttcactacaagtacattgaacagtaaaaagtgtaacagcaaagtatatatttgatgccttctgtcttttcatgataatgtgctaacaagttgtgttaatattttactcagccagagtctcattcatttgctaagcattgggaacattatgtatattgaccttaaacataggtgtcctatatttggattgtgacttgtagactcaagctaaccttactgcctctttttcacacttgttgaaaggtctgtgaagaacatagttaaagatctccaactttggaaaatatacatgatgtgaaactggggtgctatgttaaaaataaatgtatgataactaagtgtgggttttatggagtcttggtgtcgatatattgtggtttgcatttgttctcatgtatttaatgaaaatgatgggaaaaggagttgggagtctttccaattaagtcaaagtctgagatttggttgcttttacctcctggtgatctgagacaggttcttaaatacctgcacacagtaaacacttggcagtcatgggatatcatggctgactcacagtgcattttaaagatctgctaaattgaaaacttggctcaatgtggggccaggttatttgctttatcttgtcagtgttcttttgttcaaaaatattcccatcatgatgtccttagctggagttggggtgatggggaaggatcagaaagagttggcttgaaatctcgaccaagtaatctggcaccctagttatagtttcttacctttaaaatttgaataatttggggaggcacctctcctattgggtgaggggttttattccatattgtgaatgcaaatggtgggctacagataggatatttccaatctagtagtcccaaaggacaaactaactctggaagaatcatctatcatttggcccataagcttggacactggagatcaccaggccctgaccattcctaagcattgatgtggatgactgggtcatttactttagaaataaaagggatctgagataatctatgcaagcggttctcaaagtgtggtccccagatcagcaatatcagcatcatcagggacttattagaaatgcaaattcttgccacccctgccctgcaccaactgaatcaggaaccctggtagtgggacccagcaatccctgtgttcataagccctctgggtgatgctgatgtacgctaaagctggaactactgactagccaatctcattttacagtcaaagaaactgtggtgcagaaaggcaaaactgactcatccagagtctcagctgattcagagcaaaggctaattgtgtttccagggcatagtttttgctgtgctacattttctatccatgagtttgttccttcccatgaccctccttccatcgatatttatttaatgtgttcctcctgtttaactgcactgtgttaggagctggagatgagactaacaagacacaactccttcccccaaggagcccacagtccagtgagacagagacctacaaatgcattgcagtgcagagtgggataggtgctatgttgtataagggtaggacaactgctgtaacaaagaaccctgggaattcaatgaatctcattcacctcaccatccagggtggatgcttacagttgtcctgttttccttgtggttgttcaggaacccagactccttacatgtgtggcaccgttgtaccctagggctggggagtttcctccctttagccaatggtttgataaaagagagatggtggagaagatacaattacctttcactgaagtaacacacatcacttttcttcatttgctggaattcaattatctgacaaaagttaaccacaagggagaccaggaaatgtagtctagctgtgagctccagaggaaaaagttttggtgaacacagtatgtaccagaagacgcaaggccaggttgctctgagaacacacaggaggggtatttaactcagattatgaggattcaggaaggcttcatggaatagtcttaaaagagggataggcatttactaggaagaagaggatattccaggcagagagagctgcatgtgctaaggtgggatatgataagaacatgatatattctggaactgcaaagaaattctcatgtggatgtaatagatggtgtcttaatttgttttctgttgcttataacagaatacccaaaactggataatttataaagaaacgaaatttgtttcttacagttatagaggctgagaagtccaaggtcgaggggccacatctggtgagggcattcttgctggtgggactctctgtagaatctcaaggtggcaggcgatatcacatggtgagggagctgagtatgctagctcaggtctctctgctgctgctgcttataaagccacgagtcccaatcccatgataacctgttaattcatgaatggattaattcattcatgagggcagccatcatgacctaattaactctcaaaggccccacccctcaacactgccactttggggattaagtttcaatgtgagttttgctggggacaaacattcaaattatagcagatggatgtggaatatggagcagagaaggacgcaaaggtagggcacaaggccaaatgggaaggccttgcatgagaaggcataaaccaccctgagattacagctcttttcaagatttaagaagtgcatgaagttgcttacttcatgagtagtcaaggaatgatttgtgttctcccaaatttttcctactccctagaaaggaaatgttttactggaagattgtaaactaatgttttaacgtggaccaaacctgctagtttaatttgttatatatcttctggcatgtgtttgggcaaaggaccaaagcccagaacacaagtgactaaaccctggtaagcaggagtcctagtgaatgatgtgagactttttccatcttcagctctttttgaaaggggagatgtcatgggccctgagatgactgagaggtgcaggactccctttttatcaagaagtctatcaaagggcagaaataaagagtgtggaaatgaagctgaaatatacaattccttttgaacaagagtgctctatgagtttattaaacacttttgaaaaattaccaagcctgcaggagaaaatgcttcaagtagagcatctccatggcaaactgtaacttcaaagaaccctgccgtatcgtttttcaaatgtgaagtgttctggaagtgtgaacaaaagtatttccagactctgagtggtgtttacctcattgcatttttctttcaaacatagagggaaaaggatctttatctttggatattaaattataacccagatatattttcctttatttgccctgaaatcctcttagcagatttggcagaaagaaggaattgacacagaaactgtaaaaatttcaagattcacctgtgaaaatcctctagcatcatcagcagaagacattatatatgtgtatatatatacacatatgtaatacatatatatatatatatgtattttaaaactcaacaatagccacagtaattgtttagaatgtagaccaacaaaatattttttaggaggatgagtattttatcattgacattgtttagacttaacgggttcatggtgatgataaaagccaactaacttatagtcaattttattgttttaacattttctacagagaatacaccccttattcttgtacctggggtggaccatttctatcctgggcatagcactacagaacagagtgagtgccttcatccctgtgttagagttaataaaaactacaaggctgaaggaaagccagggggaagaaagataatgcatagggaatggaatcaaggaaaccaaagtaaattaaatacagatacagagaattgtgttgcaggtcctttgaaattcaaatgaaattggcttgaacttcaacccatgtgtgctgggagcctgcatcccaatctttctggaagttctgagaggcagaggtaatggtggagggactgatgtttttatcctagtcacttgtggctctgatatgcttcctaggaattagtttgatagattgaccatctattttcccccaaaatatcatttacatgaggcatttgtgtgtatgtgtatggaggatggggtggaatggaaatggggcagaattcgtagactatttagagagatgagagcttttaaatagtttatatccagaaccaccacattgcacagctccaggggacattgttcatgttgtgtttttaaatttattttttaaaaaatttctgaccatggcaaggacatcaccttgtattttatatgataagaacaccccttggagtttgtgatgcaagttgtcctctttatggctccatgctgcatagtctactctctctcaaagtgttcttccttttgctttttatagatctattgttctgcttctgctggctgaaggaaggtgaggaggtgggaactttaggggtcctgtaaccatttctaacccagttattctacccccatatcagatctcttctacccttactgtttccattatgggtttaggccagttgttctcaactgagtgcaattctgcctctgcagtgtctggcaatgtctgcaacttggcaatgcctagagatagttttgcttgtcacaactgggggatgctactggcatctagtgggtggaggccaaggatgttgccaaatatcctacagtgcacaggacaatcccgcacaacaaagaatgatctggcccaaaatgtcaatagtgctaagattgagaaactgttacagaagagccctcagccttctctccctttctctcaattacccatagcaatttagccttcttaccattatcaggaataatccttcacatggtcaaaactatatcaacaggttctgctaaattagtccattaattcagatatcaccagggttcaggtggcaatataaattgagtaaagtgagtcaggagtaagatgagaagtgggcactggcccatctgcttcagtagtagggaacaatggggtaatggtggggactgtggcaaattggagactgcataccctgtgtataaaggcagccctaacttattgccatgcaggcacctgtgttgataaatgtcagattccttgagagagactcaatatctcgcctccctcatcccacagtaatccccttttgtgttattttttagttgagttgttacatacacacgtgcaccaaatttaagtgtgcagcacaatgaatcatcaagataatctggaagaacgaacttggatttagactaccaggttccaagacttacatagctacaagtaattaagacagtgta

SEQ ID NO: 709 - DNA, 2411 bp, Homo sapiens
actgcgcgccggcccagtggctgacctggtgtggccatcgcagctgcccgccgagacgctgcaccagatcacagaactgtgtggtgcaaagcgggttggttattttggtccaacacagttttacattgccctgaaattaattgctgcagcacaatctggcctcccggtacggatagagagtattaaatgtgaattgcctctgcctcgctttatgatgtcaaagaatgatggtgagatacgatttgggaacccagctgagctgcatggaactaaggttcagattccatatttaactacagaaaaaaattccttcaaaagaatggacgatgaggataaacagcaggaaacacagtctcccacgatgtcacccctcgcctcccctccttcttccccgcctcattaccagagggtgcccttgagccatggctacagcaaactgcggagcagcgcagaacagatgcatccagcaccttatgaagctaggcagccccttgtccagcccgagggatcctcatcagggggcccaggaaccaagccccttcggcatcaggcttcccttatccggttgacaggttctgtggccaagaacttcttcaccaaatcaaagctttccattccagaactctcctatatatgggagcttagtgatgctgactgtgatggagccctgaccctgcctgagttctgtgctgcgtttcatctcattgtggctcggaagaacggctacccattgcctgagggcctccctccaactctgcagccagaatacctgcaggcagcttttcctaagcccaaatgggactgtcaattatttgattcttattctgagtcactgccggcaaatcaacaacctcgtgacttgaatcggatggagaagacatctgttaaagacatggctgaccttcctgtccctaaccaggatgtaactagtgatgacaaacaagctttgaaaagtactatcaatgaagccttaccaaaggacgtgtctgaggatccagcaactcccaaggattccaacagtctcaaagcaagaccaagatccagatcttactctagcacctccatagaagaggccatgaaaaggggcgaggaccctcccaccccgccacctcggccacagaaaacccattccagagcctcctccttggatctgaataaagtcttccagcccagtgtgccagctaccaagtcaggattgttacccccaccacctgcgctccctccaagaccttgtccatcacagtctgaacaagtgtcggaggccgagttactcccacagctgagcagagccccatcccaggctgcagaaagtagtccagcaaagaaggatgtactgtattctcagccaccatcaaagcccattcgtaggaaattcagaccagaaaaccaagctacagaaaaccaagagccttccactgctgcaagtgggccagcttctgcggcaaccatgaaaccgcatccaacagtccaaaagcagtcttccaaacagaagaaggccattcaaactgctatccgcaaaaataaagaggcaaacgcagtgctggctcggctgaacagtgagctccagcagcagctcaaggaggttcatcaagaacgaattgcattggaaaaccaattggaacaacttcgtccggtcactgtgttgtgacccccccatggttcaagtgacagtgggtgaccttgtctgccaagatctttcttttgaatgttttgaacccaactacttgtcatagatgtttgactgtgtcaaaagctgtgagcagcaaaatataatccatatgaccttttctcttgcacttcacttgtatgttttactgtggtggaaaaaatacttcaactgattatcacacttgaaatgctaattatcagtggaatttgtctcctattcttaagtacttctgcaaggtattagatgctgctccttaccaaaaatcagtcttctagcaaataaaaataacttagagcattatttatttaaagaatttatgttttctataaaaccttataaccaagaaccttcaggatgcttgtaaccaagtactttcaggatgctttttgtatgtatatcacatagagtaggttggtttcctgagtaattgggattccaactagatagtcattggtgtgaccataataaaaacaaaagctaaaataaaagcatcagatttagactggcgctgtgccctctaccactatatgccaaaaattgcttctctagtgccattttgatattatatctagctataaataatacatgactattgttttctattgaatgtcaaagacttactgggtctttacacctctgtaaagtggaggttttggcaatgagctgtttaacttggccaagctaggctgtcaacccagacaactcagtcctttcatgtaaatttttgggcaagagaagtctg

SEQ ID NO: 710 - protein, 474 aa, Homo sapiens
MMSKNDGEIRFGNPAELHGTKVQIPYLTTEKNSFKRMDDEDKQQETQSPTMSPLDPSSPPHYQRVPLSHGYSKLRSSAEQMHPAPYEARQPLVQPEGSSSGGPGTKPLRHQASLIRLTGSVAKNFFTKSKLSIPELSYIWELSDADCDGALTLPEFCAAFHLIVARKNGYPLPEGLPPTLQPEYLQAAFPKPKWDCQLFDSYSESLPANQQPRDLNRMEKTSVKDMADLPVPNQDVTSDDKQALKSTINEALPKDVSEDPATPKDSNSLKARPRSRSYSSTSIEEAMKRGEDPPTPPPRPQKTHSRASSLDLNKVFQPSVPATKSGLLPPPPALPPRPCPSQSEQVSEAELLPQLSRAPSQAAESSPAKKDVKQPPSKPIRRKFRPENQATENQEPSTAASGPASAATMKPHPTVQKQSSKQKKAIQTAIRKNKEANAVLARLNSELQQQLKEVHQERIALENQLEQLRPVTVL

SEQ ID NO: 711 - DNA, 2407 bp, Homo sapiens
actgcgcgccggcccagtggctgacctggtgtggccatcgcagctgcccgccgagacgctgcaccagatcacagaactgtgtggtgcaaagcgggttggttattttggtccaacacagttttacattgccctgaaattaattgctgcagcacaatctggcctcccggtacggatagagagtattaaatgtgaattgcctctgcctcgctttatgatgtcaaagaatgatggtgagatacgatttgggaacccagctgagctgcatggaactaaggttcagattccatatttaactacagaaaaaaattccttcaaaagaatggacgatgaggataaacagcaggaaacacagtctcccacgatgtcacccctcgcctcccctccttcttccccgcctcattaccagagggtgcccttgagccatggctacagcaaactgcggagcagcgcagaacagatgcatccagcaccttatgaagctaggcagccccttgtccagcccgagggatcctcatcagggggcccaggaaccaagccccttcggcatcaggcttcccttatccggcaggttctgtggccaagaacttcttcaccaaatcaaagctttccattccagaactctcctatatatgggagcttagtgatgctgactgtgatggagccctgaccctgcctgagttctgtgctgcgtttcatctcattgtggctcggaagaacggctacccattgcctgagggcctccctccaactctgcagccagaatacctgcaggcagcttttcctaagcccaaatgggactgtcaattatttgattcttattctgagtcactgccggcaaatcaacaacctcgtgacttgaatcggatggagaagacatctgttaaagacatggctgaccttcctgtccctaaccaggatgtaactagtgatgacaaacaagctttgaaaagtactatcaatgaagccttaccaaaggacgtgtctgaggatccagcaactcccaaggattccaacagtctcaaagcaagaccaagatccagatcttactctagcacctccatagaagaggccatgaaaaggggcgaggaccctcccaccccgccacctcggccacagaaaacccattccagagcctcctccttggatctgaataaagtcttccagcccagtgtgccagctaccaagtcaggattgttacccccaccacctgcgctccctccaagaccttgtccatcacagtctgaacaagtgtcggaggccgagttactcccacagctgagcagagccccatcccaggctgcagaaagtagtccagcaaagaaggatgtactgtattctcagccaccatcaaagcccattcgtaggaaattcagaccagaaaaccaagctacagaaaaccaagagccttccactgctgcaagtgggccagcttctgcggcaaccatgaaaccgcatccaacagtccaaaagcagtcttccaaacagaagaaggccattcaaactgctatccgcaaaaataaagaggcaaacgcagtgctggctcggctgaacagtgagctccagcagcagctcaaggaggttcatcaagaacgaattgcattggaaaaccaattggaacaacttcgtccggtcactgtgttgtgacccccccatggttcaagtgacagtgggtgaccttgtctgccaagatctttcttttgaatgttttgaacccaactacttgtcatagatgtttgactgtgtcaaaagctgtgagcagcaaaatataatccatatgaccttttctcttgcacttcacttgtatgttttactgtggtggaaaaaatacttcaactgattatcacacttgaaatgctaattatcagtggaatttgtctcctattcttaagtacttctgcaaggtattagatgctgctccttaccaaaaatcagtcttctagcaaataaaaataacttagagcattatttatttaaagaatttatgttttctataaaaccttataaccaagaaccttcaggatgcttgtaaccaagtactttcaggatgctttttgtatgtatatcacatagagtaggttggtttcctgagtaattgggattccaactagatagtcattggtgtgaccataataaaaacaaaagctaaaataaaagcatcagatttagactggcgctgtgccctctaccactatatgccaaaaattgcttctctagtgccattttgatattatatctagctataaataatacatgactattgttttctattgaatgtcaaagacttactgggtctttacacctctgtaaagtggaggttttggcaatgagctgtttaacttggccaagctaggctgtcaacccagacaactcagtcctttcatgtaaatttttgggcaagagaagtctg

SEQ ID NO: 712 - protein, 257 aa, Homo sapiens
MEKTSVKDMADLPVPNQDVTSDDKQALKSTINEALPKDVSEDPATPKDSNSLKARPRSRSYSSTSIEEAMKRGEDPPTPPPRPQKTHSRASSLDLNKVFQPSVPATKSGLLPPPPALPPRPCPSQSEQVSEAELLPQLSRAPSQAAESSPAKKDVKQPPSKPIRRKFRPENQATENQEPSTAASGPASAATMKPHPTVQKQSSKQKKAIQTAIRKNKEANAVLARLNSELQQQLKEVHQERIALENQLEQLRPVTVL

SEQ ID NO: 713 - DNA, 26695 bp, Mus musculus
cggactgtgaactcgtcccgttctgcctatgcctgcttcctttttgccccactcttcttccagcagtaccaggcggcttcccctggtcaggacctgctgcgctgtaagatcctgatgaaggtaagggccacctgaagcagctccacagctgtgcctctgtgccaggtactcagtaaatgatgagtttgactagggagttagtctcatatgggagctattccatgcaacatgcagtgaggtaaagatgtttagaccgtagagggctatctaagatctgtggagagggtggtgacattggtcaagaaaaggttagtggcccttcccagcaaagagaccagcatgggcaaggcagcatgggagtgtgcagacaccacagctttgtggggccagtgatggggccagggcctacatgggatgtagagctgggccgtggaagcagtgtgccagactgatgtcctaccctgcccaggccttcctgtccgtcttccgctctctggcaattgtggagaagtctgtggagaagtgctgtatctccctcagtggcagccacagccacctggtggtccagctccactgcaagtatggtgagcaagcggcctgcccaaagagttcctctgtgggtgtggaggcagtggcagtggaggttgccaagccctgagaccatttcccttatccaggggtcaagaagacacacaacctctccttccaggactgtgagtccctgcaggctgtcttcgacccagcctcatgccctcacttattgcgcaccccagcacggtaagcacccctgcttcaaacttcgcctgagtctctcctacctttagggctttaatgtcattctaggaatgctccattttcagcaggcctggctagcctatgcctgtcatcgtagcagttcttagattgaggtgggaggatcagaagtttctaggaaacttcactgggaaggccattgagtttctaggtagcctaagcagtgagactctttctcaaaaaaagggtgcatgtgctggcgagataactcagtaaaatggttgacgtgcaagcctgaaggcctggttttgagtcccacttatataaaaatgtgtattaattgggtggtggtggtggtggatgcctttagtcccagcacttaggaggcagaggcaggcagatctctgtgaggccagcctggtcaacagagcaagttccaggacaggcagggctacagagagaaaccctgtctttaaaaaaaaaaagtgtgtgtgttggggggggggcacaaaaccaaacccccagatggacagccctgagacgcagcatcactgagcacatcttccggcttctgcccgtgcatgttcacagttcacacaaaacacaaaagcacctttgtctttgggggcaggagggacggggactcagggtttctatgtcgaggccacacaactcagtacatatttggacccttaccttgctcttcaaaagcaggagctgctgcctctctgtcattcccactgactgtggggtcctgccatctgtatcccagaggcctgctccaactgcttttctagagagcctatgacctgcctgcagctctcttgtatgacctggaaaaccctgaaggcctgtcctggaccctgtgttatagagttcaaagcactctgacctctcattcttctggtagtattcccccttctggtggcttcttcctaattgccagggctctagactttgggccaaaagaacctgggcaaggaggctggagtctaggagggctgctgcacagcccaccagtcagtatcaagacacagcgtggcaaggggaatgtgcttccagcagagactaaggtcactcaagataagcccaggatgcagtggactctcccctgcctgtgcgggacactgtttgcatccaagtagcccaaggtcccattcatttctcagaataaaagtcccttcagttcccaaagttagcttccccaggcagggtctgttaatagtggtaagagttcctttttggaggggctattcctttttttcccccataaatactggcaatagaatccaggaccctgtatttgctaggtactctgtatctctgagctaaattcccagccctaactgcttctctttctcacatacggtttcaaatatagaagtcagtacgatagctcagcagttaaggccgttgctttaagcctgcccagttgagttgtcaggttttaaatcctcagaacctacgtggtagaatggacccagtgggctgttgtcagtctccacatgtgcaccaaggcatcgcaaccgcacttctctccacagcacacacacccacacaaaataatttttaaaaattcaaatatagatgccagctgcccccaccccccaccccatgctagggagagaacccaaagactgtgatcttgaggcaaagctaggagttacttttctgtaaatgttcagcaacatatatccttagaggtggaagccaagacttggcttggtggtccacacctttaatcccagatcttgggaagaaaaggtaggcagatctctgagttcaaggccagtcctagatagaccctgtctcaaaaaacaaccaaaactctgccgtccatttctgtgtgtggtgcggggtattgctgttttacacagggtgttgttaagcccctgggctcagcagctggcttgggtgtggtagtgcacactggtgatcccagctctttaagagtttaagagtcggattgaagagatggctcaggagttcaattcccagcaaccacaaccatctgtaatgggacctgatgccctctttgggtgtgtttgaagacagttacattgtactcatataaataaaataattttcttaaagttaagtttgaagtcagctagggctacatataaagaacaacccccaccccatcccacaaaaagtagctggaaccaacagcagtgtccccctatagccaaccttcctcccccactgctgtgctcagctagtgctgccctttgtccccagcctgtccagtgttgcctgctcctctctgctgtgtctgggcttccattgccttaagcttttgaccaggcaagtaacatgtaagagtggacaaagcgccaggcgtggtggcacacgcctttaatcccagcactcgggaggcagaggcaggcggacttcttagttcgaggccagcctggtctacagagtgagtgccaagacggccagggctacacagagaaaccctgtctcgaaaagagtagacaaagcatttcatgcgcatctgtccttgtcacagggttctggcagaggctgttctgtcctttccccttgcattgactgaggtgacactgggcattggccgtggccggcgggtcatcctgcgcagctaccaggaagaggaggcaggtgagggagttagacctgtcccaggagggaacaagagctaggagtgaagccaggaccttaactcctcttgtgcctgccacatagacagcaccagcaaagccatggtgactgagaccagcattggggatgaggacttccagcagctgcatgccccagaagggatagctgtcaccttctgcctcaaggaatttcgggtgagtttactatggctagcacctggtctttgaaccaaacacaggctctcactacctgcttcttccatcccaggggctcctgagctttgcagagtcagcgaatttgcctcttactatccacttcgatgttccaggcaggtaattccaggcttttagactggggagaggcagggctctgggatgcccagagcaggataacctagcttaacccctttctgtcacccaggccagtcatctttactattgaggattccttgctggatgcccactttgtcttggccacactcttagagcaagactcatgttcccagggcccgtgttccccaaaaccccaccagccagtgcctcagaagcaggcacacaggtaagtgtctcacttcctcgcattccctctatttctacacactcaggttgagcttgctacttgtagcttctgcacctcccccatacatgcttcctgtcaggcccagcctcaacagggcttccagccttaatggtcagctgtactgagacccctcccatccatagaggcatcccctaggtcctgctggcttccttctctggctgaggcctcccctctgagcctctttccagactcggagagaaagggctgctgggaggcagggagctgcctggtgcaggagaagcaggtggctgcgagggcaggtgggttgggaggctgggctcgtgtagtagaaacagaggaagtttggtctggctctcggcccagcacatccctgggctcttgtgctctccagctcctgtcccttgggaaggtgaggggttgggccccacgtggccctgttcacaggacttgttgctttcctcccccagctgagctaaattggccccaggatcctccctcaggcccctacctgaactctgatcaaaagggttccagttccaccccctccaggaagctcccacttaacccctgcatcctatcctcccagccaaatcaggaagtaataaaatcaaaagctagctcaccagcagtctggagacctcaagccctcctcagagccctccaaagtggggtttgcctctgtatcccttttttctctgtaccatgttgatattatctctgcctacagcacaccccacttagatgactttaccagtgatgacattgactgttacatgattgccatggaaaccactggaggcaatgagggctccggggcacagccttccacatccctcccacctgtctccctggcctcccatgaccttgcccccacctcagaggaggaagctgagcccagtacagtgcctgggactcccccacccaagaaggtaaaagctggatgttgggataggaactgagggagggagggaaggaaggaaggaagcagcttccaagactaactgggctctctctattctctttccagtttcgttcactgttctttggctccatcctggcccctgtacactccccgcagggtcccaaccctgtgctggctgaagacagtgatggtgaagggtgaatttgagaaattaaagtctgtgttcaaaggctcacggaccagaagcaggcccgcccactgagttgggcgtcagtccttagacatggacatggaaatggaaaaaggcataccccacttggctgtctgctgcagagctgcctaggaaccatgtttggtctgtgttctgtatttattcagcctataccaatcatgtctctggtgcccacctgtcacctgacagatccctcatcctttactttgaggctctagaatacaaattctggccaaagccagaaacttagcttcctcagtctcctgcctctaaaacaggaagatcagtattgaacaccctctgccaatcatgaactccccgccagaccctcctgtgggccaaaggaactgtttctctttcctaacacttgggccttggcctagaatcctaatagcctctggacctgattgtgtgtcactggtgttgccctggctgggcccatgttcagccactcagtctgccctcccaggtggctttgtaccaaagaactgctggcccactgtctgggacgggacaagagagacagaggctatggtgagaatccagctttgacctttattcaagagaccagatgggttgccccaggatctggctgccagccatgcaaggctggagacccacaatctggtctgccattgccctgagctgcagccttggccccaggattccacttgcagccaccacaggtgctggtgggagggagccctgggagattagatgctgctattgattctttaaaaaataaaggaaagacacttaacgctgtgtgttccccgtgacgggtgggcctgagaggccagtgtgacccatggcagcatgatttctgtacaaacgatctggggcagaagggcagcacatggaggctatttcttggctttggcagaattgcggggtggagtgatgggccggcctccggggttcaggccgctgaactgcccatacttgcccttattcttatcagcgggcttgaggatctggaagagaaaacactcatcagggtcctggggttgagccaggcgtctattgggcagcctcttccccacacccacctggaaggaacacatgagggtctcatccacactcatcatggcaccagcattgtcaaactctccacagtagttgggagctgagaagagtgtcaccaactgtctcttggcaaagaactcatagccatcttctacaacctgggccagggcaggaacggtttagtctgtaagttaggcaccccacccccacccccagcccgccccaggccaccagcccacctgatgtgctctgcagatgaggtccaaatcatgcttgtgcaggaacttggctaccacctcagccccaaaggtaaaggagacaccacggtcattctcgccccagccttgaacatccttgtcagggtcagaccacaggagatcacacagtaggccctggtcaggcacgtctgtgggccgcataatacgcctaatctgctccatggattgcaagtctggagacaggcctgggggtggtggagtgggaatagtgttccttaaaccaagtgctgtcctgtgcccagctctgggggtgggacagctccactgttcccaccgctaatctgggctccttaagttcagggagacagaatccattacttccccactggccccatttctctgtggccttggctgtcctggaactcactttatatgacaccaccacttagaagtacagatagcagacctcgggggtgggggggcagaaggagattaatgagttgactacaggatgcctcatgccacaacaggaaagagtgcaaccaaactggtgggtggagcatgcctttaatcccatcacttgggagtcagagataggcaggagctctagtgagttcaaggccaaccaggtctacaaagtgagttccaggactgtcagggttttacccagaaagccagtctcaaaaacaaacgggggtgtggtaatctcccctaataagcgatatccaagatgagattcaaggagcgctattccagggaactgagaagagttctgttaactttacaaggcccctaaggatgtggcccaagaacccaagcacagacccacaaccactctcacccccgtggcagcagaagatcttctcatccacaatggctgcaatgggcaggcagttgaagcagtcagtgaacgtcttccacagtttgatgttgtatcttctcttgcctgcgcaaaaggaagcggctcatagggaagactacacccccaacccccaaccccagtctaggtttctgtgcacccatccagggacaaagctgagaaaaaaagaccgaaaagcaaagaaagcttacattcttctctttgctctaccctcatctaccttccagaattccaacacctgaactcgtctggcccaaccatgatggtggtacccactctggtcccatggatgaggccaaaccaggagtgggtctgttttattcatacaggcatcctaaatgtttactaaggaatgtactagaagggggtgtcatcaggcagggctgtggctttagcaaatgggcagccctgcatgtacatccattcaccaggcccctcctgagcgccaaggacgacagacgtgttgctggggccctacagggctcatcattgggggtcttttggcactagaccaatgtagggggcccatgaagagcagggaatgtagttctgggcagacagcaacattcaaagcacttacattcatcatagaagccataaatgcggttgatgctggcacactcatggttcccacgaagtagaaagaaattctccgggtatctgatcttataggccagcaacaggcagatggtctccaaagactgcttgccccgatctacataatcccccaagaagaggtagttgctctctggagggaagccaccatactcaaacagccgtagaaggtcatagtactggccatggatgtcacctgggaaccagagaaaactaggtaggtgcaagatgtaaacttgaccccagggccagcaataggttaaagggtggaggaacacggttaatggggcacgagtaggggctattttcaggaagcaaaagggttctgtgcaaggatttaccacagatcttgaggggcgcctcaagctccagaagaatgggctggctcaggaaaatctcccgggatttgaggcacagaccacggatctcgttctctgtcagctgcacgttcttcccaggccgtgagccctgcactgagtacggaatagggtcttgggaccctgacctcgcagaccggacgagggtaggtgtcgcgcccccctaacaggggcaactgttgcaagtgagcccccaccccctcaccccgaaacctttgcgtcaggccttcaaaggcaagatccgaccccttagccacccggagggcctccagagaaacgcctgtgctcagcagcctgtcagccgaagcttcctcgcttcgggatcccttcccagctagcttcgcaggagcctcaccctgagtcccgggcactcgtgcacccccggcctctgagcgcgctccaaagcccaggcgcccgcggggggggggggtgccgtggccatggatcctcacggcctgtccccgcccaagcgacgctagcccccgggagcggcgggccgcccgcgcgccacttccagacggcgaggggcccgggctcggcgcgagcgcaccttccctacccctgcccaccttccagcaggcgcccgatgatggagtccaggttgagcttctcgctgtcggacatggcggcgccgccgctccggcccaccagctccgggccctctcctgcctcccgccctcttacagcctccttccggcctggctctccttccgccctccccagcccgcccccggcccgccgcccctcctcttcggtcgaccgccccgccccgccctgccgcgtccgtagttccccgctctctagcgcctcccctggacgggaagctccgcagcccgagagggcctcgggcgagcgggcggggctggcaggggtggtgagccggggttcggtagggcggggttaggtcggctccaccctggaggaatcgccctgccgcgttcagatgagttagggccggaagtactgtaggaattgtttttctctttccaagtctctcccaccccagccctgcgtgggactgtggtatgagcatgttaatcgctgacttctcaaacactaaataaattcctcgaagtgcagaaaaagaaactaaggcttaatgatactgagagtgggctccagacctccggagcctcacattcacctccatctttatggccagacccatgaacacctgctactgaactctaagcagtgttttggtccaggttgccttggtgcctgctacgtccattttttttccataagtgatgtaatacgttgtatctcgttcatgttgtaagtcctttgtagagtacttggacttgtctagcatgtgcaaggcctgaggttccagctccggctctggaaggaacattaaagtaggcttggtgtcgtaaacctataattccagtgcctgaaattcctgcactcaggagtctggacacaggaggatcagaagttcagggtcatctcctgtctgggctacataagaccctgttctcacactaccccttcactctcaaaacaaaacaaaacaaaaaacccggggcagggggttggaggggtgggatgacattaaaggataattattattggaaccataaattggttttacttggtaaaactgaaggtggcctgtcatcttcaatttgggccagccagggaatcaatacacccagcatcctctggatgggaggaggtcgtggctctggcactagggcaagcaggaagaacctcacagaggaaggggggagtccccccaccagggaggggcccccagcaagctgctgagctgagactgaggaggaagtgagaagaagaggtgaggtgcagcaaggaggtgagccgggctgctggggtaggggccaggcttggggctggggctctgcacagagacttggtctcagggtctacccgactccccagcaaaagagggggcttagtcccctgtgactgaggactggtggctggaatccccagcctgagtctggctgttcacactggctctctgtatgtcttgcagcctgtgacactggggtccagggcagaatggcccaggccctgggagaggacttgttatcagaactacaggatgattctagctccctagggtctgactcagagctgagtgggcccagtccatatcgccaggctgaccgttatggcttcattgggggcaactcaggtgaactgaggtgagtgaggcatgggtaggggagagagtagggtccagagactgaggacactagcccaaaactcagctgctggtgtcactgctcggttccgcgtggtggggtgggggtgggggtggggtgtgctttatctctttatcctctgacgatctgtaccttcccctaaagctgaacatcctttcccttttaacctctggtccaagaaccccagatggaaatttggatgtcttctcttctccaggtttcccttacacagttaatcacagacagaaacttgacacatcgcacagcagatcagaaaaagaagcagattcagactcaggacttcaggcttccagtccagggcactatccacccagcttcccctatgagttagctctgtctctgttttaggggacagccaaatagacctaccctaaatacctcctcatcccattagtctttccagcttctatccctttattcctgtttgtttgtttgtttgtttgtttgtttgtttcaagacagggtttctctgtatagccctggctgtcctggaactcactctgtagaccaggctggcctcgaactcagaaatctgcctgcctctgcctcccgagtgctgggattaaagtgctccaccacgcctggccagtttctatccctattgaaacccaaatccccttcctttacctttgatactgtgtctgttgtgtgcctccaggctttgtcaaccctctgcagacctcatccgccagcgagagatgaaatgggtggaaatgaccttacactgggagaagaccatgtcccgacgatacaagaaggtaaggaaaaagaggtgtacatacactggttcccaaagttctcaatccccctgcttctgcttcccaagtggactcttgaccaaagaaaagctgtgcttagagctgggcaatggtggcgcacacctttaatcctaacacttgggaggcagaggcaggcggatttctgagttaaaggccagcctggtctacagagtgagttccaggacagccagggctataaagagaaaccctgtatccaaaaaccaaaaaaagaaaggaaggaaggaaaagaccgaaagaaagaagcaagcaagctgtgcctgagagcaagagagcagaagaaaccctaatgcatctgacctcacccacaggtaaagatccagtgccgcaagggcatcccctcagccctgcgtgcccggtgttggcccctcctgtgtggggcccggatgtgtcagaagaacaaccctggcacctaccaggtaagaaagttggcaggatctttactaccccttctcagagctccctgccacctgaccctccatatctcccttcctcccaccaacaggagctggcagcagcccccggggacccgcagtggatggagaccattggcagagacttgcaccgtcagtttcctctgcatgagatgtttgtgtcaccccagggacacgggtacgaggccagggatacccacgctcctcatgctagattctttagttctacttttacatccttggacgagggagactctggcctgggcagaggccacagagggcaggcagggggatgcctgggaggctagccttaatgagctcttttggcacaggcagcaggggctgctgcaggttctcaaggcctacaccctgtaccggccagagcagggatactgccaggctcagggacctgtagctgctgtgctgctcatgcatctacccccagaggtgagtgaccttgaccctgctctgagaccctcaacccctagtgatctgagacacccccccccaaccccaggtactggacctcagaaatatgtgttcctttacttcaggcactgttctttgtccaaagcctcatgtccaccaatctcagtaaccattaagtctgttattctttttttttttttttaaatctgttatgcttgatcttgacttttaccgcagtgatctaggagtctggaacattttccctttaacattttgcatgttgaccctgaactctgtactaaggccaggcttgccaggagcacccctcgcattggctttccctatcttctcatttgtggcactggggatctggagcgttacggccttggccctgggtgggcgtggggggaacctaaatgaccttaggattctgggttataaactctgaaagcctcccaacttttgccttgtggccctcaaataaagaaccccaggccctgggatttccaacttctcacctccaggatagggcaggctctgagcagggtggaagtggcatgaatgcaggcccctgtgcctgtccccatccctcctcccactctgtggacaattccttaatgagtactcacaggcctgtgccctgccctcaggaggccttctggtgcttggtgcagatctgcgaggtctacctccctggctactatgggccccacatggtgagaggctgggtcgggaggtggaagatggacagtgggggatctgaagcttggggtctgggagtggaggtctgcagcatgggctagccagactgataaggagcctggctgtaggaggccgtacagctggatgctgaagtgttcatggcccttctgaggcggcagctcccacgagtgtacaagcacctgcagcaggtaggcgtcggccccctgctctacctgcctgagtggttcctgtgcctcttcactcggtcgctgcccttccccacagtactgcgcatctgggatgccttcctcagtgagggtaagtgtggctgaggggctagctcacgtttctgaatctgcagagcttgttgttcccactatcagcccttttgggaccttctgtcacgtggacctgagtgtgtctgtggagaaaacagaccatctcatgggcacagtctcagagtgatgaatgagggcctctacgttgtcacaaacagcaccgtgggaggctgagagcaaggataggaaagtccctgatgggtttggggtctgtgtgcaggaactgggttggtcaaagcacatattgtggaatgtgagcggctcggggcatgcaaggtttaggcatggtccctagccataggaggttctcctcctcagggccttgtgctcctgactcttcctaaggagtctgccccacgaagctgcctctgacagctagcttgtgaaactttcattggtgggggtggggctaggaggtgacagtacctaaattaagaagatatttatagaatgtcatgagtgccatgaagaaaataaatcaagggatgtgacagagtgtcaggagagcagcaggaggtggttgctgtttttaaagaagtcctggctgctctatggaggaggtaaactagaaggcaagcaggtggagggtagaggccaggaagaccaggccacagccagctcggtgactcttgggaggaaggacatggaaggtaaagggtaggaaaggggtgggggggtgctgagagtggaaggagcatcagagcagagccaagttggactctggatcttcagggctcagcttcatgctgcccacatgtctagagatcgttcctacagtcaggttcaagtttgggctggtaatgtgctagctcagttggtagaatgcttgcaataaacaccaataagtcctgggtccaatctccagcagtacatcaaattggtcatgggggcccatgcctgcaatcacagcacttgggagacagtagcaagagagcagaagtttatgatcctccttggccacacagtgaatttgaggccaacctgggctacatgagatctgtctccagaacttaaaaaataagcaagaaaatcatgtaccaagtatccaaagcatgtgtgtcacctccccctctagcctcaaaccccaagagggagggctgatcatggtggtccatctgatccctgtcctctgtacctggggacaagcactgcacaggctctctttaatgatgacattgtcagtggcaattgttcctttataagttacagttgtcactaggtctccctggcatggtagctgctcttatcagtttagaggatgccagaaagggattgtgaagtcctaggattggcaagggttagtgtgtgcatgtgtctctgtgtctctgtgtgtttgtgtctgtctgcctgtgtatacatgagtgccatgtttttgctgtaggaagaaaagttctgcatagaacctttctagaatcagaaggtggcggattcaagatggaaagtacttaataggcactgacccatgtactcctcaaagaaacaggatgctgaggtcagagaaggcttggcataagattgttagcagcccctggctcctggttagctacccttcttagaagtgtctgccgtcctgagacaggcttggctccttcagtgtcctgtgctctcaaattgtagtattccttctaagcatcataattcatacttaaaattccagtgcaaaggctgagacaggaggattgctgtgagttcaaggaaaggctgggtcacatagttccaggccatcatggcctgcagggtgagccactatctcaagaaaactaaaagccaggtgtgtgagctggtgaggtgactccgtgggcaagggtgcttacccccaagcctgatgacttgagtttgatctccaggtctcacatggtagaagaaaagaattgaatcctacaagagattttgtgaccttcacacgtgatttggcaggcacgtagcacacacacacacacacacacacacacacacacacacacacacactctaaatagccaggatgggtggtcccacctgtaatcccagtactcaggaggcagaggctggagaattgctgcaagttcaaggccaatctgcactacatgagaattccaaggcagcctgagctacaaagtaagactatctcaaaacaaaacaaacaccaagccacttgtgatgtcacacgcctgctatccagctctctagtggaagagaaaggaggctccgcaggtcaaggtcattctcagctatgtaggcagatggaggtctgtttacatgagaccctgtctcaaaaaataagcaggttacagtcgttggccatttttccatgcctgcgttgggtgaagcgagctgcaatgaggtagaaggagcgtggctgagggctgattcagctgaataactgaggggggaggggctcaggctggtttcctgtgagctactcccttccctgcaggggctaaggtactgttccgcgtggggctgacactgatgcgcctggcactgggcactgtagaacagcgcacagcatgcccagggctcctggagacattgggggccctacgagccattccccctacccagctgcaggaagaggtcttcatgtcccaggtgggtatctctcttagcaatcctcaatggccttggccatgctgcatagctcggaagactaagcctgggtgagagtaagatgtagttcctgtgttctgagctacagaaaatgtgagaaccccaggcctcaactgtcttcctttaggtctccgcaaagctgtgtctcagccctcagccacttcctggggttgtgtactgcctgccccatggggacctcaaggcttcctacttcctgacaccccagtccaggcaaagttagcatcaactgttccccacaggtgcacagtgtaaccctgtctgagcgagtcctgcaacaggaaatcaggatccagctagcccagctttcgaagtcactccctgggccagcccctctgccacaggcccgccttcctggggcccaagccatcttcgagtcccagcagctggcaggggttcgagaaagcaccaaacctgagatacctcgaattgtggtgcagcctccagaggagcccaagccaccacggcgcaagccacagacccggggtaagactttccatggactcctgataagggccaggggaccccctattgagggcccctccaggtcccaacgaggctctgcctctttcctggacacccgattctaagtgcaccatacacttagtgccaccatatctcaatcatctgagcagtgatgccagccccaggcatgtatcctctattgctgtgctatgtgacaatgctgtttccagcaaggaccaccgtgaggagtggagtgtctcctcactttaaggactgtatcaggcacaaagataaagaaggatgctgagtggagcttgtggggagctgtttggtgcttgccattgccagcatcaaagccagcactgaaggattgtgggaataaagcctctggctgagatatggtaccccatgggcttcttgcaagggaatcctcaaataaagcctgactgagaagatactagataaagttggatcaaatattcctccactctccaccctggccttattgctgtgttctctcctgcctgcatccaccctttctgtccttgtcccacatgggacacaccaaggctgcccattggttactgtgtaaggtgtttacagggaaagggagcccgcccgcaataagccagcttgcgccagcctctagggtacaggtcagacttctctaccttccagaggaaggctccccagtgacagctgagtcccagagaggcacttcaacctcccatagcctcccctagatggctcagggctcccatcggtgggggactttaaaccatgttggcctccctaaccatgttcctgctcccatctgtcaaagagagccagagaagaacaaaggcctagtgtgctcaggacaaaggagaaaggtcctgctggcccttgttcttccctaggtccttgggaccgccaccatagaaaccctctcccacactcactaattgctcctgtgggtgcctagggtgcctgggatatgagccattgtcaaggcaacagggctagatcagatgctagcttgtctctacagagttgagtcctagttgctctggctctctgactccctgggtagcttcccagcgcctgaaggtgggagcaaggcaagagctgggaaggagtatttggaggcccttctttccatgggaaccatgcagtggtggaggcaacagaagtggactgagcagagcaaaggtgaagagggagatgctccactggaggagaaaggggcagtgctgagccagagagagaccagcatttccactcctgtgcctaaggaaggaaggaaggaaggaaggggcacatgttacaatgttctgagacaatgggctaagacctgctagtcttcatggctcaccagcatgtctttttaatttttaattttttaatatgatttctccccgtgtaattttttttattttttaatacaatttttaatatgtgtaagatacggatcagaggccagtgtatccttgaaggtgtgattacactaccctgctcaggacaagtccctggtatcagttccttgtgatacaatgttgcagaaagagctgtggtgcaaaggtatgctggtgtgccagcatacacacttagccataatagatgtggcgcctcggtaggaaagtcctatcagtgctgggactttggcatggtcccctattaaaatctggatctggaatgttctagtcacagggctatagaaatgccttctgtgagccgagccagggcatacacacctgtaatccaagcttctaagaactgggagtaggaggaccaagggtttgtcaagagcttgcttcggaggaaaacttatagaccagactgtactttccctagggaaatggagacttagaagcagaaagaacttggccaaatccttactaccatggcagaccaaaggcttaccctgacctcgacttttggcatcccataatccctgaccccaacaaccctggacatccactttggcctactctcctggaggactcctatgttaaatacttagaaaagccaggctgcagctacactggagactgagtcaggagagacacaagttcaagatttgcctggcctattaagttcaaggccagcctgggtcacttagggatactgtgtctcaaaacaagaaagaaaacagggctggggatgtagcttagtggaggagtgtttgtctggcttgtgtgaggccttggattccatcccctctacataagggacagaaaaaagacatgtggagcctccctcccttcatcgtctgcactcactgaggtactgcagcttaataatcttttcatttggggttcataacgctgttcctcagactccctgcccagtgcctgcccaggtcctgacagtcttacttgagaaaagttgcctgggaggctaagcatgcagcccaagaccacagtgggaggcagaggccgctaggattgccaggacataacctcagaggctctagtcagcgcccaagccctggcaggcaaaagtggggatcttgctgggcagtggtggtgcacacttttaatgtcagcacgcgggaggcagaggcaggtaaatctctacaagttccaggaaagctagggccacacagaaatcctgtctcaaacaaacatggggctctcaggcatgcaattggtaggggaggccacgcccatgctgctttccctctaggggatgggacaccctttgtctctgcagcagtgcttcactaggtgctttccagcaggaccctatctggggcagagtcactgtcagtcctcctctgggaagtattctctcagcagctcttgagcaggtcctgttgccagccatctccatggcaacgctgagacgtcagagaagagaaataggttcctccttgtgcaagcacagttgttttggtttgttatagtttctgtctataaagcccaggctggcctggagttcactatgtaaaccaggatacactcaaactggtagtgatctacctgcctctaccttccaagtactgggattacaagtatgcctcgtatatgtgaatggctggttttgtttgtttgtttgtttgtttgtttttgtttagaaacagggtctcactatgtagactaggctagcctcaaactcacagacttctaaatgtctctgcttctgatgggatcaaaggcatgtacctcctcgtccaactttggggttttttttgggggggggttccttttggttttttcgagacagggtttctctgtgtagccctggctgtcctggaactcactctgtagaccaggctgtcctggaactcagaaatacgcctgcctctgcctcccaagtgctgggattaaaggagtgtgccaccattgtccagtgtgttcacacattctaatgggccctcctccacagagcggtgccaatccttctaacacttttgtactagctgggaaaagacagcctgctccaggcagcatggacccatgcactcctgttgggttatatggtgtgacacagtggcaagtgactcttggtaggggaggccactgagcaaccatttcctatgagcctagcagctccttcaaaagttgcctaggaaggggctcagagtcaggaagcatgtctaaggtggtcaaccgtggaaacagaagctgggatggtgtctgcgacctgtatcctcccaaaagatatgagctgagacagcagcagggttcacacgggtgagtggaaggccacgtgaatccctatcctaggatggggaagaggacttttttttttctcaagacaagaatttctctgggtagccctggaacttgctttgtagatcaggctggccttgcactcaagagacccacctgcctctgcctcctgagtgctaggattaaaggcgtgcgccaccacatctagctagagagggagctcttgatttccattttgtactctcttccactacaaaagtttcccacagcctcccaggttcagaaccaagatgtgcccctcctgccaagttcttgaattggaaagattttcaagatctttcagactctcacttttcccctacagataatgggcagattaccactcttatcccagattccctcttggtttacctgcccacgtcactctcataatgacatctgggcagtcaccttatctcactctatcctaactcgacccagctcagccttgggtgacattacctctttcctgacagagacattgagacagctctgccaacatgcctgccctacatctcagtgcctgcagcacaaactgaagttgcccaacttggattggtcacccctttcgtaactcttgagacagattttcatgagatagtataggttactgaaccatcacggtgatactggtcgaagactggaccagttctggcaccgcccagcaaggctgagtagcacctggcaaaagaggctccagaatccacaaagccagagcatctttgtcatgaaaactgcggtgaaagaaagtataaatgacttagttgactgtggctaaataggactgggctatacagacagggcaaactttgggtaagagtgctcaaatgcaaaggacacaggctcacgtttttatgttggttgtgtgcatgtgtctgtctctgtgtagcatgtgtgtagaggtcagaggacaacctgcaggggttggctctttggcttccagtttgaactcaggttctcaggattgacctcagcctgggtggcaccactgtgtttacggactgagccatcttatcagccattttcatttgtttgtttataagtgttttgcttgtttgtatatatgtgtgccatgtgtttgcctgatgctcaaggaggttagaagagggtgttaaatatcctggaacttgaattgcagacagttaagaactactgtgtaggtgctgagaattgaagcagggcgtggtggcgcatgcctttaatcccagcacttggaaggcagaggcaggtggatctctgagttcgaggccagcctggtctacagagtgagttccaggacagccagggctacacagagaaaccctgtcttgaaaaaccaaccaaccaaccaaccaacaaacaaacaaaaagagttgaacccgggtcctctggaaaaatagtggctcttttaaccattaagctacctctttacaaattccatctgttttttttttttccttgttcaaaatgctttggtggcctatgtgaatgcataccgaagtccaacctattttgttttttgaaacacgttctcaaatagctcaggctaaccttactaaatcctattcctgcctccatcttgcatgtggtagaattacaggtgtgtatactatacttggctctttttttttccctctctttttctagaaagaatcttgataggtagcctaagctgggctggaacttgctgtgtagaaaaacctagccacaaacatggtgatcttactgcctcgacttcctgagtaccatcacgactactggttttgttttattgagacaaagccttgtctccttgtgtttaaaacaaaatctctctcatgttgcccagactggcttcgaactccataggtagcctaaaatgaactcctcccaatccgcctttctcgtcctctggagtacttggatcatgcctgactcaagccagtcttcaactcaccggtggtcttccagcctcagcctactgatcgctgagattgccggagtgtgtttccatgcccagctatagtgtctttgtctttttttgttttttgagacaaagtttgtctgcagccctggctgtcctggaactcactctgtagaccaggctggcctcgaactcagaaatccacctgcctctgccacccaagtgctgggattaaaggcgtgcgccaccactgcctggcgagaaaaagttatgaagctacctgtgctggctttgagcttgctttgtagcccagtcaggtatgaacttgtcatcctcctgctccaaactgtcacgtatctgggatggcaggcctgtgacaccaggtctagcttagtagccaaggatgggctgaaatttgcagcaattttccttcttcccagggctgggatttccaggctgcaccatggagtccggcaatattgctttttacctggttaaactgtaaaaataatagcattctcatggttaaactcctcaggtgtgaactaatctttcagcatatgtttagaaagctgctaactggttcccatctctattttccctcccctccaccacttgtgaataagacatctcagagcttttcttttttcacctacacaaacacaagtgggctgatccccagccaagctgacctgggagtgggatggcaccatgctattccctgggcagcatgcacgtgctggagtacaggaaagagcccagctagctggctttttactgggtgtgtgaccttggacagatcataccacctctctgagccttccttccctaagcataaaggcagtcataacagctttcacggtgttaagaattgagatcctgcgtgctctcatacagtgcctgttacaagaataaacatttataggccagatgtgatggcacatgactttaatcccagcactcaagaggcagaggcaggcagacctctgaattcaaggccagccagggctacacagagagacactgtttcaaaaaacaaaacaggggccaggcatggtagtgcatgcctttaatcccagcacttgggaggcagagacaggtggatttctgagttcgaggtcagcctggtctacagagtgagttccaggacagccagggctatacagagaaaccctgtctcaaaaaaaccaaaccaaaccaaaaagcaaggactcatggctttccaccccatttgcttgcccccaccccacaaccacctgaccccaagctgcagacacgcccactctcaatgataaaggaaatttggcttgttgtgtgacacaacagacatagtcatgctgtgtttggactcggttgggatagggaaagcggcagccacatagctgcatgctcacatgcacatgattatgaagaattctaaaagcttacacagctgaccacccagggacatgggaactgtctctgttctgtcaatcactgcctcactgatccagccatccctctcacctgtctctaggatgtcctctcctcatagccaagagtattgcagcttttcctctatattcatgacagtatctatcaatttggggctaacatgccttgattctcttgtacctctttatgagttcttacatttaattactgattggtaagcagcagcttcctacacagtagaagactgccatgtatatatatatatatatatatatatatatatatatatatatacacacacacacatatatatatatatacacacacacacatatatatatatacacacacacacacatatatatatatatacacacacacacatatatatacatatatatatatgtatatatatatatatatatattttatcatgattggctgggcctgctgctgttcctggcaagatattctgaattccattttatcaataaagcttggtttaacaaacaagaaaacaaaataaagcagaacaaacaatttaaaaaaagaataagcacttgctgaaaatcacaagctccccttagagcctcttactaagttctacctttaggaatgcacaagaatccacatttgaaaacacaaagcggagccttcagaagctggatgagccatctgtgctccacgctgtcccaacggcaggacccctctgtagcttagaacacacatgtggcaacgaagaggggctcctgggttggctgcccctcatggtagttatcagttagtgtagggattgtcacttgaggcacaggtggacccggggaaaagggagttcacagcagctctggaaagtgttacaggggcacacgggggactagggaactctggacaagtcaccttcccttctgagtgatagagacagaagtggtcctcctagacttctatgcatgcacttcccaggaaactatgaaagctgttcctttcctcccctccagcttcacgtctttccatctttccctctaaacatccccctaagatggtgtttggggtatctgtgggtttttgcacttgggatctttctgcaggtcattgctgtcactatcactgctatctatactcctgtgtgctggccattgtgctctgtgctttataggtcttttcatacttaatatctactattctatgaggcctgtggtggcattatctatgtttaatagtaatgataacaaggctcagaaagatgttaggtgacttctaaatgtgaatcaaatccaaatcagaatcctgactcctcctctgtggtctgtctgagatacaagtatgaccccatgttctttccttctagctgactttcagacgttgattggtctgaagttccagtctgcccccttatatttgctgtaacttatatccatataaatgtcacctagtactgtcacctcaatatgtccagagtcaaccttaatgtcatttgtctacaaatttctgtttccaaggagtgctgctggccccttaatattctccttgcccaagatgttcttgagaacagtggaggttctggggatgaggcaggggagggagggtcacagtgtttgctacaaagggcactaggtgctatggctgagggcagcaggaaagggagcttcaggactcaaaccttagctctccagatcctgcagcccagaggcaaaactggaacctactagtgggataaacactggcagactgcatgagcctccaggtatgtgtgtggttctcagagagatgatggctgtaatcccacttacacaaatcaggtgtgtgggcttctgggagccctgctcctggatgttgaccctgccatgacaaggagtataaattgctggcttcacaccagcatttcaatcggctgtcctcatggtacctaactggcagagatcctggctcaggaaggacgttgtagccaggggctcctgactaggactgacagctgcctggctgggagcgtcgggagctttgcttcatctgagggcagggtggagccagtgccccaggcaggcggctccagtaacatgctgggctcactctccccaccatgccgctcctcccagtccatagctttccctctgtttttctccttgtgggtctcactatagatccgtctgtgtctggatagtcctaggctctggttcagggttgtttgtgtctgttctatggattgcctctcttgtcagtcatcagatcccaacaccctctggatcacaagtcccttgtcctaagcctgggctgcggaggagggagcctctggggaaaggaggaggcggggctccgccccgggcatggccaggctcactatataagaacaaaccacttgccacagtgtgttgtgcttccttcagtgcagaactcccttgtttctgctcaccagcctgcctgcctagcctggtccagttgctgccaacagcaggtacccggttcctgccctgccccatgggagccagggagtggggatgagcggggacatgggctgggcaccctgagagcttgtagagcttaacactaatgggacacattcacgggaaccctggtcaccccaccaccaccactgcagggtttgagccaacaccccagttcccagcattgctggtgtaaccaggggtagagatggctcttgggaatccatggaacagaaattggtctttttccttgagggtgggggtggggcagggataagacatagggtgtatgggctccttgaagtcttaagggctgaaaggtcagataggaaccaggttgctctgatccctgttttatttctctgtcccatagtctctctgcctctctacctccaagatggtgagtctcttgtggtcccttcccacaaaggtccaagtccctggatagagggagggcaggggctggcacccagaaacctagccctgaggactgtcagcttagaccccataaccagctccaccgcttgacccctacccagtgtaccaggcactcacccgtgccacattatccccaggaagtaggtgctgtcagcccaataacagttcctcattccaataccacctatagagtaccacctagctgcccagcactggtctgagttggggacactcagatgagctatgagtccgtcactgacatcagtgtactttcctaggaaaggatacaaagaattcagccctggtgtcctgagatgcaaatgaatggctgaggtccagaccttggatgtccgggccatagcttacagtttctgagccaacagatgattcccccaggcaagacagaacccataggatgggaataagacaggcaccaggtagccaccaagccagagagagctaacaacctgttccaaatggtggctcagcctatctcctgaaagacaggcccaggtgccagacttgtataggccaacgcacagcaaggagtaatatccccatttctatcatcctaaggttcccagcctcagagaggggactggggggtccta

SEQ ID NO: 714 - DNA, 1762 bp, Mus musculus
gtgagaagaagaggtgaggtgcagcaaggagcctgtgacactggggtccagggcagaatggcccaggccctgggagaggacttgttatcagaactacaggatgattctagctccctagggtctgactcagagctgagtgggcccagtccatatcgccaggctgaccgttatggcttcattgggggcaactcaggtgaactgaggctttgtcaaccctctgcagacctcatccgccagcgagagatgaaatgggtggaaatgaccttacactgggagaagaccatgtcccgacgatacaagaaggtaaagatccagtgccgcaagggcatcccctcagccctgcgtgcccggtgttggcccctcctgtgtggggcccggatgtgtcagaagaacaaccctggcacctaccaggagctggcagcagcccccggggacccgcagtggatggagaccattggcagagacttgcaccgtcagtttcctctgcatgagatgtttgtgtcaccccagggacacgggcagcaggggctgctgcaggttctcaaggcctacaccctgtaccggccagagcagggatactgccaggctcagggacctgtagctgctgtgctgctcatgcatctacccccagaggaggccttctggtgcttggtgcagatctgcgaggtctacctccctggctactatgggccccacatggaggccgtacagctggatgctgaagtgttcatggcccttctgaggcggcagctcccacgagtgtacaagcacctgcagcaggtaggcgtcggccccctgctctacctgcctgagtggttcctgtgcctcttcactcggtcgctgcccttccccacagtactgcgcatctgggatgccttcctcagtgagggggctaaggtactgttccgcgtggggctgacactgatgcgcctggcactgggcactgtagaacagcgcacagcatgcccagggctcctggagacattgggggccctacgagccattccccctacccagctgcaggaagaggtcttcatgtcccaggtgcacagtgtaaccctgtctgagcgagtcctgcaacaggaaatcaggatccagctagcccagctttcgaagtcactccctgggccagcccctctgccacaggcccgccttcctggggcccaagccatcttcgagtcccagcagctggcaggggttcgagaaagcaccaaacctgagatacctcgaattgtggtgcagcctccagaggagcccaagccaccacggcgcaagccacagacccggggtaagactttccatggactcctgataagggccaggggaccccctattgagggcccctccaggtcccaacgaggctctgcctctttcctggacacccgattctaagtgcaccatacacttagtgccaccatatctcaatcatctgagcagtgatgccagccccaggcatgtatcctctattgctgtgctatgtgacaatgctgtttccagcaaggaccaccgtgaggagtggagtgtctcctcactttaaggactgtatcaggcacaaagataaagaaggatgctgagtggagcttgtggggagctgtttggtgcttgccattgccagcatcaaagccagcactgaaggattgtgggaataaagcctctggctgagatatggtaccccatgggcttcttgcaagggaatcctcaaataaagcctgactgagaagatactagataaagttggatcaaatattcctccactctccac

SEQ ID NO: 715 - protein, 457 aa, Mus musculus
VRRRGEVQQGACDTGVQGRMAQALGEDLLSELQDDSSSLGSDSELSGPSPYRQADRYGFIGGNSGELRLCQPSADLIRQREMKWVEMTLHWEKTMSRRYKKVKIQCRKGIPSALRARCWPLLCGARMCQKNNPGTYQELAAAPGDPQWMIGRDLHRQFPLHEMFVSPQGHGQQGLLQVLKAYTLYRPEQGYCQAQGPVAAVLLMHLPPEEAFWCLVQICEVYLPGYYGPHMEAVQLDAEVFMALLRRQLPRVYKHLQQVGVGPLLYLPEWFLCLFTRSLPFPTVLRIWDAFLSEGAKVLFRVGLTLMRLALGTVEQRTACPGLLETLGALRAIPPTQLQEEVFMSQVHSVTLSVLQQEIRIQLAQLSKSLPGPAPLPQARLPGAQAIFESQQLAGVRESTKPEIPRIVVQPPEEPKPPRRKPQTRGKTFHGLLIRRPPIEGPSRSQRGSASFLDTRF

SEQ ID NO: 716 - DNA, 26201 bp, Homo sapiens
  misc_feature (1)...(26201): n = A, C, G or T/U
ctcagccccgggtctctctcttccttctttggggccccaaggggttgattttagaaggtacctctttcattttccctacagagtttctgtgaacctcaaagacatcccatggcccgctatgtgctcaggtccttacctggctctttaaaggcagacggtggcatggaggaggggcaggcgcctccttgctccattctccttactgttaggagcctgcattctccatcccaaaggtctgacttgactttctggctgctcaaacccattccaactcctcctctagggagcacatttctggcctgccaccaaatctcttgtctggcttgagtaaccttgaaggtctgcccataacctgtggctcagaggctcagaccccttctccggcctgggcatccttccagaggtgttccccattcaacggcagcctcttttcctgactgcccaggatcgaggagtccccaaggccagggcaggaggctggagggaggctgaataatcagctatggggtggagctgttctgggcagtccgagcactgggggctgtctggggccagggaaatggggactccagttgaagcaaacgtccctggcgaggaccagctcagagaggagtgggctctccccctgctccatgctggtcactgcttgcattcaagtggcccaaggtcctgctcatttctcagggtgactgaagatccctttgggtcctgacatctgtttccccaggttcttttgagccagcactgctcagagctcttttgggtagtgagagacgggggccaattccttggtctgcatttagggtggtgtcttttttttttttttttgagacagagtttcgctcttgttgcccaggcaatggcacgatctcggctcaccacaacctccgcctcccgataaaagtgattctcctgcctcagcctcccgagtagctgggattacaggcatgcgccaccatgcccggctaattttttgtatttttagtagagacagggtttctccatgttggtcaggctggtcttgaactcccgacctcaggtgatctgcccgtctcagcctcccaaagtactgggattacaggcgtcagccaccacactcagtctctttttttaaaaatgagcaattgtttctctcgttttgttttgagatagagtctcgctctgtcacccaggctggagtgcagtggtgcaatcttggctcactgcaatctctgcctcccgggttcaagcgattctcctgcctcagcctcccgagtagctgggattacaggcatgcaccaccacgcccggctaatttatatatgtttagtagagacgaggtttcaccatgttggccaagctggtctcgaactcctgaactcaagtgatccactgcttcggcctcccaaagtgctgggattacaggcatgagccactgtttttttttaaatccttgcgcaggggccttgctcatcttttgcatgcttcagttttagtgtatgtgctgccgaagcaagcactctgtctcatgaataatttcaaatatatgtaaaagcagacgcagctcccgtccccacttgacttgaaacaatttccagatgtgatttcatctgtatgtcaatgggtatccttagaggataaggatttcagggctctttctgaaggccgggtttgtagggtggcctgagtgccacgtcctgcctctgggccctctccctggtctgcatggtcaggtgccgcctgccaggtttgagcaaccactgcaaccagtcccctccctgccaccttctctgggcctcatccacggtgcgctaggcctgcgcacatccgtgcgtgtgcatgtgtcacccccacctcaggtcctccgagagcaaagccctgggcagggccaggcatttcgggtaatgctccaccctgttcacagggttctgggggaggctgttctgcccttctctcctgcactggctgaagtgacgctgggcattggccgtggccgcagggtcatcctgcgcagctaccacgaggaggaggcaggtgagggggctggacgtggcctgggacagcagagtggcaggtgggagaggggcggggcccaggttactcctgttcttccccaacagacagcactgccaaagccatggtgactgagatgtgccttggagaggaggatttccagcagctgcaggcccaggaaggggtggccatcactttctgcctcaaggaattccgggtgaggttcctcccaggcgctcgccgtcctgtcctccctgcccagctcagcccagcccggggcctcacctgctacctctttcctcccaggggctcctgagctttgcagagtcagcaaacttgaatcttagcattcattttgatgctccaggcaggtagttcccagccttgggacagggaagggctctgggatggcaggagctgaatgggatgacctagcttgggccccctcccctgcccaggcccgccatcttcaccatcaaggactctttgctggacggccactttgtcttggccacactctcagacaccgactcgcactcccaggacctgggctccccagagcgtcaccagccagtgcctcagctccaggctcacaggtgagggcacctccccccaactcctcctctctccatgtctgtgcactccagcctgagactgcaactcctagcttctgcacctccccgcaatgtgttctctcccgccccttctctttctatcaggccccagcccctaaccctatagtgctcacagctgccagccctgcagactcagccttctcggttagctgtactcagagacccctcccacccagggaagcatccccaaggccctgccagcttccttctctggctgaggccgcccctctgagcctcctcccaggccaaggagggaaagggctgctgggaggcaggagctgcctgggctgggggaagcaggtggctggaagggcaggtgggctggggaggatggcccagtgcactttcagcacaggaagttggggctggcccccagcccagcctgtccctgggctcctgtgctttccagctcctgtcccctgggaaggtgggggcttgggctccatgtggcccagttcataagacttgctgctcctccctcctagctgagctaaggtagcccccgggatgcctccctcaggcccctacctgaattctgatcaaagagattcctggcccaccccctccaggaagtcaccacttaacccctgcatcctctcctctccagccaaatcaggaagtcataaaaccaagagatctccagtggtcgggggccccagagctcccttcgagccctccaaggtggggccctgcctctgctcccccagtcccctccctgatactccgattctgcctacagcacaccccacccggacgactttgccaatgacgacattgactcttacatgatcgccatggaaaccactataggcaatgagggctcgcgggtgctgccctccatttccctttcacctggcccccagccccccaagagccccggtccccactccgaggaggaagatgaggctgagcccagtacagtgcctgggactcccccacccaagaaggtagggactggaggtggaggcaggggtgggaggtagggaagggagcagcctccagaactcacttgttctctttccagttccgctcactgttcttcggctccatcctggcccctgtacgctccccccagggccccagccctgtgctggcggaagacagtgagggtgaaggctgaaccaagaacctgaagcctgtacccagaggccttggactagacgaagccccagccagtggcagaactgggtctctcagccctggggatcagaaaggtgggcttgctggagctgagctgtttcactgcctctcgcaggccccagctggctgtcactgtaaagctgtcccacagcggtcgggcctgggccgttatctccccacaacccccagccaatcaggactttccagacttggccctgaactactgacgttcctacctcttatttctcattgagcctcaggctatactccagctggccaaggctggaaacctgtctccctcaggctcaccttcctaaggaaaatgtcatagtaggtgctgctggcccctggtgatccagcttctctgccaatcatgacctgttccttcctgaagtcctgggcatgcatctgggacccccgtggagctgacaagttttccttgctttcctgatactctttggcgctgacttggaattctaagagccttggacccgagtgtgtggctagggttgccctggctggggcccggtgccgagactcccaagcggctctgtgcagaagagctgccaggcagtgtcttagatgtgagacggaggccatggcgagaatccagctttgacctttattcaagagaccagatgggttgccccaggatccggctgccagccctgaggccaagcacggctggagacccacgacctggcctgccgttgccctgagctgcagcctcggccccaggatcctgctcacagtcaccgcaggtgcaggcaggaagcagccctgggggactggacgctgctattgattcattaaaaaaagaaaagaaaaatacaccaaggctccatgttccccgtgacaggtgggcctgaggggtcggggtgacccccccccagcatggcagcatgatttctgtacaatcaatccatcatctggggcacagggtggtgtgcgggggctatttcttggctttggcggaattgcggggtggggtgatgggtcggcctccagggttcaggccactgaactgcccgtacttccccttgttcttgtcggcgggcttgaggatctaaaagagacagtgttggtcaggctcatggggctgagccacagggcctagcggctcctttcttccccacactcacctggaaagagcacatgagggtctcgtccacactcatcatggcgccagcattgtcaaactcgccacagtagttgggagctgagaaaagtgtcaccagctgccgcttggcaaagaactcgtagccgtcttctaccacctgggcgaggatgggagcagtcagtcccgagcgcaggcacggccctccccttcccctgccgcaggccggagccaccagcccacctggtgtgctcggcagatgaggtccaagtcgtgcttgtggaggaacttggccaccacctcggctccaaaggtaaaagagacgccacggtcgttctcgccccagccctgcacgtccttgtcagggtcagaccacagcaggtcacacagcaggccctggtcaggcacatctgtgggccgcatgatccgccgaatctgctccatagactgcaggtccggggacaggcctggggggccgggggaaggtcacttcctcaaacaaggacatcctccctccaggaagccttggccaatgaaccccacctttcccaccaccctcctggtcccgccactggtctcctgggcgcctagacaggcagaagtcatccccttcccctcagctttttcaagttcccaaacaggcacaaaggcatccctgccctcaggagcacagagctcccgggagaaaggagacaagcccactccatgtaggacacacatcaaggaagtgagtgcagcccagcacagtggggtatgggggacacttcctggaaggagtgacttcccagatgagacctaaggagagctgccgggtgctgagggatgcggccagtgctcctcctccccagccatcccctccctcacctccgtggcagcagaagatcttttcgtccactatggccgcgatgggcaggcagttgaagcagtcagtgaaggttttccacagtttgatgttgtagcgtctcttgcctgcccagggggaggtggctgtgaggtgcctgcctaccccaccctcagccagggtccctgggctattcagccgtggctgggaggagagagtcaggcaccgatgcaaaccaccccccacccctgccacctgtcagccttccaggagcaattctagttactttttattttaattaaagaagacaggatctggccaggcgcagtggctaagacctgtaatcccagcactttgggaggccgaggcgggcggatcacctgaggtcagaagttcgagaccagcctgaccaacatggagaaacctcgtctctactaaaatacaaaaaaatcagccaggcgtggtggcgcatgcctgtaatcccagctacttgggaggctgaggcaggagaatcgcttgaacccaggagacggaggttgtggtgagccgagatcacaccattgcactctagcctgggcaacaagagtgaaactccgtctcaaaaaagtaaagaaacagggtcttgctctgtcacccaggctggagtgcagtggcaagatcatagctcactgtaacttggagcttctgggtccaagggatcttcccgcctcggcctcctgccagaagtaattctaaagcacccgagtccactggaaactaagttccaatctggaccagcctcagggttggcactcctcgcatgcccccacccatgagccgggccaagtccaggtctggtttatctcagcttctggacagcagagcccatctgcaaacatcctaagtgcttagtagcaaatgtagggggagtgtcaccaggcagggccctgggggaaagcactagaatccgggcagcccttcagtcagcaaccattccccagaccccatgccaggaggggcagggcaggcacgagaacggacctgggccccgccttcgtggagcgcacagtctatcaagtgtctgtcagatatcaggccaatgtgaaggtcccactgaatggcaaagagtgcggttcaggacccgggcagccccagacgctcagaccactcacactcatcgtagaaaccatagatgcggttgatgctggcacactcgtggttcccacggagcaggaagaagttctcggggtacttgatcttataggccagcagcaggcagatggtctccaaggactgcttgcccctgtccacatagtcccccagaaagaggtagttgctctcgggagggaaaccgccatactcaaatagtcgcagaaggtcgtagtactggccgtgtatgtcacctgtgacccagggaaccgggtaagctagatgcaaggtctagacctgaacccagggccaggactgcgctcaagggaggagggctccaggaactctgtggggtccagtgccacttttaggaaggcaaggggacctgggccgggggctcaccgcagatcttgaggggtgcctccagctccagaagaatgggctggctcagaaaaatctcccgggatttcaggcacagaccgcggatctcgttctctgtcagctgtacattcttgccaggccgcgagccctgcactggggcgcaatggggtgtcaggaccctggaccctgacaggaggagggtgggcgacacgggtggccccatggatacctccgggggcgcctaggcctcctcggcccctccttgcccacaggcagctgttgctgctgagcctcccgggaccgcggcctcaagcctcccaggggaagcccccagctaccctcagcgcctcgggaggcgactgtcgtgcgcagggggctgccaccaaaaacctcacagcgcaggaccccttcctggaccgggcttcccgggtttctccctcgccccaagagcccaggcaacccgtgcgcccccagcccgggagagggggggagctgctccgcgcgtcggagctggccccggacctctcaggcgcgtccgcgggggggcagctgcggccacggaacctcgctgcccgtccccgcccagtctaagctggccccgggggcccgccccgcgccactttccgggccgggcacggggccatggtccggcggactcgggcctccctcgccccgaccaagcttccagcaagcgcccgatgattgagtccaggttgagcttctcgctgttggacatggcggccccgccgcctccatcccatctgctcctggcccgcccctgcttcccgccctccggtagcctctttccggcctggctctccttccgcccgccccatttcccccctggcctgcggcctcctctcctagcttcccggggcctccccctcccctttccccgccctcttttcgcccccctttggatcttatggccgggggccnnnnnnnnnnnnnnnnnnnnnnnnnnnnnnnnnnnnnnnnnnnnnnnnnnnnnnnnnnnnnnnnnnnnnnnnnnnnnnnnnnnnnnnnnnnnnnnnnnnnnnnnnnnnnnnnnnnnnnnnnnnnnnnnnnnnnnnnnnnnncacaagatctagaaggagaaggagacctaagaaattctagacagatatacagtgtaacacatacagaacgatatgcaagggaggaaggaaagatgatagaaggagagaaaaaagagataaagaataaataaaaacagcagaggaaaagaaggcgaaaatagaaaaaaaaaagcataagaaagaaaaattattcaaaaaatgataaaaaatagaccaaaggaagacccaaaggagaggataaagaaagaataccgaagaacataagaaaaagtagaaaataaacacaaggacaaagaatacaacttgaagaaaataaaagacaagaagaaagaaaagtgaaaaaaaaaataataaatataaacaaagagaaaaggaaaagagagtagaagatagacccaaaaaaaaaaaacgaaaaaaggacagagaagaacaaagacgaaaaacagataaaaaaaaaaccaagacaaataaaaaagaaccaaaaaaagcataacaaacaaaaaaagagacaacccagaacaaaattgaagaacaaaaccagaaagagaaaaaaaaagaaaagagacagaaaaaaaaaacagtaaaagaaaaaaaaaaacacaggtgatcacaaaaaaggaagaaaccaagacggacaaataaaaaaaagacagaagatagagacacaccaaagccaacatggtgaaaccccatctctctaaaaatacaaaaagttagctgggcatgatgggagcctcctgtaatcccagctacttgggaggctgaggcaggagaatcgcttgaacctgggaagtggagcccaggcgacagtgcgagactgtctcaaaaaaaaaaaaaaaaaaaagaagagcagacgataaatgaaccttaattcttgttggaaccctgagttggtgctttacatgccagtaacctcagaactggaagtgggcctgccgtggtggctcaggcctgtaattccagcactttgggaggctaaggcgggatggtctcttgcgtccagcctgggcaacacagcgaaaccctgtctcaacaaaaaatacaaaaattagctgggcatggtggtgcgcgcctgcagtcccagctactgtggaggctgacgcaggaggatctcttgagaccaggaggtggaggttgcagtgagcccagatcgtgccattacactccagcctgggtgacagagcaagaccctgtctcaagaaacaaacatgaagtccaggcgcagtggctcatgcctgcaatcccagcactttgggaggctgaggtggatggatcacctgaggtcaagagtttgaccaatgtggcaaaaaccctgtctctactaaaaatacaaaaattagccgggcatggtggtgcttgtctgtagtccctgctacttggggggctgaggcaggagaatcacttgaatccgggaggtggaggttgcagtgagctgagaccgcgccactgcactccagcctgggcaacagagcgagactctgtctcaaaagaaacaaacaaaagaactggaggtggcccggcccctgcgtctaacagtcctgggccctccacaccagcacaggaactcaagcctgcagtcactggggccatggggaaggtgggaggagcccacagctcaggggcactggggcaggcaggaagagcctcagagaggaaggggtgacaccccccacccttgggaggggcccccagcggttgccaaagctgtgtgaggaggaggaggaagtgagaggaggaggtgaggtgctgcgggaggtgagctgggctggtggggacaggggcagggcttggggctgggtctccggacagaggcctggcttttctgtcagggcagggcctagcccctgcccccataaaagaggagacatagggggcttggtgagataccctgaaacctcccccctctgaccccgcagccaggccccaggctggccgggagtggcccctcacactggttctccccactttctctgcctgtggcatcgaaggccccgggcaccatggcccaggccctgggggaggacctggtgcagcctcccgagctgcaggatgactccagctccttggggtccgactcagagctcagcgggcctggcccatatcgccaggccgaccgctatggattcattgggggcagctcagcagagccagggtaagggggcagggtgagggctggcggaatgctgggacagaggacagggggctgagggctgaattctggagggaggccgggagggtctggtggtagggattgggagggggactcagccagtagcacccctctgcaggtgccaggtggaaccctaaggtgggaagggtccggggaggcctctgtacgtctcttacccccagcctccgagggtttgcacccactactggggcagaacatccttcccctttgaacctctggctcaggaatcccagatccaaatcacagaacccatacctcctccttccccctttccccaagctacagacagaaacacaagtccagatatagacagaaacttgccccaggtcacacagatcagacacagacccagactcaaactcaggactctgggcttccagtccagggctctctccagccagcttcccctatgaattgtctgtgtccctgtcctgggtgacagccaaccagtccctcccccaatacacacccactcaccccttcagtctcctgcttctgcccacgtcggagccacatcctttcctgtccccgtgacaagcattggcagctcctgggtcacaggtcaccccacagggctcccagagatccctagggccaggagctgggttcacctgggtagcctggagggtggcagtgtgggccttgggtaacagctgcccagcgtctggatacctgtgccatgcacccccaggccgggccacccacctgcagacctcatccgccaacgggagatgaagtgggtggagatgacctcgcactgggagaaaaccatgtcccggcggtacaagaaggtgaggggggcaggggccccacttggcttccatggctcattcctctctgcctcagcccacatcttggcaaaatgtacccaccctgtgtcccagcacctccggcctttgctccctgccacccaaagtgggcccctgcctgctgatgagctgtgcctggggcctgccagcaggagctatggaggctgcctagtggagcccttggcctcacccacaggtaaagatgcagtgccggaaaggcatcccgtctgccctgcgcgcccgatgctggcccctgttgtgtggggcccatgtgtgccagaagaacagccctggcacctatcaggtgagggagtgggcaggggccccaattcccctacccagagcccctcaccacactgaaccctcacacccaccttcctggctacccacaggagctggcagaggcccctggagacccacagtggatggagaccattggcagggacctgcaccgtcaattccctctgcacgagatgtttgtgtcgcctcagggccacgggtacgaggccggtgatgcccagggacccccagccccacaagccccaggtgctccagcccactttccctagcccagctctacagtcttgcatctcaggggacccaggaaggcccagggaggctgaggcctgggcagaggcccccagagggtggagaagggggtgcctgcaggactggccccttatggggtcttccggcacaggcagcaggggctcctgcaggtgctcaaggcctacaccctgtatcgaccggagcagggctactgccaggcccaggggcccgtggctgctgtgctgctcatgcacctgcccccagaggtgagtgaccttgaccctgctctgggaaccctagtgacctaggcccagggaaccccatccccaggaactgtggcctcagaaacctgcaatccttgattcctggaccctgtcctagtgacccaggtcctcatgactgccagcctcagtgaccttcaagcctaatgaccttgactccaggaacctgggacccttgaccccagccttgaccccagtcatctaggaatctggatgttatcaccttgaccccacgactcctgattctgaacttggggactgcgaccccaaccccaaagacccagaaacccaggacttgaactttgggacactcccaacccttggccagtgaaccccaaccctgtgaccttcaaatctaacaccatgagccctgtgatttccaacaccctaaacccctcagcagaccctgtcttgggcagaggagggggcttttgggaagggcttccaggaactgcgcaggttaggagtggccctgagtgcaggcccctgtggtgcccaggccctccccttcactcctttcccctgtcctgccttctcctccacggtcccttccttggtgagcacttacaggcctgtgccctgccccttccccaggaggccttctggtgcctggtgcagatctgtgaggtctacctccctgggtactacgggccccacatggtgagaggctgacatgggggctggaggaaggaggggcaggggcccggtgagtgggtgggggtctggggactgagggaggttgagcctgggctctgggggtggcggtgctggcctgctgatggacgtggccacaggaggctgtgcggctggacgccgaggtgttcatggccctgctgcggcggctgcttccgcacgtgcacaagcacctgcagcaggtgggcgtcggacccctgctgtacctgcccgagtggttcctgtgcctcttcgcccgctccctgcccttccccacagtgctgcgtgtctgggatgccttcctcagtgagggtgagtggggcagccagtggctggggcaggagccttggggtgtgggtggggaggtagctcaccagctccagggttccctttttgagcctcaaatcacaggactgggtgtgccgaaggtgatggcctggtgcctggcgctacatcacccatcacccatcacccaggcaccgcctggtgcagagctgggccagggaggcttccagaggaggcagatggggcaggagcagggtgatcacagcacatggaggcctgagcttctcagggacagtaggaggcgttcctccccagagcccgcaggcacctgctgggtgctcactggctccagacgtggatctgcagctgggaatcaagtgatcgagaccttcaattctggcgggggtggggatgggtggcgacagtaaccaaattcacaagatatttatagattgtcagaagtgtcatgaagaaaataaaacaagggatgtgacagggagtgtcaggggagtgcaggggcgatggctgcatttaagctccttctggctgctctgtgcaggaggaggactcacaggggtggctgtggaggcctggggccagagaggccactgtccccaggggccaggctacagtctacgaagcagggagggcttggagccatgaagccagagaggtggaggctgggggccaggccaagaacaggaggggagtcggagcagagccaagctggactccctgtgtctttgggactctgccttgatactgccatcggtaacccacctgcattctgttctatatgtgaggtctggaggttgcaccttaaaacgtggtagaaatcagtcagcatatgcatactgtgcatactgaatgcctgtcgtgtgctcagccggcttcctgccctccgcacagcggaggaccactggctgacttagagttctggccacaggtgtccaagtcgctatccatgcggtcaccttccaaccagccttagacctcgagagcagggctgggcagagctgggcagggcctgacctgcccacctgggggcaaacactacacaggctccctttatcagaaggacgatagtatgaatagtgattgttcctaccatcatcactcaacctcgctggtcccctggtggctcttctcagatcagaggctgccaggaaggaattttgaggctccaggactagcccaaactcacactgtggggagtgtgcactgagtgctatgctcctggcttagggaagagcagttctgcctaggatctttctagaatcagagggtcacagatccaagttggaaaggcccttaaagggctccacctgacctttcatcatggagatgagcaagctgaggcccagggagggcttggtgtgaaggcatcagtagccctgggctcctggcaggaagctggtggcttggaggggactggagccttggggtgtggacagggagctagctcaccagctccagggttcccttttggagcctcgagtcatgggaccaggtgtgctgaaggtgatggccctgtgcctggtggcacatcacctgtcacccggatgctgcctggggtaggagctgggtgatcatagcacatggaggcctgactggctcagggagggtaggaggtgctcctccccggagcccacaggcacctgctgggtgcttgctggctccagatatggatggcatctgagcatcaagtgatcaagaccttcattttggcgggggtggggatgggaggcgacagtaaccaaattcacaagatagtaactcttccccaaagcatctgtggctcttgaggctaacttggccagtacagcggcctgtgttacccgaaatgcaactccaccctctgtcattgttcctgaaccggggagggcagagctgcaggagagtgggaggcatatggctgagggcaggtttgggtgcagaactgtggaggggcagggccggcctcccagtgaataagcccccggcctgcaggtgccagagtactgttccgtgtggggctgacactggtgcgcctggcgctgggcactgcagagcagcgaggggcctgccctggcctcctggagacactgggagcccttcgagccatcccccccgcgcagctgcaggaggaggccttcatgtcacaggtgggtacccccacctctccttggacttgcccagcccctgctgcacgggggaaactgagtcccagagcaggaagccaaagcgagaatggggacttagttcctgtcccctgagcttcagagaacacaaaaacctgaggcctccagtggctttctgtggctccccagtgaggctgtcagcccctcagtcctcagccacttcctgggctggggacctcacagtttcctgttcctgccttgaggccgggcaaacgcagcaccaactgctccccacaggtgcacagcgtggtgctgtcagagcgggacctgcagcgggagatcaaggcccagctggcccagctgcccgattccgcgccgggacccccgccccggccacaggtccgcctcgccggggcccaagccatctttgaggcccagcagctggcaggagtgcgacgaggcgccaagcctgaggtgcctcggattgtggtgcagcccccggaggagcccagaccaccgcggcggaaaccccagacccgcggcaagactttccatgggctcctgactcgggcccggggcccccccatcgaggggccccccaggccccaacgaggctccacctccttcctggacacccgcttctgagaggaccatggacttagtgtcccccagtctcaattgcctgatggctgatgccagcccggcaaataggcaccgcactttactcttgggactcggggacttggcttccttcctggcaaggaccaggcagtggggaaggaggaggtcctccgtggtacatactgggtcaggcactagcatggaggagggtcacagagtggggcacgtgaggacccatggaaccgtcctggtgcccaggccctcacaagtaccaaagccagcaccaaaggagtcagggaaggggttggctgagtcaagggaccccagagggcaccaggaataaaatcttcttgaacagatgccttggatggcgctggatcaaatgccctcctcccaaccccagacaggcagccccttcccctcctccctcatctgcccttcccagccccgccctctcctggtcctgccctggggacacaccgaggctgcccactggccgctggggaaggtgtttacagtaataagagccaattgaaagttgccctgcccagcctctggggacaggagtggcttttgcacctgcaggaggagggcgccccagtggatggcgagtccaggggctctaccccctcttctgccctccttcccctccctccagggtggttcagtactcgctgggatgggggactctaacccaagtcctccccgcacccatggttctagtcacatctgtcaaagggatccaggcaagaacaaaggcctagtgtgcctcggacaaaggagaaaggtcccgccagccctcacccctccctgggccctgcgtctgccccctcgggaccgccaccatggaaaccccctcccacactcactaatagcccccgtgggtgcccaggacctgagccatcgccagggcaacagggctggttccgacacaggcgtgtgtcccgcagtgtccattcccaagtgccctcccttcgatggggaacacggcaggactccatatggatgggaggcatctgcaggcccaggctccaggggtggccattgggtggggtgtcagtggagtcacctgtcagactctgggtttggaatgttcttgcgacagggccacaggctgcgtctatgtggcaagtgccaggtcctgggtcctgggcagacttgtcctactcccaaggagcctaacccctggaagagggaatcatggcggcccagacccttccttatctgtcgtttctccgggggaaactgaggctcaggaggagcaggaacttgcagaaagccttactatctatccatagcagacccaaggtttagccctgccccaaccactggcagctcccccctgggcagccccctgggagtgctttctcctgctccttccccgctctacccccaatcctgcaccagcccctcagtgtgtgaatgaggcaatagccagactcccgtgatttagagcgcgctccagagcctcctctgcccactcctccttaccccgctggggtgcctgcaacttaataatagcctccttacctgtagtttacaaaaccctttcccagaccccccgcccctaggccctctctctgcaggtggcccctgatatccctgttagagacacaggcttagtgaggacaaggacctcacccaggcccacagtgaaaggcagagccggctggaatgcagaggcaaggctctgtgctgtgtagactatgccttatccttagacgaggagtgtcttggtggaatctcaggcactgtagcgggcagggtggccggggtcagggggcacttgtccctgaaatccacttgggagctccccgccctccacagttcagctctttgcctgggagaatagaggagcaaggtgcagcagcctcagccctgggccgagggtctgtcatgagcctgcgggggcgcggtggcagtggctcaccctggacacagaccctaggagccggtggtctccagcagcgtccctccagctggggctcagtcattgcctttcctactcaggagactgttttctgggcagctcttctgtaggtttccttatcagtcacctgcatgggagccctaactcacaggctggacagaagaggcccagtgccctccgggtgtgaaccctcgcacacatgcgttctcacaggctctcctccgcagggctgcaccggcccccacagcacctttttgccagctagggaaagacgtctctcctccaggcaacatgcagcctcaccagagtgcacggtgtagcagagtggggtgtgatctctctcccaggtgcctttgtgcagtgagcaacctacacaaacatgctcagtgaacctagaaagtccctacagatctgcctggaagggggctcagagaagggaagtgatgcatctgagaggactcagtgtgtggggactgaagctgggagggcccctgggatgtctgtcagcctgcctcagagtggacacgagtgggggcatgcaaaggagtggagcaggacaaatgggtgcctgccatggatcggcggggaggacccacggtctccatcttgccctgccacccacttgaggttccctgaattcccacactgttccaggctcccagaggggtcagacttggactcacctgcatgggaaaggccctttcttctcctctgagcctcagtattctcctgcggataatgggattataatagcccccaccccagcctcaagagggctctaccagctcatgatgatgatgatgatgactgttcagtccagcgggacagcagccaaagcactgcctctcctcaccccacccctacctagcctcaggtgatgtccaggctttcctggcaggggcagagcagaaccacccgcccacctgcctgccccaagtcccaggatcctgagcttgggctgcagctgcccaactctgattttcctccctgtatccacaaggcaaaagccagagcagccagggaccagacagggtggcctaggagagggcacagccgcagcactctgtgcatgcatgcacgcattctggcagaagatcccggctctgcctctcaccagctgtgtgaccttgggcaagtcacacgacctctctcagtctcataattgctcccttgcatgtgaagtgttaagcctgggctgagtgtgcactgtatccccatttgaagatgagaaaactgagtccccagggctgcagagcttgttaaatgttaaatgtcaaagctcatgctctttggatcacgcccaggccccacagtgggaccccatgggcgctcaggccacccaggtggcaagcgattgggtctcctggggtggttgtgggacctgggcccctccccttagtgatctgaagctcactctccccagcctagaatggggctggttcctcattcctggagcctggaccagctgtagggagggctgcacgtgggcctggaagttgtgtggggaatgtgggctggactgggcatcctggagaagccatttcccctctctgccgaccctctccagtggtagacagggatgggtctgcacagactgccctgtatatagttgcagaaagggtccaacagctgtcatctctgtccctgacatgtgtgggcccctcagtattctcccccaggccaggaggctctcaaggacagccagggctcaatatgtgtccagttgcgagacaggcagggagaagggctgactggggactgtgagagggaggagttagagccataggctgccctgcctaggagagggaaaccagccccattctaggctggggagagtgagcttcagatcacaaaggggaggggcccaggtcccacagccagagctaggattgaaacccactggtgggacacactccaggagagggggtgaatctctggttgtgcttctgtgggtgaattgtggctgagacccaggtctcctggggtatgcttctgtggttgggtgggtacacttgggtgtgagtatgtatgtcttggggagattatagcttcaactccgggtgtgaagttgacctgggtgggtgttgataagcagagcagatttcttttcctttcttttctcttcttttttctttctttttttttttttttaaagagataggggggccaggtgcagtggctcacacctgtaatcctagcactttgggaggccaaggtgaccagatcatgaggtcaggagattgcgaccatcctggccaacatcatgaaaccccgtctccactaaaaatacaaaaattagctgggtgggctgggcgcggtagctcatgcctgtaatcctaatactttgggaggctgaggcgggcagatcacctgaggtcgggagttcgagactagcctgaccaacatggagaaaccctgtctctactaaaaatacaaaattagctgtcatggtggcgcatgcctataatcccagctactccagcctgggcaacaagagcgaaactccatctcaaaaacaaaacaaaacaaaacaaaacaaaagtagctgggcatggtggctcgcacctgtagtcccagctacttgggaggctgaggcaggagaatcactggacccggggaggcggaggttgcagtgagccaagattgtgccactgcactccagcctggtgacagagtaagactctgtcttaaaaaaaaaaaaaaaaaaaaaagggatagggtcaaaaaaaaaaaaaaaaaaaagagagagagatagggtctcggctgggtacagtggcttacacctgtattctcaggacattgggaggccgaagcaggaggagcacctgaggtcaggagttcaagacaagcctggccaacacggcgaaaccctgtctctactaaacacacaaaaattagccaggcgtggtggcgtgtgcctgtaatcccagccactcaggaggctgaggcaggagaatcacttgaacctgggaggtagaggttgcagtgagctgagatcacaccactgcactccagcctgggccgacacactgaaactctgtctcaaaaaaaaaaaaaaaaaaaaaaaaagcggagcgagcgagagagataggctctcactgtattgcccaggctggagtgcagtggcacaaccaggactcactgcagtctcgacccccggggctcatgtgatcttcccacctcagcctcccaagtagctgggattacaggcccacaccacctcaaccagctagtttaaattttttttttttgtagagacagggtcttgctatgttgcccaggctggtcacaaactcctgggttcaagcaattctcctgcctcaggctcccaaagtgctgggattataggcagccaccgcaccaggagaggctggatcttatagacatcctggcccctgtgtgcaagtccactgggtccagaagtgaggagggggctgcacagatgtgtggagaccctggcccaggagggcctctctgggagaacgtgcaatagggcaaagcgctggcagctgggacagaaagctgcagggctgggacctccggcctccatccaaaggtagggctcagggctgtgtgctccaggctgctctcccgggcaccccacccctaagggcgggccctagtaccagtctctgcctgctccggctctccccgcccctcctttccatctcttctccatggtgggcctccctctttcttcatggcagccctacgtctgtgaccctcgacgacagtccctgtccatctgtacctggccctctgtcgggacttcctctgtgtctctgaagacccccgtctctccctgcctgctccgtgccctcctcctgctgggtccgtgtcccgccacacgcccccaggtctgggacgttttcgtggctgacgggcgggggggggggggggcgcgtccccggcgggtccctatcggtccctgtcggtccgtccgccccgcgccgcccccgctgggcactgggcatgccccaggcgtttctatataaagcggcgccgcttgggccgggcgctgtgccactgccaccgccgccgccgctgcatcccgcccggtccgaatccgcccgccacgcccgccgagccgctgccgccgccaggtaccccagctccggccccgccccgagggagagccagggaggggggcggccggggcaggagtcgcggggacgaggaccccgggcgcccgctccccgcggcgggaccctcgacgctacgccccccacccccgggacccggtgcccccaactcccccccgcgctggaggggcagagccaagcccggaccccagggcaggaaggacctgtgagccgcactggggcaggagccactcggtctgggcagcagaaatccctccctaccttcggggtgggggtggggctgccttggcctctctctgcagggacaggtgtcggccacctctccactcccaaagtctaggggctggaaggccaggcagggacttggctgccctgactccttcgtctctctgtcctctgtctctgccatcagtctctcagccactccacccacgagatggtgagtcttctgtggtccctcccccacaaggcccaagtccctgggcagagagtgggcccagaggacagcaggcagcacctaggacctaagcctgggagttgccccctgcagacagcttagacccacgaccagctcccccacccccaccctgcggctgcatcctgggaggtgggcactcttagtgccctgtgacattcattcattccatggcccctcagggagctcaccttctaggagacggcacagaggctctggccctggcaaactgggattcgagcccaggcatgaggcccagtcctctgccgtctgggccacagcacaccatctcccaacaaccaagagattctcttcgtcccagcctcatcagcccccaggggatgggagagggcaggcaccaggcaacaaggtccaaagagacctcacgacttgctcaaggtggccgagcctgtcccctggaggacagactcagctgccaggcctgtccaggcctggggactgcaaagaacaagaattccattcacacgaagcctcccagcagccccatattgggggggcgccagcctcagagaggggagggacgttaggtttcatccaaagaaagcatttccgtgactcaaaatatctgcaggggggatactgtctagcctcctaatgtttagcccagggctgggcacacagtagggcttcaagacctacgtggggatgacagtggaatcacatttaggtgtcagcacactccatgccgggtcatgagacagaaataagccacctcagagtgatggctgggttcgttcattcatctactcttcagtcaacaaacacttactgagaagtggctgtgtgccaggcacgctttaggtgctggggttgcctccatgaacaaaacaagcagaaaactctgctgctgtgaagcaagctaaggcggagcccagcatggcaggggcgggaggggctggctggcaagacattgcttcctgccctccccccaggggcaccacacagaacagtttacaaagcactcccacggttgcgttcccattaacaagccttcgcccccaacacaagcctttcctctcctagtccccgggacggtgtcagccctgaacatagcccaggctgggagagtggggggcttacacccttgggtgacttaatgtgcccactggcccaccctgcccaagacctaccacttctgccctctcagctctccctggatccatcgggtcccgagtgggattgcccactgggctccaaggacctggaggaagagggcccctggggagggggctctggcctgccgcccacaggctgcttccctggctcctggcgccaggacgtgggcctggactgcaagggatcccccgagggggccgaggcccgggcttggactgtctactactacagcctcctgcagagctgtctgcagcaagctggccttccggagactcaggaccgcggccaggtgccccgcacaggtgcccaagggctccctggagggaggcacctctgggggcagggaggggccctcagcccagtctgcttgctcatccctgtcaaggtcggccccttcccctaggctctggttccatctgaaggcagggaaggcacagccagttggcctagggtaggcggacattgtttgcaagggcatctggcaccagtgaggtcaaggattgggctccctgccctcaccccctccccaaaaagacccagccctgggattgggaaaccacgttgtgtggcaccgaagcttctagagaaaggtcttgggagctgtggtggaggcagctcagcagctgagaccccccagactcctccccttctgcccctccacgcctgttacatatatcagactttgtgtggacagagggttcacaggcagaatacctgagaatcacagacttggtcccattgtacaaacttggaaactgaggcttggaggaacactgactcctccaaggttacacagaaagtcagagctcgggctagaactcaggtctccagtcacctagcccacagcacctctggaacagctgcagaaaggggaaaccagcttcacggggcaggactggcgggcacctccattccctgcctgtcccctgtctcatccgattcctgggaaaactctgggggctcagggtggggccgtgggtgtggaggtggtggaaggtgggcagagagacagcaagggcgcccctggtgagctgggccatgttctctttcccgaggctgtcctggggcggaggtgaccttgtgcgttctgggctcccccagcacctttctgcctgtgctgctggagggtggggtccagagcccgggtgagtgtatgctcaagtttccccatccccttctacagaaagggcagccctgccctggcccagccacatcccaaaatacccgccaaccctggcaactgcctgcattccaccggagcagctgccatgctgaatggggatgggttctgggatcagctgcttccactccgctacccgggggcccgggcatagggcatcaagccttccctggccagccacttgccttctctgcccacaggaaacatgctcctttgcctgtcccctgcttggctgatgaaggtgccagcacccgggcagccgggtgaggcagccctgctagtctccaaggctgtgagcttccaccctgggggcctgacattcctggatgactttgtccccccgcgccgtgccacctactttttggcaggcctgggcctggggcctggccggggccgagaggcagcagaactcgcccgtgacctgacctgccccacaggagcttcggctgagctggcccggctgctggaggaccggctgctgacaaggcagttgctggcccagcagggtggtgtggctgtgccagcaaccctggctttcacctacaagccgccggggctgctgcggggaggggatgccagcctagggctacggctggtggagctgagtggcaaagagggccaggagacgctggtgaaagaggaagtggaggcttttctgcgctccgaggccctgggtgatatcctgcaggtaacagactctcgcccaccctgaggtctgtacagatgccagcaggatgggacccaggcacggttaccaagtctggctggaaaggtgtccctacctcttagccctgccgctgccctgccccatctctggggcaatcccctgcccttttgcctcagtttactcaccggctcctgtggcggaagtgccccaccctgcagtacctggggtggtgtccaggaggcccctttcccctccttgctgcaggtagctgtgaagctcagtggctggcgctggcgggggcggcaggcatggcgtctgcacccgcgggcagagctgggtgcagtggtggacacagtgctggcgctgctggagaagctggaggaggaggagagtgtcctggtggaggctgtgtacccacctgcccagctgccctgctcaggtgagagccacctgggctgaccagggatgggagtttggtgtggccttctggccactctgtgctggccttagacctccccgtcttcccccagatggtccttcacccggccccggcctggccgtgcgaatctgtgctgtggtgtgtcggacacagggtgataggccactgctgagcaaggtgagcgtggcccaggcccaggctgtgaccctgcctgccacacgccagcccagtcccagtagtggtttgccaagggcccctgagccgtctctgggcagagaggacaaaatccttaggggggtcgtagttgcctctggggaaactactgggtctgaccgtcttccctctcctgcaacccttccagaatccctcccacaccaagagcccctgcccctgtgctcagccccacgctgggtagtaccagggcccagg

SEQ ID NO: 717 - DNA, 1740 bp, Homo sapiens
cccagcggttgccaaagctgtgtgaggaggaggaggaagtgagaggaggaggccccgggcaccatggcccaggccctgggggaggacctggtgcagcctcccgagctgcaggatgactccagctccttggggtccgactcagagctcagcgggcctggcccatatcgccaggccgaccgctatggattcattgggggcagctcagcagagccagggccgggccacccacctgcagacctcatccgccaacgggagatgaagtgggtggagatgacctcgcactgggagaaaaccatgtcccggcggtacaagaaggtaaagatgcagtgccggaaaggcatcccgtctgccctgcgcgcccgatgctggcccctgttgtgtggggcccatgtgtgccagaagaacagccctggcacctatcaggagctggcagaggcccctggagacccacagtggatggagaccattggcagggacctgcaccgtcaattccctctgcacgagatgtttgtgtcgcctcagggccacgggcagcaggggctcctgcaggtgctcaaggcctacaccctgtatcgaccggagcagggctactgccaggcccaggggcccgtggctgctgtgctgctcatgcacctgcccccagaggaggccttctggtgcctggtgcagatctgtgaggtctacctccctgggtactacgggccccacatggaggctgtgcggctggacgccgaggtgttcatggccctgctgcggcggctgcttccgcacgtgcacaagcacctgcagcaggtgggcgtcggacccctgctgtacctgcccgagtggttcctgtgcctcttcgcccgctccctgcccttccccacagtgctgcgtgtctgggatgccttcctcagtgagggtgccagagtactgttccgtgtggggctgacactggtgcgcctggcgctgggcactgcagagcagcgaggggcctgccctggcctcctggagacactgggagcccttcgagccatcccccccgcgcagctgcaggaggaggccttcatgtcacaggtgcacagcgtggtgctgtcagagcgggacctgcagcgggagatcaaggcccagctggcccagctgcccgattccgcgccgggacccccgccccggccacaggtccgcctcgccggggcccaagccatctttgaggcccagcagctggcaggagtgcgacgaggcgccaagcctgaggtgcctcggattgtggtgcagcccccggaggagcccagaccaccgcggcggaaaccccagacccgcggcaagactttccatgggctcctgactcgggcccggggcccccccatcgaggggccccccaggccccaacgaggctccacctccttcctggacacccgcttctgagaggaccatggacttagtgtcccccagtctcaattgcctgatggctgatgccagcccggcaaataggcaccgcactttactcttgggactcggggacttggcttccttcctggcaaggaccaggcagtggggaaggaggaggtcctccgtggtacatactgggtcaggcactagcatggaggagggtcacagagtggggcacgtgaggacccatggaaccgtcctggtgcccaggccctcacaagtaccaaagccagcaccaaaggagtcagggaaggggttggctgagtcaagggaccccagagggcaccaggaataaaatcttcttgaacagat

SEQ ID NO: 718 - protein, 440 aa, Homo sapiens
MAQALGEDLVQPPELQDDSSSLGSDSELSGPGPYRQADRYGFIGGSSAEPGPGHPPADLIRQREMKWVEMTSHWEKTMSRRYKKVKMQCRKGIPSALRARCWPLLCGAHVCQKNSPGTYQELAEAPGDPQWMIGRDLHRQFPLHEMFVSPQGHGQQGLLQVLKAYTLYRPEQGYCQAQGPVAAVLLMHLPPEEAFWCLVQICEVYLPGYYGPHMEAVRLDAEVFMALLRRLLPHVHKHLQQVGVGPLLYLPEWFLCLFARSLPFPTVLRVWDAFLSEGARVLFRVGLTLVRLALGTAEQRGACPGLLETLGALRAIPPAQLQEEAFMSQVHSVVLSDLQREIKAQLAQLPDSAPGPPPRPQVRLAGAQAIFEAQQLAGVRRGAKPEVPRIVVQPPEEPRPPRRKPQTRGKTFHGLLTRRPPIEGPPRPQRGSTSFLDTRF

SEQ ID NO: 719 - DNA, 1680 bp, Homo sapiens
gacaagcattggcagctcctgggtcacaggtcaccccacagggctcccagagatccctagggccaggagctgggttcacctgggtagcctggagggtggcagtgtgggccttgggtaacagctgcccagcgtctggatacctgtgccatgcacccccaggccgggccacccacctgcagacctcatccgccaacgggagatgaagtgggtggagatgacctcgcactgggagaaaaccatgtcccggcggtacaagaaggtaaagatgcagtgccggaaaggcatcccgtctgccctgcgcgcccgatgctggcccctgttgtgtggggcccatgtgtgccagaagaacagccctggcacctatcaggagctggcagaggcccctggagacccacagtggatggagaccattggcagggacctgcaccgtcaattccctctgcacgagatgtttgtgtcgcctcagggccacggcaggggctcctgcaggtgctcaaggcctacaccctgtatcgaccggagcagggctactgccaggcccaggggcccgtggctgctgtgctgctcatgcacctgcccccagaggaggccttctggtgcctggtgcagatctgtgaggtctacctccctgggtactacgggccccacatggaggctgtgcggctggacgccgaggtgttcatggccctgctgcggcggctgcttccgcacgtgcacaagcacctgcagcaggtgggcgtcggacccctgctgtacctgcccgagtggttcctgtgcctcttcgcccgctccctgcccttccccacagtgctgcgtgtctgggatgccttcctcagtgagggtgccagagtactgttccgtgtggggctgacactggtgcgcctggcgctgggcactgcagagcagcgaggggcctgccctggcctcctggagacactgggagcccttcgagccatcccccccgcgcagctgcaggaggaggccttcatgtcacaggtgcacagcgtggtgctgtcagagcgggacctgcagcgggagatcaaggcccagctggcccagctgcccgattccgcgccgggacccccgccccggccacaggtccgcctcgccggggcccaagccatctttgaggcccagcagctggcaggagtgcgacgaggcgccaagcctgaggtgcctcggattgtggtgcagcccccggaggagcccagaccaccgcggcggaaaccccagacccgcggcaagactttccatgggctcctgactcgggcccggggcccccccatcgaggggccccccaggccccaacgaggctccacctccttcctggacacccgcttctgagaggaccatggacttagtgtcccccagtctcaattgcctgatggctgatgccagcccggcaaataggcaccgcactttactcttgggactcggggacttggcttccttcctggcaaggaccaggcagtggggaaggaggaggtcctccgtggtacatactgggtcaggcactagcatggaggagggtcacagagtggggcacgtgaggacccatggaaccgtcctggtgcccaggccctcacaagtaccaaagccagcaccaaaggagtcagggaaggggttggctgagtcaagggaccccagagggcaccaggaataaaatcttcttgaacagat

SEQ ID NO: 720 - protein, 394 aa, Homo sapiens
MHPQAGPPTCRPHPPTGDEVGGDDLALGENHVPAVQEGKDAVPERHPVCPARPMLAPVVWGPCVPEEQPWHLSGAGRGPWRPTVDGDHWQGPAPSIPSARDVCVASGPRQGLLQVLKAYTLYRPEQGYCQAQGPVAAVLLMHLPPEEAFWCLVQICEVYLPGYYGPHMEAVRLDAEVFMALLRRLLPHVHKHLQQVGVGPLLYLPEWFLCLFARSLPFPTVLRVWDAFLSEGARVLFRVGLTLVRLALGTAEQRGACPGLLETLGALRAIPPAQLQEEAFMSQVHSVVLSDLQREIKAQLAQLPDSAPGPPPRPQVRLAGAQAIFEAQQLAGVRRGAKPEVPRIVVQPPEEPRPPRRKPQTRGKTFHGLLTRRPPIEGPPRPQRGSTSFLDTRF

SEQ ID NO: 721 - DNA, 1793 bp, Homo sapiens
ctgggctggtggggacaggggcagggcttggggctgggtctccggacagaggcctggcttttctgtcagggcagggcctagcccctgcccccataaaagaggagacatagggggcttggtgagataccctgaaacctcccccctctgaccccgcaccttgaccccagtcatctaggaatctggatgttatcaccttgaccccacgactcctgattctgaacttggggactgcgaccccaaccccaaagacccagaaacccaggacttgaactttgggacactcccaacccttggccagtgaaccccaaccctgtgaccttcaaatctaacaccatgagccctgtgatttccaacaccctaaacccctcagcagaccctgtcttgggcagaggagggggcttttgggaagggcttccaggaactgcgcaggttaggagtggccctgagtgcaggcccctgtggtgcccaggccctccccttcactcctttcccctgtcctgccttctcctccacggtcccttccttggtgagcacttacaggcctgtgccctgccccttccccaggaggccttctggtgcctggtgcagatctgtgaggtctacctccctgggtactacgggccccacatggtgagaggctgacatgggggctggaggaaggaggggcaggggcccggtgagtgggtgggggtctggggactgagggaggttgagcctgggctctgggggtggcggtgctggcctgctgatggacgtggccacaggaggctgtgcggctggacgccgaggtgttcatggccctgctgcggcggctgcttccgcacgtgcacaagcacctgcagcaggtgggcgtcggacccctgctgtacctgcccgagtggttcctgtgcctcttcgcccgctccctgcccttccccacagtgctgcgtgtctgggatgccttcctcagtgagggtgccagagtactgttccgtgtggggctgacactggtgcgcctggcgctgggcactgcagagcagcgaggggcctgccctggcctcctggagacactgggagcccttcgagccatcccccccgcgcagctgcaggaggaggccttcatgtcacaggtgcacagcgtggtgctgtcagagcgggacctgcagcgggagatcaaggcccagctggcccagctgcccgattccgcgccgggacccccgccccggccacaggtccgcctcgccggggcccaagccatctttgaggcccagcagctggcaggagtgcgacgaggcgccaagcctgaggtgcctcggattgtggtgcagcccccggaggagcccagaccaccgcggcggaaaccccagacccgcggcaagactttccatgggctcctgactcgggcccggggcccccccatcgaggggccccccaggccccaacgaggctccacctccttcctggacacccgcttctgagaggaccatggacttagtgtcccccagtctcaattgcctgatggctgatgccagcccggcaaataggcaccgcactttactcttgggactcggggacttggcttccttcctggcaaggaccaggcagtggggaaggaggaggtcctccgtggtacatactgggtcaggcactagcatggaggagggtcacagagtggggcacgtgaggacccatggaaccgtcctggtgcccaggccctcacaagtaccaaagccagcaccaaaggagtcagggaaggggttggctgagtcaagggaccccagagggcaccaggaataaaatcttcttgaacagat

SEQ ID NO: 722 - protein, 216 aa, Homo sapiens
MALLRRLLPHVHKHLQQVGVGPLLYLPEWFLCLFARSLPFPTVLRVWDAFLSEGARVLFRVGLTLVRLALGTAEQRGACPGLLETLGALRAIPPAQLQEEAFMSQVHSVVLSDLQREIKAQLAQLPDSAPGPPPRPQVRLAGAQAIFEAQQLAGVRRGAKPEVPRIVVQPPEEPRPPRRKPQTRGKTFHGLLTRRPPIEGPPRPQRGSTSFLDTRF

SEQ ID NO: 723 - DNA, 47124 bp, Mus musculus
  misc_feature (1)...(47124): n = A, C, G or T/U
ttttcctaccaggcatcagacagccaccacattctcctaagaaccagataggtcaacagcaaccaaggaacaaaacactcactcaacaaagacaagaccagatatcagcacctagtgctacaatcttcccaaacccagatgccgagacaccagcataataacacagcatcagccaggacaatatgtctccactagagccaaaccaccctaccacagcagccctggggaactgcaaaccaactgaagcacaagaaaaagacattaagatagcctttatgagtatgatcaagaaaatgaaatatcctttaaagacatctatgaaaacacaaacagtggaagaaaatgagtaaaacagcttaagacctggaagtgaacatagaatcaattaaaaaaaaaacctgagggaaatctggaaatgaaaaatgcaggaactcaaacagaagctcaccaccagaacacacaagctagaagagagactctcaggtgttgaagatatgatacaagaaatggagcctcaatcaaagaaaatgctaaaccaaaagaaaaacaaaatcccagcacttgggaggcagaggtagacagctgtctctaagtttgagcccagcctggtctacagagttccaggatagccagggttgcacagagaacccgtcttgaaaaaatcagaaacaaaacaaaacaaaacaaaacaaaagaagagaagacaaaatgaaatggctcatacatttgaatgcctctgaggcacaaagcttttatctaccaagctgctttgtaaagtaatccttgtgttactcaaatgctgatttctctgccttcatagcctgtttcaatccagacatagcatttgtaatgtctgactcaagtttgtgtaaacagttcttatcatttattttctgccttgtcaataaatgctgatcacccaatggctgggcagaaggaagaataggcctggatatctgcctgccagagagagcagaaaaggagagagggagactgagataagccaggaggatgaagaaactggagccatgaggaaggggtccagagagagcacagaaacatacctgaagctccaagagcaagactgtattagtcagggttctctagagtcacagaacttatgggtagtctctagatagtaaaggaatttattgatgacttacagtcggcagcccaattcccaacaattgttcagtcgcagctgtgaatggaagtccaaggatctagcagttactcagtctcacgcagcaagcaggcgaaggagcaagagctagactcccttcttccaatgtccttatattgtctccagcagaaggtgtagcccagattaaaggtatgttccttaaactcggagattcaatcttctggaatccatagccactatggctcaagatctccaaaccaagatccagataaggatctccaagcctcaagataagggtcactggtgagccttccaattccggattgtagttcattccaaatattgtcaagttgacaaccaggaatagccactacacagaccaataagaagaagcagtctattggggccatggctgggaggcagccagattagggattaagatcatttagctgctcagagatttaggtacacttttaaatacatcttggtttctctgtttttttttttttttggggggggaggctagcataaagtagagaaatacaggcactggattagttaacgaagtacatatattaaaaataatttgtgggctggagagatggctcagtggttaagagcactaattgctcttccagaggtcctgagttcaattcccagcacctacacagtagctataatgggatctgatgccctcttctgtcctgcagacaaatagaaagacagagcactcatatacataaataaataagacaaaatattaaaaaagcattgctaaaaaaaaaaaaaaaagccgggcatggtggcgcacgcctttgatcccagcacttgggaggcaggggcaggtggatttctgagtttgaggccagcctggtctacagagtgagttccaggacagccagggctacacagagaaaccctgtcttgaaaatcaaaatcaaaaacaaaaacaaaacaaaacaaaacaaaacaaaaaaacaccaaaaaaagaaaaactttaatttgttttattccccctatctctgtcactccacgctccctacagatctgcatgtagaactcgcagcatcatgtctgtctggatgtagaactctcatcatcacgtatgtctggatgtagaactcgcagcatcatgtctgtctggatgttgccatgctttccacaatgatgacaatagattaaatctctgaaactgtagccagccccaattcaatgctttcctttataagaatagctgtggttatgatgtttcttcacagcaagaaaacactgactaagacaaaggcacagaaagtattttcaacaaaattatagaagaaattttccctaatgtaaagaaggagatgcctatcaaagtacaagaagcacgcacaatgccaaatagactggaccagaaaagaaagttctctcagcacataataattaaaacactaaatgtatagaacaaagaaagaatattaacagctgcaagggaaaaagactaagtactatataaaggcagacctattagaaatatacttgactgagactctccagaagggccagggcagatgtgctgcagactgaaagagatcacagatgccagtccagactgatgtaccagcaatcacaatagatggaggaaataagatatttcatgagaaaaccaaattaaagcattatctatctacaaatccattcctacaggaagcactagaaggaaaactccaaactacagtggtaaccacatccaaaacaaaacaaaacaaaacaaccaacccccccaacaaagactaaataatcccacacaagcaaatcaagaggggaacacacacacacacacacacaccctacaacaaaataacataaatcaacaaacactgcttattgctacctttcaatatcaatggtctcaatctgcatccccacctcaaacacagactaatagaagggatgcaaaaccaggattcatccttttgctgcatccaggaaatacacattcacttcaaggacagtgtcacttcagggtaaaaggatggaaagatattccaagcaaatcaatctaaaagaaagctggtataataatttttttaaaaaatggttctttttttaaaagatttatttattattatatataagtacactgtaactgacttcaaacgcaccagaagagggcatcagatctcattacaggtggttgtgagccaccatgtaggttgctgggatctgaactcaggaccttcggaagagcagtcagtgctcttacccgctgagccatctcaccagcccgtataataattttaatatttgacaaaacagactttaaaccaaggctgtctttttctttttttcttttttttggagacagggtttctctgtgtagccctggctgtcctggaactcactctgtagaacaggctgaccttgaactcagaaatccacctgtctctgcctctccagtgttgggattaaaggcgtgtgccaccactccccagcaaccaagactgtcttaagaggcaagttcacagtactaagggcctacattaaagaacaaaacaaacaacaacagcaacaacaaaactggaaagatctcaggtgtaacagcatacctgaaagctctagaacaaaaataagttatcacacctaaaaggaataggcaggaggaaataatcaaactcatggctgaaatcaataaaatggaaacaaacaaagaaacaaacaaaacaatacaaagaatcaatgaaacagggagttggttttttgagaaaatcagtaagcctggcaaagccttatccaaattaactaaaaggcagagaaagaatatctaattaataaaatcagaaatgaaaatggaatgtaacaacagacactgaagaaatccaaagatcataaggacatgctttaaaaatggtgcctacgaaattgaaaatctaaaggaaataaataattttctcaatatgtaccacttaccaaagttaaatcaggaccagataagcaatttaaacagaccttaactcctacagaaacatccccccaaaacaaccaaaaaataaaaacaaagaacaaaacaaacaaacccacaaaaacataaaacaaaaacacacaaaaaaaccaaaaccaaaaaacatgcccagggccagaattctaccatactttcaaagaattaatgccaacacttttttcaaattattccacaaaaacagaaatagaaggaacactgccaaatttgttttatgaggccacagttatcctggtactcaaaccacataaagaatcaaaaacgaaagagaattacagaccatttcccttacacttccaaacagaatccaagaacacatgaaaaagatcatctgtccaccatgaccaagtaggcttcatcccagagatgcagggatggttcaacatacataaagtgaaaaacataatccaccatataaacaaatgatcctctcattagatacagaaaagacctttgacaaaagtccaacaccccttcatgataaaagtcttggagagattagggatccagggaacacacctcaacataatgaatgtaggttacagcaagcccatagccaacaacaacttaaatgcaactcaaagcaattctactaagatcaggaacgagataaagttggtcactttatgccttttcaatataatgcttggagtcatagctagagcagtaagacaactgaaggagaccaaagggatacaaatcggaaaggaagaagtcaaagtatttctatttgcagatgatatgatggtatgcatgagtgaccctaaaaaattcctcagggagctcctacagttgataaatactttcaacaaagtagctgaatatgaaattagctcacaaaaatcagtagccctcctatatacaaatgacaaacagactgagaaagaaaaaaaaaaaaccacacttcacagtagcctcaaataatatgaaatattttggagtaactttaaccaagcaggtaaagactagtatggtaaaactttatccttatccactgaagaaggaaactgaagatcttagaagatgaaaagatctcctatgctcatgattctgtaggataaatatagcaacaatagccactctaccaaaagcaatgtacagattcaatgctattcccgtaaaattttcactacaattcttcacagattgtgaaaggacagttttcagtttcatatggaatgacacaaaaattcagagaagataaaacaatcctgaataataaaagaactgctagagatattatcatccttgatttcaagttgtataactgtagtaataaaaacagcatggtactggcacaaaaataaacatgttgattaatggaattaaattgaagacccagatataaatctatacacccacggacatctgatttttgataaagaagccagaaatactggacaaaaagacatcatcttcaacaaatggtgctcaccaaactggatagaggcatgtagaagaatttaaatagatccataattatcaacttacacaaaactcaagtccagatggaccaaaggcttcaacataaaatcagataaaggactggagagatggctcagtggttaaaagcactgactgcccttccagaggttctgagttctattcccagcaatcacatggtggctcacaaccatctgatgagatctgatgctctcttctggtgtgtctgaagacagctacagcgtactcatataaatagaataaataaatcttaaaaaaaaaacccagataaagtggggataagccttgaactcattggcacaggaaaagaccctctgaacagaacactggtagtgcaggcattaagatgaacaattaataaatgagacttcatgaaactgaggtacctttgtatggtaaaggatattgtcattcagacaatgcagaacctacaaaatgggaacagatttttttatccagtacacatctggtagagggttaatatccaaaatatataaagaagtaaaaacattaggaatgaagaaaacaaataacccgaatcttcaaaataggaaactcaatggatgagaaacacagaaagaattgttcaatatccttagccatcagggaaatgcaaatcaaaactatgttgagattcaatattacgtttgtcagaatggctaaaagaaataaaacaagtgccagacagctcgtgctggctagggtgtgcagtaaggggaacactcattcattgctggtgggagtgccaacctatacagccactccatattatcactgtggtggttccttggaaagaatggagtccatcaacctcaggatccagccataccactcttgggtataaactcaaaggacactttatcttaccagaaagacacttgctcagccatgttcattgctactctcttcataatagcaagaaaatggaaacaaccaaatgtctctccaaccaagaatacataaagaaaataaaatgtgatacacttacacaacggagtatgcctttaaaaaaatggactcggccattaaaaaaagaaaatgaaatcatgaaatttgaagataaatggatgaaactagagaaaaaacaaaacaaaaccctgagtgaggtatttcagacctagaaagaaaatatggtattcattcacttatatgtggatattagttagggtttgattgctatgaagagacaccatggccattgcaactctttaaaggaacatttaattggggctggcttacagttcagaggtttagttcattatttagttcatggcaggaaacatggtggcatgcaggcagacatggtgatggagtaggagctgagagctctacatcttgattcgcaggctgtaggaagagaactggtttgagcttctgagacctcaaatctaccctatagtcatggatcccctcaaacaagaccacacctcttataagtgtcattccctatggattatgggggcttttttttttctttcaaaataccactttagctgtcaagttaaaaataaccaagctacaatcagaagaactttcttactctgctctggacacttcttgatgcctctggttaaattcttccttatatcaataataaaacccttctcctcatccatacataggaatgggactaggtgggatagagatttcttcaggtaagggaaatagaatagatagctatggatggatgggggtctggaactggagggtcaagtggagaggagagggtagagggagatacgggaggggatatagggatatagggagagacagctaaaattaaggaccatttgagaagtagtatggaaaccttatacagtaaaaacttcctaaaatacgtacatatatggaggcaatctaaatgaaactgtcaaatagcggggaagacagaaccctaactggctatttcttgtcaccaaatgaagcttccagtactggaattgggttacatctaattggattgttggtcaaagggacctcaaaggaattcctagacaacttgggtcgttgccaagactacaggttgctctccattaaccaatggcaaggccccattgctgataacacttacaagcctcgttgaacatgaagaagttgagctgatgcctaaatagagccttcactagtatattctagcatctttggttcaggaacgtactttgtatgctaccaaaagaaacataaacacaaatccagccataaactgatggaccagcctgacttcgttttaagattagaagccacttaactggtgttgaatgcctttaatcccagcacttgggaggcaaaggcaggtagatctctgagttcaaggccagcctggtctacagagtaacttctaggacagccaaggattcacagagaaactgtgtcagagactgccctctcctgcccccaaactaagttcattcctgatttctgtaaaaattgggcttgactatgtcttgacccattttttggaatttgacatattccacaccctatataccctgacctccactccatgataagatcctctgaaaatcccccaacccttgaaaccttcctagtcttgcagctatataaatcccaccttctcttgtatttgatgctgttctttcaaaccctactttagggagacagtcctgtatgatagaaaataaagcttgcttaattcaattacagaatttgggtaatggtctttactctcttttggtggtgtcttagttagggttttattgctgtgaacagacaccatgagcaaggcaagtcttataaaaagcaacatttaattggggctggcttacaggttcagtggttcagtccattatcatcaaggtgagagcacagcagcatccaggcaggcatggcacaggcagagctgagccttctatgtcttcatccaaaggctgctagtggaagattgacttccaggcaccaagggtgagagtgttaagtccacacccacagtgacacacctactccaactaggtcacacctccaaatggcgccactccctagaccaagaatatacaaaccattacaggtgggatcaacaaaaccctacaatggtgtctgcctgcaaggtatgttggggcaatagtggcacaaacctgtggcagtaaccaaccaatatctgatttgacctaaggcccactccacaagatcgaatcctgcttgggtgaacaacaatctgagacaagatagctcagggacctagggttaaactaaatactactgttctactaaaggaacatagcaataaaatgactcctagtgattgacattctgctacactcagatcattgccttgctcagccatcatcagagaagcttcctcctgaagcagataggaacaaatacagagactcacagccagacagagtttgcacagctctgcatcaggttcttgcatatatgttatggcttccagtgcttttatggaattcccgagtgttcgaacaagtgggtctctggtctttgtgccttctcttggggctttttttctttgtttcatccaattcagatatgataggttttgtattatcttatgttttacatcttagtttattattatcccttagaagtctgttttgaaagggagtggatacagatggaaggggaggttagaactgggaggagcagagggaggggaactgtatcaggatatagtatgtgagtaaagaaatctattttcaataaaaggaaaaacaatttaaaaataaataaaacccctctgtttaatctgtccagggacatttgtagtttcgcccacctcttggctactgagaatgattctataaagaaggtggaggtgttttattttacaggtggtggtgacacaccttcaactcaagactttacctttatatgtggccagaaaaattctccgttgtatgtggcgtccaatctggagggtacttagcaaacacttccgggtgacaatcggaggtctaaggaaacattctgtaactatatgcctgactgctcttggagggaaggctctgtgagatttgcaatgtgtttctttttactactgcaaagtagcagagctgtcattccgaacgcagaagcattccggacttgaaacgaaccaagcggctggctcgaagataaataggcatcctccccaaccaagcctgccttcgcagtgcacgcagggacttgtaattcgtcgcaaccacttcctcgccgggtagattgccgcagcttccggaagttggggcgtgttaaaagcgtcaacgttcttctccccgcctcctagtcccacagattgacagcactaacagccagcagataagcggactcgtgcgtcctgttacgtgattggtttggagttttgtaaccgcccagacaaacttaaggggaattggttgagccacaattttgaaaatcgtagattcgcccgcgctcttcgcccggtaggtcctcgcctgcggcgagctcgcggtactgggagtccagccggtccggcgtggcgggaagcttaatctgcggaagccgcggactggaaaaggagtggtccgggaagacgcggcgccgccgggtgagtgagaacgggcgtcgggagtcgcagggtcgcggtgttcggccactggtcccggcctcttcgcttcccaggatgggccaggggagtcactttcgcctatgggttgcttatgggtgtggggatcacttccaatggttctaggcttggagatgaacttcgaggccctgcacttgagtcctgggatccgagaatggtcagtcctcttccccgcacgccgggcctaacacctgtgcagagcctgggctgctctgtaaacccggacttgagtctttttatggcaacggctgctcagcttcgtcccagctgagcagcatttaaaaactgacccagctccggagaccgccctgctacttattttgtcatccccgcaagcgtaggctcttgtcagcggcgcagttccctccagcttcctgctgccaagcgttgggattgtgtcattctgagcttgaaactattgtcctggaggcctgtggctagtggttaaaaaacattttaaatccaggctccgccctccgattttcttggtgactttgacctagatttgtatgtgcatgggtatcttggagtatgtggcaaaaaggaattgagaggtttcttggcatggagtaggactcttgagtggaagagcagttttagcgatcgatcttcctgcttggaggggtgtgtgtggggagaaatgcttagttcatttcctgcacccccagaggagatggcaattgctaatctgctgaatggcacagaaatagtatttgtggagaggaagtgaccttccttctcccatggtagggtttgtttatttcgtggactgaaggtgaagttacccaggagtctgattcttgttacacctcctcctttcctcagagtcaccttttctaacttttcagcgagggcttgctagaaagcacatttccccatggaagaagaagtgtggtattggacttggtgaaagaagcgctcactccgattgtagcatgagcagacattttgtaaaatttcccatttgttactttcttatagctcctctgcaagtctttggagtccttgtgcagttttctcttctctttgctggccttgaactgatgaggccttggacttggctagggctgttttctggtgcagggggatagggagactcagtggagaggccatgctgatgagtagctggctgcacagttaatgctttttcctaaaggctcagtgcccctatccattcggttttgccccagttagtgctgcctttggccgttaggtcagggtgtgttttggcctgttctaacatgtgcctactgagttgctcactgagtgtcccagtgtgtgatggtgagacaacctttaggattagttgatggatgaatgaattcattccacaagtgccagactcttttgttgctgaggaaggcacaaggcttaccctcagagagcaggttagtgggtagaggccagcagtaggcaaacataaacaatcactcatttgctgtgcacatagctggaatctgtgtgtgagatcttggcttggattggaggtctgatcctccttaaggagctgaaagctaagtgaagaagctgtacaaaacaggagacagagttcctagaggccagaacttgtttgaagggcaaaagggtagtgtgcctcatacatcaggctgaagaacttcaaggaagaacctagaggccacagtatatgatggcattatgttccaagaggatcagtaatatagccctttcttccctgacctttttctgtagctgagaggctgaagtgtgtatgcatgcttcttgcttttgaaagtgtaagtcatggtgggaacttcctgtccttatataaggtgggatccgatatattagtgctcatagctgccacccactcttgatctttcatgtgtttaccacttggggtactgcttatcgggggccctgatatgacagtatcagaatcctcccacttagtgtaggacctttgttaggattatatagtcaggtcgtacggcagatatccaagctcccagctttttaaggcagtgggtaaactggcactgcattgtcttttgcctggtattgacagccaggtcttcctgaaagcagcacattgcatgcgcactcacttcgctctccctcatccattcataggacattttggctttagggagggtttcagaggtctctttggagaacatggttctggacccctcatttcttatgcattcctgtggaatgtatagcacatttccatctactgactcccccccccccgcccccaaattaaagacagggtctcatgtagtctaggttggccttaaacttgctatgtagctaggcataaccttgaaatgatcctcctgaatttctcaaatgtttgggaccatagaacgaactatgctcagctctagtgtctatttacttgtttacttgtatagtgtgtgtgtgtgtatatatatatatatatgaacatgttgtgtgacaaagctttacctggggagatgcaacacacactccgtttacccctagataggaacccacagtagaccaaagtatggatacccaccaccaaagtccaactttgtgaaccagtgaaatgttttttgttacttacagtagtatcagtgaggggttacaggatgaagggcaaaggtagtatgccccacaaatcaggctgaagaacgtcagggaagaccctagaggctacgtgtataagggcattaagtttcaggagcagaactaacttgtaggagcagaactgactcaaagacagctgcatcactaaggcccaccccagcattggtaacagctcataaaaactgggaaacttgcagcataatgcacagcctgcagctagctttaacaggctagagtgtcctttctaagtgacattgacatagtcagtctaaacctcgtccaaaagcttggttggtttctgcttcttgcagctcagcttgtttgagaatcttctttgcaactgggcttgagagtcgtctttgcagctcagctctgcttgtctgcgagggactctcagtttttttttttttttttttttccgccccaccccggactctcagtttttatttgctgactctggctgggaggggcctagtgaacttcagggacttcctgaagcttttttgagttgttgactttcctgtttaaggagcttccctgtagatgaaatggttcattctgggaggaaagtgttatacaaatgggtagtgtggcatgggttgtgtagaggtctgaggacaacttgaaggagtcatttcttccctaccatgtgggtctcagattgaactccggtgattaggtgtggtggcaagtgccgtaaatctgctgagttgtcctgctcgtcatccactgtcatcttaaagaggcagttggacttggtgtcttgatgacctagtgtctggggtcaacacaggatggctatgtcttagttcccatctatgaggagtgggaggagagcccacaagaaggtaaacgggtctgtacttgggtaaagagagagaggatgacggcatggtgtttctccttgattcagggaggtagtgcatggtcatatgaagtccttgaaagaaggtttgtaaagtttatatcagaattgtttaggaagggtgggcctgtaaggacagtcatactctgtgtttgtattgggttgagagggtgtcaagagatcgggattactgtaacgtcatttctttttgtgaaggtgagaccattgggttggcgtttggagctgtacaagtggctctgtcctaagagatgcatggatttaggtacagggtattctgtgtgattgtggatctggcagactttccttggagaaggtcctggttaccagccctgagttcttatgctttttgtctctgccttcaccagacagtgccaccatggggaccacagccccagggcctatttgccttctggatctatgtgaccagaaactcctggactttgtctgcaatgtggacaacaaggacttcatgtggctcaaggagattgaggaggaggctgagcgcatgtttatcaggtaaaggcaggggcatgctggggtgggtgtctccataggtcagggttccttcctaagtgcctcatgtgctggggccaacctggtgcagtgaccagaagaagaggagactgagtctttttcctggctcactgtggtaagctgtgtctgagtgtatggcctgtggtgtcttgtcttggaacttacttccctgctttaagttcacgaggaagttctctgagggcccagctgctgatttcacagagctttggagagcttttctctagcctgacttgtcattgccgagaatggggtggaatgtagtctaataagagaaggggcagcccagtagttcccagggagcctcatgttcaccctccttgtacttacagagaattcagcaatgagccagagctgatgcccaaaactccttctcagaaaaaccgtcggaagaagaggcgggtgtctaacattcaggatgaaaacagagatcccgtgaggaaaaggtaggaaaggactgggaggctgtgctggaggatgtctggagccttggaagctcctcaatgtgctgataggagcagcagctggaggcaatagtgatttgtggcccacgctgactctgacagttgagatgccatgggtaaaatgaactgttaacccagatgagagtacaggtgtagatttctgtgcattggtgctgcgggtggaggcagggagttaggggtttggaagaggggagaggcaccagagttgtggcccaggttgctggttcttacctctgttattggatttgttattattctctgcaggaatggtggtgactgcagcactcagataaagatgctagtcattctaatcaggcagccctggtacataacatcaaccacagctggctcaacagctgtgtgtccttgggatgaaatccgcatctccattttctcatcttccaagctgagtgaatggtgcctgcctcccagggccattatctcagtcctgtagactgagcatgagtgaagtttgcagaaagtgcttagcacagtgtaacaacagttaagaaggtggtgtgaatttagtcttcccagcagttctgtgagtaaaggaactcactgtcacttgcagagttcacttaactctcaactgtccacagatagttggggagacaggctcagagaggaacaactggggtctcatggctagaagtggtaggctgctctggaccttctgctcgttcatcgttggagctggaggctactaaggagactgatgtactctagaattattttagggcgcctcttgctttgggttgtctcagtctctgtcctgttgccctaacaggttatcccgcagaaagtctcggagcagtcaggtgggtacccggcacctccgcagcaagcccgttactattgttgaggagaatggcttccctgtgttgcagcggataacccgggccacagctgcagcagcggcagcagcagcggcagcgtctgtggcatcagcttcttcctcttccactgctgggtctcccacagtgctgaccaagaaagcagtggtggagataagcactagtgaacgactgagtgcagaactacaactcactaagctcaaaggtagccttcctccatctccagtttcccaaggcaccctgacatcagaggaggaactaacacccaagaaatcagaggctggaaagctggactctgtcacagtgaactccctcaaggctacccctcagagccccaagaaccgaggggttggggaaggacgttctgtttccaagctcaagattgctcgggcctcctgggggctgcaggactctcctggctctacagactcaccatggcaagagcgggtgctttctcctatcctgctgaataacatcttgcccacaacagccaagagccctcttgggaatattcggtcagtgcggcgaagcctgatttcccaggattcccaagtgccactagcctcgaagtataatttggtggccaaacaagaaaatggcagtcgcagatcaagcagaaggattgccaagaaggctggcaaagagccagaggcctctgctcgaatcatttgtgagtgtggggcagttgtggggtgatgatatggtaggtggtccctggtgtctgctcagctgggatgcttccattgacatttcagtgatataaatgtttctcatgtgaatctactgaatggagccactagccactagccgtgcctggctattgaaaatatatatagtctgatggagaagctgattcctcctgccaccccatccccccagcaaagcaaatccccccagtcttgactactgagcaatatcccctagctcttatgtttttgagatgggcttctcccttgtatagctcaggttggctttggactcaaagtcctcctgtctctgtacctctaatattaggattacaagtgtgtactacaaaggagctgaattttaaggtgtttttttttagattaatttatattatgtatgagtgctttatctgcatgtacatctgcgtactagaagagggcatcagatcccattatagatggatgtgagccaccatgtgattgctaggaattgaactcaggacctctggaagagcagacagtgctcttaaccatctctccagccccttgtttttctttttaatagtatgtgtatgtatatgtacacacttgctatggtgtgtgtatgtgtgtgtatgtgtgtgcgtgagagagagagagagaaagggagaaagggagagatagataccagaggacaacttgtaagagtcagttctctccttccactgtgtgggtcctgaagattgaactccagtcagtaggtacttttactcgagtcctctcactgttttaagtttcattgaccaatttagacttcaatggctgccactacttggtgactgagatctagttcaacattggtttttgttgttgtttgtttcttttctttccttttccctttcccctttcccctttcctttccttttcttagagatggggtttctctgtatagcctggatgtcttggaactcactctgtagaccaggctgtattagaaatcagatccacctatctctgcttcctgagtgctggaatttaaaggcatgtttcaccactgcttgggtcaacatggttttgtaaataagcctagaatgttggtcccagtgttcctaaggtctttttcccagagttagtatatcccttggtccctctttgctggagtgaccgacttaaacacactatccctgtatttaactcctagtggtgaaactactgtggagatgtgccatatagagcatgtaggctggtacccagtagctgctaggacttatgagcctcagaggcaatcctgagagttggggttggctgcctgaggacccgggtgctagtaagatttttggaggatggttgtatccaacctacatggagagaatgtatagcactagcaatcctaaccaaaggaaaggatttcacaaagacttggagactccattcagtaagcgatggactgcctggagcttcttgccattaaagcaaatgtagtacaatgatggctgttggaagttcttaggcatcctgcaaaagtgaagaaggagactgctatatcaggtttctacaatttcagggtcagaggacaggttaagtttcatagtaaataggaagtaaatctactatctggctcttgtcagatttacggaagaaattggtctgtgtattttctcctcagagtttatgccttttaacagaagaggaaactgaggtagacaagctgtagagtccagaagtttggatttgagtccacttgcatttcatccaggaaggcaggtgctgaggggctggtgaggcgcccaagggctgggtttgtcgggcacatgaagacaccataccttggaaggttctctttggcctagctttgggctatacgtatagcctggagagacagtgtaggccttgtgcagcacgaggtctggcaaactgtgtctttgattgtcaggtgcctgggatggggtgagtgtcacagctccttttgagttttttttcaggtctgaagctggtcctggttaggtgagccaggagctatgggaggggaaggaggaactggggtgaatctcataaaccctttcatgatttggtgttagacatcagacatgtggttctttttattctttttgttgttgtggtttggttgtttgtttttttttttttttttttttttgcatgaagacattcttaaaaaatttgaagtcaaaatataattacatcattttccctttcccctttctctctctaaccgaattctttcttaaattcatgacctcttttttttaacttgttgctacacacacacatgcatgtatacacacagacaaatatataaatacagcctgctcagtttgtataatgttgctcgactgtacacggtgtaaaaggggaccccttgtattggataaccaattgtggtggggccctcttccccttggtgggggagaaagaccattttttcccagtctcagcattacttcgttgctgtagttctttgttgagggttgtggtccagtgagctttcctcttagaggttggcatgcctttctgttgtcctcattcacttttggtttaggcagccatgctgttaagacttaatggtctcggtagcttctttgacatttctaggagatgtagtctcacctgatagttcctgttctcaggctcttttgactgttttctctcctagtgttcctgagcctcaggggcagaagatgtactgtagctatatcatatatatatatttgtgtatgtatatgtatatgtgtatgtgtatatgtatatgtatatattgtagctgggcaccatatgagatcacttgttctttgcattttgatctgttgtgcttttctgtaatggcttccatctgttgcaaagagaagtttctttaatgatgttgagagctatacttgtctatgagtataagaataaatatttagattgcagttaggaattatattggtttggtaaagtagcagttgtaggttctcctctaagatctatgacctcatcaactctgggaagttggctaggtttctagccccaggtaccatttccctcttgttgagagggccttaggtccaactagagagctgttggttactttcaagatatggatgctcctgttatactttaggattatggtgccacagtggtcattgttatagttcatagattacactaatgggtaggatttcttggttacttacctcttgactacttacatggtactttctggtaatatgaaagctagttagttcttagagagtaagctttcaagtcagattcaacttggatcctccaagactagttttttaagtgcatgtctttagcagtagggacttaactttgaagctctgggagacaaccaagggcaatagcaatatgagtcttggataaccttgaccaataattcaaaagagggcttctcatgcctggtattgagttttttattagatggtttatggcttttgcagggagtctggcagtgcgagtgggaaaattttattcaaattatatatatgtatgcattatacatagatttatatgtattacatgtaatttaggtaaatacatagtaataggaatcttttatgactttttcagacatcctttttattgttttatcctcctttgtctctatatattgatttccttcctcctccttaaatttttcttttcttttcaagacagggttttttggtatagcccaggttgtcttggaactcaaattgtagatgaggctggccttgaacataggtcttcctcctgagtgctggaattaaaggtgtgtgccaccaagcccagctccctctctaaattaagcccctactcacatttcccccatcttcccatgtaatcatgtttagcctgctagtctcttctctgtatctcactcccctccagtacctttttacctccctagtttctacagttactccaggtaacatacccagatttgaagatttggagttaggagctacagataagagaacataagaggtttgtctttctggatgtgggttatctcactcaacataatcttttctagtttcatccatttacttgcagatttcatttttttacggtggaataatattctataccgtatatgtatatcaatctaccaattttatagacatcatggagggactgttggaaaggcttgtcagttggatgagttggtggtgggatacaatctaaagctcccagcagtgtggttccaagggcactgccatctttatgggtgactttacatcccttgaaataagacatattaacacttggctctagcttgttgtcaacattccaaccagaaatttgtataaatggtattgtgtcagggttatagccaatattctttatggatgtactgactcccttaatttccttatgtcttcttgctgtaggatggctttatggaatatgttttgttggcaccaatagttagctctttcacactgagtgtgaaaagtcagaagggcatgctcacaggtctgcccattcttagagactcatcagcattggcagacagtctggatggcacggtcatcctgacacacctgggtgatagtcacataatgagtactggtctcaactcttcacagggatatgtcaatagtgatactatgctcccactcagcttttgtttctccaagaccaaggcatacttaaaagagctatttcctatctcagcagcttccttttcaaactttttagtggtttgtcaattccacatttgtagatgaccagtagtggtagactttcctgaatttacatgtgaaatgattatagtattggtgtctttttctttccaatttttgcttcaaactagggcttcttttctttttttttttttttttttctggtttttcgaggcagggtttccctgtgtagccctggctgtcctggaactcactgggtagactaggctggcctcgaactcagaaatctgcctgcctctgcctcccaagtgctgggattaaaggcgtgcaccaccacgcccggcagggcttgtttttatgatagcaaacttgtagcttttaagcattgctttttccctcccccacagcctttgctgctgctggatacgattctgggttgggtgtaagcagatctgtctaattccaagcccatcagttatctccttgaaataaggaaagatgaagaggcagggaacagaatatgtagtaacagcccccaggtgggtgaccttgggtgcacctcttctcttaacttcagtcttctgtctgaaatggtaatgacattgccttgatggtagttaaagaactcatccttagtgcttggctatgatacatgttcagtaacttatttagacaagctcaggctgactttgaacttgtggcaatccctctgtctcagcatcctgaatgctggggctaaaggtggtaatcattgtgcctgtaattaatacttcctcaaggacagtcttaattgaaactgggcattgctttactgtgtgtgataggatgatagagtgtggtgcagaattctggttgttttgttttgttttgttttgtttttctttttcgagacagggtttctctgtgtagccctggctgtcctggaactcactctgtagaccaggctggcctcgaactcagaaatccacctgcctctgcctcccgagtgctgggatcaaaggcgtgcgccaccacgcccagctatggtgcagaattcttgatggatgtaagcatgtttagcatgctttccttgtttttttgtgctgtttgggctaatgttaatatagtaagaagtcactcttcagtgcagtggcgaaagtagttcagacgtgtggattgcctgaaagggtctcagtatctccagaagcttcatatcctcccttcttccttcctcccgtcctctgtcctccctcacccccccccccccttttttttaaagacaggatttctgtacgtagcccaggctgttctggaactctctatagaccaggctggttttgaactcaagagaacctcctgcttctgcctcctgagtgcaagaattaaaggcgtgcactaccacctcctagttcccctttggttgtctcatcacattgagtctttcacatcagttcagtctccatccaggctttagcctctttaacttggttgtcgcacatgtccttgtttactgtgtaagattatttgatgctggaaggtaaaaagaccagacagtggctttgttggttttccttaccactgaggctgcggcacctggcccggagcccagtacatagtagcagatgaatgtttgttgagtgaataggctgcttgtgtcggggcccgtgtaatgtcagacatttctctttccaaggtattgattcctagcctagtgaagaggtggagctgtgcctgttacgcaagctacataaagctaatagcttcattgaggttctgagggtgaatgaggaagagagccagggcgcagtgagggctgtgtgtctgtgaaaggagcagtgatcgtgctcctgccacaaacttcctgcacctctggcctggctcctgactggtttctgatggcatcttttgtttttgtttgtccttcaggtcacagttacctggagaggctcctgaatgttgaagtgcctcagaatgttgggtaagttccatgctagagcttttacaggggtgctcagggcacattgcaggacccatctctccatggcactgctgacaaccatgctcccttagcttggtccccatgtaaccaggcagcaagcaacatgactgtcaagtccccaggcaacattccatcagcatcacttgttagcctgagtgtgtgaactccatgcttgtaaagaatgtagaacaaccatttaaaatgaggtgtagtagagtggtagtctggggctcgactgctctctgtttccagattagccctatcattgcttgggcctagggcactgacttctcagaggtcatgctgtgctatcacatctagtccttctttactttgaggcagagggtcagtgcttgggatgaggaaatggggctggctggcccctgggtgagtagtgagcaagcatcaaaagagatgaggctttgctgggccctaaagactgggacagagttggataaaatatttgtcttctctgtatcactggagcaatgcctaaaagttattcagcttactgagaaaaatggtttgtcatagctcacagttgtagagctaagccacctatgacctgttggctctgctgctttggggagcagtacatcatgactatgggagtttggtccacaaagctgttcatctcatggctgggacttgaaaggagaaagaaaagaaaggactgtgcccgttattattgccttcatgggcacactcctaataagcatgtgacctctaataagaaagtcgcataacgtttctactcaggaagccatcggtgttagctgctgtcttctgatccagcctaggctgttggtttgtcatccagttctggccgcctaatatcagaggaaacttagacttaagagttctcacagtgctcctgctttgctttcagcctggagcaggagcctgtcgaggtggccgaacctgaggaggcagaagaggagcaagaggtaaggtcacaggccagagatgggtaggacctgagccctccaggtctgaagctctgtgccacgccatcctgagcctcaggatctatgtgggcttcttcaagtcttggttcttcctgtaggtctccaagaacagtgggtgtccctccaaaccccgcagtgccaccaagattgcgattagtacgcccacctcgaagcctgcggccgctggtcagacaacaactgttgaagagcaaggtgagctgcttggtcctgtgtcttgggatatggcactccattttctgatgacctgataggccaaagataaacctgaagagtccatgatcttggctagaggttgctgctgagtgtcacatgagtaagtctagctggctagattaggaaacagggaaggacctgaaggaagtaacggtatgagactgtcatgtgaaggtcttaaagcccactccaaaggattcatgaagacctacaggctggggtctgagtgtctacctggcctctttccctttgcttgtttctgacttctctagttcaaaaagggcagggttcctgtgggttttgggagttggtcgggagcccttgcctggcttcccaggctacttaggctcttggagtctggctcatgtctctctctggagggtaatttccatggtgtgaagaaatggcactgtaaggtttcgagcaaagcataccctttatgaaggggtcagggatagttgtgccagcttgaaagctgccaggactgctgcaaagactcttggagtaaagagtgcttcctcttggtgtgaaataaaatgtactgtgccctgtgtgatgaccccatgaaaagaaccttcatcttctgtcatgtggtaccaattgaaggccaggagaggtgactttagttatagtagagttggcagcttgtcctgtaaggtttttgcacatagtttttgtggtagtggagtggcatgtagattaagacttcagtgatactgtcatgccatttgtgtcacatttgccaaggattagggttggaggatctgatttgggggccagtatcctgggctcaaggccagttactgcttagtttggtgtttttgccattgaccaccctgaggttgtcaggagtggggtttgctcttgctgtagctattgctgctggaccccttccctaaaaccagcatgtataccccaccgccatcactcaaacaacttcactgaaatttctgtcttcacagaagctgagcttgaccaaacagatggacacagagaaccaccccagagtgtcaggtttgcatctggaaaaaggatgtgtaggcagctgtggtctgaggatccgagagggggcttgaatcaagctggggccttgcatagagaggctatgtcggggtgtggccaggcattctgcttcttgactggtgtcactgtttaattttttgacttaacagaagaagcaccttgatgctgtagatgctgtcttgggaatgatcatgtccctctgcagccttggctctgtgacctttcattggccacctaccttttcctgtgtgggcagcaaagggctggtctgcagtctcttcaagtctagagttctgaggcttaagcccagacgtgtttgcaagggtgattttttttttttttttttttaaatgggatgtagtggggctatgacacctctttatgacatgtggccacctgtcctgggtaggaggaaacgcagttacaaacaggcaataagtgaaccggatgaggagcaactggaagatgaagaactgcagccctgccagaataagaccccttccccaccctgtccagccaacaaggtgagtaggttcctgcccttgcttggtgtctgccttgcctgttccatcctgaccccggccctggtctgtaggtggtacggcccctccggactttcctgcacacagtgcagaagaaccagatgctcatgacccccacactggcctcccgcagcagtgtcatgaagtcctttattaaacgcaacactccgcttcgtgtggaccctaaggtaagggagcctgtcccctggctgtgccttgctggaactagggcactgtggttgaaagctctcctaagttactgagggtagtgtgggcttgggcatatggaggtcagacactgatgggcgatcgagttcaagcctctgtggcaagggttgcctcaattctgtggtactgctctgactttatggatcctggactatgactgagaagctcagctgcttggtgtgagccctaggctggaaagtgggaggattggcttagcagacctaacactggctactgtgtccacagaccagtgctgggtgtgacttgagaggaacaggtgacgacacctttactgttgggagggaggatgggcgagatgaagcagcagtgtgttgttggttaaaaaaaaaaaaaaaaggccctgagtagacccactaccgtagataggtgcgtagcccgccctgtaggacatcacttggcattaactcttctgttcttctgtttcctctccacagtgcagctttgttgtaagtaaagcttttccctgtcccttaacagagctgcgcctagttcttaaccatgtcatgctaggtgtagctgacatggaagcactaacattgcaagtgggagtgttaggaaggcagatgtgcacgtgggagtcactggagtcaccagggtaactggtgagaatcaatagttttggagctttgcaacctcccactgtagagattgccctctgcccatcccctgctattgggaggacacaggcaggtgtgacctgcagtgtttttctggcctacagctagaagtgcttcccacagccatctacttcctcattcccagcactggagcttgagggtctgtgaaaagaacagacatgtctctggtccacagagccactgagagttattgggtcatggacctaagcagtagccctgatatgatgtttgatggggtaggactggtaactgtaaacttcggctgggttcattgtgcaaatttcaatgtagctgttggcaagtggcatctggaaacaagaccaaagaagctgttctcttcccaggcacctcagagctgagctgggctgggtcacttgctgtgagcaagagctttggacaactgggacctgagaggagcccacagtcctgtttcctgctcctagttggttgctgtcttgaccagctatggctcagctttttgtcatctgtttaatgatttgaaaatgcacacacatacaaataatgtgggatttttctttaaagttgttttatttgtgtgtgtgtgtgtgtgtgtgtgtgtgtgtgtgaagcacatgctataggatatatttggaagaaagttaaaggacaatttttggagtctattcttctttcatcatatggattcaggggatcaaactaaggttatcagtgttggtggtaggcgcttatgcctgctgaggcataaggtccaggattttatttgaaagtgaaagtcaaaggtagatgctctgcaaggaaggagcagtgggtcaaggagaaagtggaattggtttctagggacagggtacagatggttttctgctctggtcaacttttgattgacagttggaaacttcaacctgtgtaggtgtggattataaatcccatacaggcatgagataataaataaggtctcctcctccccactcccaactccccccaaaaaagttcatactgagaacataggttattgttcatttgaccacagactccaaacagggaattgctagggaggagaaggacactgctttctcgggaaagagttgtatgtggctccagccagaacagctggtcaatactttgttgggaaggggtgttgtatagctcaggtcatgtaggatatcctgaatacaccttcctgcttcataccttgatgcagcctcttgttatagttctgagaagagttacgaaggcatctgaaaggcttttgccttcagctgatggccatggcaggtggaaaggtctcagcagctggccagataggtcctcaacttgtttgtcctctttgattggtcagggtgacagcatgtctcccttacttgcctgtgaagaaggctgaacttgttccttcttcaattggccattcactgcctctcctttatattgcccagggccttgcaggtatggacatggctgataggcactgcaagttgtcctgcctgctttagggaacccaagtccctgcacaggacttctggtgcttatagctgggataccagagcctaacaaggttgaaaggttctgggcatagtaaatgtttctttttatacccgagtagtacaatcgatgctatggctggtgtgggaaagtttaatattgaagcttaaggagaaaaggctgatctctgccttgctgaaggctagagtttgactgtctatgggaagaagagatggcgagcactgagtgccatccagcctttgctttgggagagcacttgtgtactgtagtgttggagagaaagttggagtgtgatcctccctacttgtgtctgtgtgtttgtgtaagatgtggtctcaagtagcccaggctggacttcacctcctaaccctcttgcatctacttcccaagtcctgggattataggtgtgtacctatatgtctggttcccatcttttcttcctgagtctgggtggttggagagcctactgaaggtcacccattccatgtggatttctcaaagaccagtgcttttttaggctcttctgtacccaacttggttttaatagctcctgatgtccctctttttttccatttctctcttcaatgttttttgtttagatagataaagttacacagtatggtgaatttgggggatgtgtgtttctatgaattgtaacgtgacttatgtggccattaccatagctgggacacagaccatgtccacactgtcctcacccactaagctcagcagccatagaccattagtcagtaggaatatctttggagaacgtcttgggaattgtgttgagttgtacgctacctttggttagccactgtgcttctagctaaggtctttgaacccatctaaattattacttgtaaatagcacataattggcttttaaaaatttctggcagtcttttattttacacatgcacacatattttatgtacatatatatgtatatatatgcatgtatgtatgtatatatataatttaaatgtttttaaaaaatttattgccgggcagtgggtgctggaaagcattagtctaacccttggccaggcacagtttggagcgtctccccatctctgctgttgcattgtagctataaccatgtccctatggggctttctgggtttgcatgggaagtgatgctagtaccgatctgctgtacaatcagctgtcttttaatggtgttttagaaattaacacaaatattgaaagacctccgagaggagcccctcgctcaggcctcaggacagtagcagacccccaagaactcaagagagaccaagcttgatgcaaaccacgtggctttattcggggaaagccagagctctggggacgactcatatcccacacaggggtagaggagtcgacctcgaggggaaagaggtcccagtttttataggccctcaggaggaaaaggagaagggagagattaggggatttccagatctaaacaatgtctattctcaagaaatgggtatgggaggggtacaaggaaagagtctggtgcaggtgtagcaactccagattggccctgctgtggttgctggggagattttctgactctatcttagcaaccaatatcacaaacacctggcagtgaggtgcagcagtggacacacacctgggttcaaggaacggtcagaacattggcagacacacgggttcaaggagcggccagagcattgtgcacctctatttatctaaatcagtgaagctagttctgctaacagtgacatctattttgccaatttcagggcttctgtgaccttttacattctttcaggatctttcagtatatcacaagatatttgaaaactaaaggacaggacataccatccctgatctagctcactagcctgtgttaacatttgatggtacctttttttctactgttctaaaagagttgatgtgcataaaagagtggtgcatgttcacactcctagcatgtgttgacagtgataaatggctgctcctttatcttgttcttccaaatagaacattagctgacactttgagctgcctgccattttctttgcagtcttagtctttagttgtgggacaggcgacttatcaggaacctggtaaggtagtgggtcagagtccttggaaactcaggtacacatctgagatggtaggggctccgcgatccgtgctttctgccagtttcctggcctggaatgtgtgccacacttcccacatacaagaattctccatgctaataaggtacctagaggccctgagggtctagtcaataagctccccttcccagacattcctctctgcaaaaggtatttaatctctggaccaccgtgagaagttggtatgcatccgtttttcaagatgaacaaccaatgaaaccaaggactgtctctttcatctaccactgctatggggagcatggaggaggccttcgcccatagagcctctgcctaagtctcccatagaaggcctctctgtaattctagacaaccactgctacttttactgatgagctaagctggagctcccagcccaagccccgggcagatgctgtccttagcccgaggatcccaatggtcctggccttgcctccttgagggcctgtggaccccaacacttcatttttgacttctctgtgtggttttctagtgatgactagatgcccaggagtccacatctcagactgctttttcccatccttggagcagtgtcttggtgcttccctaaagccctgcaccctatgggtgggcggcagcgtgttgggataagtgcagtcaagctcctgtgtttcccttctccagcagctgtgcccagcagcacagtgggggctgaacacagtcccacatttagtcacttttcaagttgtttatataactataatcagcatacatctaatttgaggctgcttttgtgttgcctacaagtcaggttcgtggatgcactctgtccgcctgaaggagaaacaggatgcttagtcttgcctagggtggtcacgggatgcttggatgtctgcctgtgaggcatctgcttctctggctgcttgagaatggtgcaggcagcctttggggttggtgggtatccttatttacatcccagtggccatcctgccctcttcaggagaaggagcgccagcgcctagagagcctgcgacggaaggaggaggccgagcagcggcgcagacagaaggtagaggaagacaagcggcggcgactggaggaggtgaagctgtaagtgtcccagctcccagcccggcctgccccagcttgggtaggctctccttgactgctgtgcccacaggaagcgtgaagagcgcctccgcaaggtgttgcaggcccgtgagagggtggaacagatgaaggaggaaaagaagaagcagattgagcagaagtttgctcagattgatgagaagacagaaaaggtgagtctgggctaatgggcccagtgggcggggccactggactcttgcattagtcattggctggacggcccgtgtacccctgctttctgtcatatgggctttgatcttttctgaggcaacttgaatgctggaagtctagctttaagccttttctccccccagcaacccttttcgtgtgagcagtcctgaggtggtatggcttattgtgccttttccctgagttctgggcagggtttgtaggggcatgggtacctctcacagagctctaggctccatgctgcatgctaaggtagaggttgctccagaggacacatgtgagtggattctgcaggctaaggaggagcgtctggcagagaaggcaaagaagaaggcaactgccaagaagatggaagaggtagaggcacgaaggaagcaggaggaggaggcacgcaggctcaggtggctccaacaggtgcgactaggtggggacagggaagcagtagggtgggacaggcactgcctccttgccctgaggactggctgggcatgcccattctgtagagtaggtcctcttgaacttgttgctgacttgagggttgcgtcatggggactttgctagaagccagagtttggagattggatgtgcttttggagcccggcttcacctcacatctgctgtttcttagcggtgtgcccgtgatcaggttactcaaatggcagagtgatcttgcttttgaaagggttctagttgagagcaagattcactaatgcacgagaggcatgtcgtgcctggtatgtgctgaatgcccagtgggtgattgtaacacactccacccttgagccttatgcttgcaagagtaggaccccatctctcgctctggaactgcagtcttagcactggagggaacaatgtctgtcgttggggtgctctagaattaatcagtgtggtgtacttacgctctgacagacacttaagtttaatgtgtgttaactcagcagctcctcgaggtgcacgtgctgctgtctcctgcttttcagatgagaaatgaccatcgggttagatggcttgcctattgcacatagctagctctccaaggtcccctcttgcttgtcagctctgctgcagctgttgccagatgccttttctgtctgcccatgactttcaaaacctattgtcaaggagtctggcggctccgtcctacctgatgtcatggtggtagtcagtgccttaggagctagggctgtgggcaggagcagctccttggcttgctttctctctgtgggcgcaaacctggcttgagtgtcccgcacttccttgcattgccaactcaggaggaagaggagcggcggcatcaagaaatgctacaacggaagaaggaggaagaacaggagcgccgcaaagcagctgaggccaggcgcctggcagaacagcgggagcaagagaggcgaagggagcaggagcggcgggagcaggagcggagggaacaggagcggagggaacaggaacggaaggagcaggagcggcgggagcaggagcaggagcgtcttcgggccaagaggtgaggccacccactgaccatttactactgtcctgtgtggggagtgacaggcagcatggccactgcttctttttcttggcttctattcacttgaaggttgtcaggctttcccttgtcctgatgcctacagctagtggaccaccaaataggatatatgttagctgtgggagactcaggggttccagctcagggtcactgcacgttttcttctgcttcagcagaatgtgctgactcctttggtgcctttgtctcagtggataagtaaggtgaggggtcttagacacatagtactcctccatgggcctgccccaggcatcctgggcatgagggacatttatattgcagtatagggcattgagcacatgttagccctggcccctatgctacccttggtggtgatgataacccggtgaggttttcccttcactgacatttattagaactgtgcccacatatgtgtgcagaccaacaggcccagcaactatttcctcttccttcccaactcctgacttgggtacatgtttgatggagaattgaggacttcacatagagggcctgcatctcaaggcagtattgggtgcatatagattgacacaaaagtgcccctggtctttctaggtaaagtcagagataagagtctgggagggagtgggtggtggctgctattgtggcttcagagtcgggtggttagatttgtattagccctgaagagcgatggggtctgagggttcctctgaactacctgctctgtaggtttttaaaaaacttaatccttaaagctcttgtggcatagagacaatgagctttacaaaggaatctggtttgagagtgaggctaaatgacttgtttaaggtcaagctcctgactgtagaggcgacccctgctcactgggtggagctgagtgctctgtgtttctttttctttttttgtttcttttttttttttcagagacagggttttttttacacagagacagggtttctctgtgtagccctggctgtcctggcactcactctgtagaccaggctagcctcgaactcagaaatccgcctgcctctgcctcccaagagctgggattaaaggcttgcgccaccaccacccggttctgtgttgtctctctcatgtagtggtcatagcaaggccggaggagagctatcactcttcctattgtgaaaaagaaaagggcgaggctcgtggacctcacttgcatggaagaggggttgtatgctatttgattccaaagttaggctttgaagcttgcttttggagagtccagctgttggctttaagctgatgtccagttctacttgtcccagtccctaaaggcatgtccaccaagcctagattctcttgcggggtgggaagaggactggggccctactactggcttgacagattcttggttgtcctcagggagatgcaggagagagagaaagccctgcgactccaaaaggaacgacttcagaaggaactggaggagaagaagaggaaggtaggagtgttgggaaaatgggctccatgtgggttctgtgctgagctgagagctgagagcactgggaagcctgggctatatactcttcaggcagccctgccttgccacatggggtagcagtgtggcaagaggagaggaaggacacacctaatcttgttgctggttgggtcccaggaagagcaacagcgcctggctgagcagcaactgcaggaggagcaggcaaagaaagctaaggaggtggcagcagccaggaaagtcctgaacatgactgtggatgtgcaggtgaggcctgcgcccctgttgggaggggctcttacaccacccttcatttgcttacaagctcaggctgtgtgttagagccagaagaaagagagcaagtaacttgtgtttatttcttttttctctttttggtgacagggtctggttgtataacctaggctagcctcaaatttgtaatccttttaccttacccacagttgcagggattaaaggaccatccatagtagaaagctagttgaagatcatggtgtgtctttgagggagggaaatgccaatatgaaagaaagtttacatgatacaaagtggtttatattccctgacttattaaaatgaaaaagtggccctatatctttcttttcttcttaagaagtgaagggagatggccagagtgtcagtgtcctccaggaaggcaggggaggagctaatgaccatgctgattttcttctagtctcctgtttgtacctcatatcaaatgactccacaaggacccaaatccatccccaagatcagcgtagacgattatgggatggacctaaatagtgatgactccacagatgatgagtcccacccccggaaacccatcccttcctgggccaaaggtgagtggggcccagagtttctgaagaggcttgggctgcctcctttcttcccctctgtgggatgtggacgtggtagtttagctgctgcaggtatacaggctgatgtgctgacaggctaggcccagtgacttatggcattgacctgaggacttaggaacatcgggctttgcacatgcacctagaggtaggaggcttactctggtctgaagacgcatctgaggatataggataaagggtgttgagttcctttgctcttgttgaatgtagctatgtctggctcaagcaaacgtgctgctaagtattctgacatggactcgaaagtcctctcgtcagagtctggcccagcagggctcaagaggcttagacccaagtaagccacccatgggtgggcatagaactaagaggatagcaaggtttggttggaatgttagaggtaggaaagatcacgagcaaggggattggttcttgagcaagatttgccttgagtcttggggtttccgatttatacagggtgtggatgggtttgatgctgtctctggcctgggcatgagggcctgctagggtgtttcttaggatttgctgaactagaggttagcacaaggtgcttacctcagaagggtcctcagatcccacagtgggtcagcacttgacagaaagacaacttttgtgacagactttgtttaaaccccaccataaccagaatcttatgtcaagtcactttagaacaacagcaagcaggggccagtgtggccagcagagttgcctcatggtaactgaccttagatagattacttagtttctgtatctgtgaagagggagccagtggtactaggacccaactgagatgattatgagtgaaggaatttaggaagcaagccctggatgtgtgttcactcctgatcctctagggccctcctcagcctggttggtggggctgtgaatcccacacagctctgctcctttagctgtgtgctcttctgtagagtctttgaggttggtgggagtagccaggcaaggaggcttaagatctggagacaggcttgtcttcacacttagctctgccattcacctaccatgtgccgtgagacaagtctctttctacaaaatagggagaataaagtattgcctaagacaactcctgggggcctttgggctcagctgctagaagatggagataaaaggataattgttgggtggaggcgagcaggaggttgctagaggagcagataggataggagcaaggcatgctgtcatgaaaaggatgactgggctctgtgggtaggtgcaggggtcagggaagctcccagagagcaccggacagtgatccaggcctctgttttcttcaggcacccaactcagccaggccattgtccaccagtactaccaccctccaaacattctagagctcttcggatctattctcccactggacttggaggacatctttaagaagaggaagactcgctaccacaagcgcactagctctgctgtttggaactcaccacccctgaaagccaccatggtccccagcagtggggactagactatctagcctgaagagtccatgaggcaggccctcagtcattttggagcacagggcccatgtgtgtctttctgtttgtttctctgtctgttttgatgttgggctggtgcacttctgcctgatatgccattgttcaggtggctatcagtgtcctctgtttgtcaggtattcccagacctgttgggaggatgggcttcatgcctggggaagaaccaggttgagcactgatggctctgtaggcagtactctgtaaataaatagattgttacagttcagttgaatgacttttagtttctagggtttgtgaggtagtttaataaagtgtatagcccaaagtctgctgtggatattgtgaagactagaggcttcattggaatattggtctgcagcagtatgtcttgtgcctttaccttcagtgtgtgcctagaccacttggttgggtcagatggggtcccacccagaggttctaatgacagacatgtcagcatgtcctgatagggcatctgaacgtgcttcctgttggtaaatggagcctattccttgggaaaggcctggcccgtgactcagctctgccacattgtccttcagcctcaccacttctcaagctctgccatggttgctgctggggattggaaggacttgaggaagtcctcgtgctgggagctaatcaggaaaggaatgcactcaggctgactttgggacccgtgcttacaaacggggggggggnnnnnnnnnnnnnnnnnnnncgtgcttacaaaccggggggggggggggggggggaggtgcggaggtttaaactgcaaaaccaccagctactccataaacgctcagtgaaggatggccttgcttctgatagctcctgatgccatttttcctggaactggggttagccacctgtggcaggaaggacaaatcaaagtatagttattttggatatagctgtagtaaagccaatttgttttcccattacctccaactccgtacgtgatctgagaagctgacaggcttactatggaaacctgttgagaagatttttgccggttgctttaggtcaaaatacaaatgcagtagtgctttaaacagggaacagcggacacagacgtctgaagtctagactcttcccaccaatacagagttcattcagatgtgtacacacagtgcagcttattccgtgtatcctcacatgtaactgtcagggaaactggaaggcatgtctgtcttaagccacaaaatctaactcacttgttagcacatttatctagtgcttagaaaaccaaaggatggcaaataacatggtgaatgcacaggttcttccatgttcaattcaggacaccaactttttaagtaatggatttgtagccagtaccgtaggacaaaaaggaaaaggtaagaattaaaattctccgggggatggggtgtgcctcagtgatcgaaactgtgcttataatgctttgggttcagtaccagcacggcaatcttgagaagatgatgtagagaattgagtatatctagtaaaacgagtgaacttcctgtacaagcctccccaagtgttaggatcatagaatagtagtgtctggagattttaggaatacacttgacaggagtcggaaactcagggaaactcagtgaaaactaaaaacactgttgagagaaattaacaaagacaagtggggggagtgggggcagataccatactcatgggtggaaatccttatgaaaatctcaggctccgcctccagatgccccaccaagtccaataccttttttctggcttatggtgggggcagggtagaagtttatgaaaaatgggttcaaaaatgttagctgcagcagacttacaaaataagacatcacagttgttgagatattgtcaaagtcagcgtgatttttgcataaagacaagtctggaactctgtcttctagaagtagacctatgcttatctgatcgcttggcttttgacagaggcggaaaggcatttgggattggggagcaggcacggctcacatgctctcagaaagtactagatatattaaaaagctcaaggaatgctagggttagctcataattggatgaaggattgacattaaagctaaaaataaaactaaaggagccagcttaatgggaaaggtacttggccaccaagcctgatctgagtttgataaatgggacctagacagtgaaagaacactgacttctgctagttgttctttgacctctgcatgtgtattgtgttatgtgtgcacctccttcttccattacatacataagtggaccaactactactaccactgtcaacaaaaagtgtttttcagagatttcttattgatacaaaattttgaactataaaaagaaaaggactaatagataaaaaaattcacaacttttttttaaagtcagtgctgtttctctgtttttctccatcctggggagggatggtacacctacacacgcacacccagagttttgttgcccagaaccctaatgtgtcttccttatctttttttgttttgttttgttttgtttttcgaggcagggtttctctgtgtagccctggctgtcctggaactcactttgtagaccaggctggcctcgaactcagaaatccacctgcctctgcctcctgagtgctgggattaaaggcgtgcgccaccacgcctggctgtcttccttatcttgccattcaaacattactaccaacaccaagtacagcactaacagttttctctattgtatcacaattgcagtgggatataaaacttgtccactttgcatataagtccatagaccatttgctcgtaactgaactagttagccagttcagaactcctcatctgtctgcatctatcatccttagatgcccaggacactaaaacaggaatggtggtcatagctataaagaagaatccaaggctagatggggaagtctttaacagaagactttggaagtctgggcaggagaggtggctcagggtaaaggctttagtctgctaagcctgctgacccgagttcaattccggggacccacatggtggaaggggagaaccagctctcagaagtcgtcctctgatggccacagtggaatgtgcatgttcagaaacgtataaaatgtttggaactttaaattgtggtctaggtgtattttagaagatggtgtttgtttcattttgccaaacagattgcagtgtgagggtattctctttcaatcagttttgttggggcaaataggtcaagcagaatgatgtatttaaaaacaaatatttgttttcatgtgtacgtgtgtgtgtttgagtgagttcatgtttaccacacctgcaacagcctgtgtgggtcagaagagggcattgagtaccctggaactggagttgcaagtggttgtggttgtgagccactatgtaggtgctgggaatccctctacagaagaatccagccctcttaagccaactctccagccccttttaaatttaattttattgttttttttaagcttaaaaattaaaaagttattttcatacagaatattccaatatggttttctctcccacatcttctcccatatcctccccacctctgtaccctttcaaatccataccttctttctctttcaagaaaacaggcagataaaaaaagaaactgtaaaacagaatgaccaaacaacagcagtaacaacaaactaagagcatcacacacacacacatacacacacacacacacacacacacacactcaaaaattgtaaagcattctatacaagtaaaagaccatagggctttattttattttttattttattttattttattttgttttattttattttattttttaaaaagctcaaacaaagcaatgtgagattaaaaaaaatgaaaaggtatcccgtcaaatacctttgagttccttttttatgttggccgtacctggacatggagtctgccctaaattgtacccagtaagacttggggaaactaatttttgctttgtgagttgctgataattggatacagcttcttgaggatgggagctcatgtctacgcccctctcctattagtgctgggacccctacctggtttggatctttgaaggcccaattcatactgctactatctctgagttcatttgtgtggcagtccggttgtgattggaagacactgttttcttggtgattttcatcctctcttcctcttacctttctacctcctcttctgtatagctccctgaatcctgaggggaggtctttgatgaagaaataccattcaggactaaatgtcccagggcctctcattctgcacattgtccaactgtggctgtccccattacttcccatctactgcagagggagacttatttgatgatagctggtttaaactgatctgtgggtatagcagaatgtcatcaagagttattttatgttgctttagcaacacaacagtattcagttttttcctaggtccatctagcctcagatttttgaccagccaagcatgttggagacaggttccatcttggagtgggccttaatctactcataatggttactctaacaaaatttgtgccactactgcactagcatgttatgcaggcacttcatcattgtagaccaaagggtttgtagcagggttatgcttatcttttgttgctagcatacagagcctcttccagtaccatgagtcagtaggggtgatgtctttaagtaggcaccagattgacttttgtgtttaatgagatatatagtgttgtctaagaggaataatttttaaatgcatttttttttaagagtttgcatttgctgtcagtgaatttttagtagctgtcagaacaaaagagcccttgagctgtctggaagtcttgtaagaccagcatgaccctgttactttctctcagagcgtggtggttattttattttattttttagaattgttttatttgcattccagtcattatacccctctgtacccctccccacagtttctcatcattcttcctccccttgcctcagagaggacccccccaaccagccatccccccttcctcgaggcctcaaatcttttgatgattaagtgtatcttctcccactgaggccagaccaggcagtcctctggtacatatgtgccaggggccttggaccaacctgtggatgctcctggttggtggctccgtatctgagagctccctgggatctgggttagttgagactgctggtcttcctatggggtcgatctccctttcagcttcctcaatccttcccctaattcaagcatagaggtccctgacttcagtccagtggtcgggtgtaagtacctgcttctgtctcagtgagctgctggtagggactctcagaggacagccatgccaagctcctgtcataaacacatcatagcatagtaatgtcaggccttggtgtctccacatgacatgggtctctagttgggctggtcattggaccgcctttcagtctcttctccatttttgtctctgcagttcttttagacaggaataactgggtcaggaattttgattgtgggttattagcccagtccctccacttaaatccctgtttatctatgtactggaggtgggttctttgagttccctttccccagtgttggacattttagctaagatcaccccctcattgggttctgaaagtctctcacctcctgggtctctggtacttcctagaggttcctccacttcccatcctccaaggctgcttgtctcctttcattctcttggccctctgggcttctctcctgtcccttcacccccatatctgatctaataccccttctcccctccctctctcccactcaggtctctccctccttcagccacctgtgattattttcttctcccttctgagtaggattgaagccacctcacttggacatttctgcttgtcacacttcttacagttgggcattctgtactttttggctaatatccacttatcagtgaatacataccatgcatgttcttttgggtctagttacctcactcaggatattttctagtttcatccatttgcctacaaaattcatgatgtttatttatttatttttttggttttttcgagacagggtttctctgtatagtcctggttgtcctgaactcactttgtagaccaggctggcctcgaactcagaaatccgcctgcctctgcctcccaagtgctgggattaaaggcgtgcgccaccacacctggctatgagtagtgtttcttaaaatgaacctacttataaagattgaacttcaatgtgatggcattccacaaagaatctgggaatttatcctaatatttgcaataccccactaatgctgtttggaattatattgttaaatggatggaactagaaaatgttatatttagtgagggaactcagacccaaaaagtgaatcactttcttatttgtggattttagctttgaatctgcagatgtgagcatataacctggagtagctacagaaaccagggaagtgaaaagggaccatgtagggcaagggagacagggatagtaagatgttggatgttgtgatggctattcttggttgtcagcttgatggcatacatctggaattagctaaaacccaagctgctgagtatgtataactgcgagagatttttcttgtttttttttcttttttttttaagatttatttatttatttattacatgtaagtacactgtagctgtcttcagaccctccagaagagggcgtcagatctcattacggatggttgtgagccaccatgtggttgctgggatttgaacttcggaccttcggaagagcagtcgggtgctcttacccgctgagccatctcaccagcccgagagatttttcttgattggatcatttgaggtaggaggccacacctttaaatctgtgctacaggttctggtggcagcctaaatagaggccatagaaggaagagcttgttctttgcctacttgtcctctcactgggaagttcacttcttcactggaatcagagcctgtttctttggttctggcatgtactgaagaccagctgagacatccagcctcacagactgaacagttattagattccccagttaggagtcagtcatttttggaatagtcagactacagcctgggtagacattccaataaatttgtctctgcaagtgagtgagtgtgagtgtgtgtgtgtgcattcagttctgtttctttttagaaccctaatacaggtgctttgaaggggaaatgggaaaaacagggcagggaaacttttaattaattagtggggggcaatatagagtaagagggaggaaagaggaattaaaaaaaaagctaccaaggataattgaacaaggcacagggaaacattgtttctttaaaatacatacataaatgtacgtgtatacgtacatatagtttaagtagagtttttctatgtggggtgataaggctgtgttgggccagggtgattatcttaagattagtagtcatcttattacaaggtcaaaataaattaattcctattttctgtaaaacttgggtttgaccaggactcccttcattttatgatattttccatgctctacactctataccctgaccactactctgataaaatgttctgtaaaatgattttgaaatgttcaagtttctacataactagaattcctctggaaatcctccaacccttgaaactcctccggccttgcagttttggggctaatataaacctcatcttttgtgttcaacactatttttctcaaacctcactctagggaaattgccctgtctggcagaaaataaagcttgagtaatttgtccaaagagtttgagaatggtctttactctccttcaatgggactaacaaccataggctgtaaatgtaacttttattctcctgaagtaattgttgtctttgatgcttactgcctctgagatcccaaatcgtttaagttcagatttcattttagagaaactgacctaagtttgaactcaggtaaactaacaggctggtacgtagcattagtctcccaagttgcttcccccaaaaccccagcctagctccagtctctaggctaatctctaacatgaccagaggttccaggctacaccctcaacaagaccagtgtctccaggttattcccccaacaaatctacacccccaggttataagcccaccccctgcctaatgaccaccaatgcagaggggaacagaaattaagtttatgatatgactcccagcaccagtcaattatgttaaaggtcacaggagctttccaattagatgcttgcatatgtactccctgcttattgcttactataaagccttgccccaatagacattcagggctcccccaaccccaaaccatcatgcatgatggtggtgcattgggggaggggcgggtaaagggagttgagttagctcaaaaagaataaagaccctgctgtgagttgcaccagattggctcctgtctgtgttttgggggatcactaacatctccttggcacacttccatctgctaacctaggccttgtctaaattctagcctccatacaatttaatctaggtctagaatgttttcagcctctgagacttgtgctgaataagctcaccctttctagttaattctgagctctggctggccatggccagttcaactcagctgttctggctcaaactcctctccaagctgactgatttaacctaacatctcacagtgtcttactgaattgctcagcattggcctcatgctaactttggcaatatgctataaagcaatatgaacaagcaaggatcatcctagaaagctgcttcatttagatcaccacagggaaagtctttgtctaagagtcactctttttttcttttttcttttggatattttttttatttacatttcaaatgttatcccctttccctgcccctccccgaaataccctatcccattctctctccccctgcttctatgagggttgttcccccacccacccacccacccatcctctcctgcctccccaccctggcattcctctccactggggcatcgagccttcacaggaccaagagcctcttctcccactgatgtctgacaatgtcatcctttgctacatatgccgctgaagccatgtatactccttggttggtggcttagcccctggaagctctggggggtctggttggttgctactgttgttcttcctatggggttgcaaactctttcagttccttcagtcctttctctaactccttcattgggatcctgagctcagttcaatggttggctttgagcatctactgtatttgtcaggctctggcagagtctctcaggacacagctatatcaggttcctgtcagcatgcactttttggaattcatgatagtgtctgtgtttggtgactgtatatgggatggatccccaggtaggccagtctctggatggcctttccttcagtctctgtttcatactttatctcagtatttgcttttatgagtattttgttcccccttctaagaaggactgaagcacccatactttggtcttccttcttcttagttacatgtagactgtgaattatatcttggatattccgagcttttagtgtaatatccacttctcagtgagtgcctatcatgtgtgttctttgtgattgggttacctaacccaggatgatattttctagttccaaccatttgcctaagaatttcattaattcattgtttttaatagctgagtagtattccattgtgtaaatgtaacaccttttctgtatctattcctctgttgaaggacatctgggttctttccagcttctggctattgtaaataaggctgctatgaacatagtggagcatgtatccttgttggagcatcttctgagtatataccaggagtggtatagctgggtcctcaggtaatactatgtccaattttctgaggaaccaccaaactgatttccagagtgattgtaccagcttgcaattccaccaacaatggaggagtgttcctctttctccacatcctcaccagcatctgtcacctgagtttttgatcttagccattctgaccagtgtgaggtggaatctcagggttgttttgatttgcatttccctgatgactaaggatgctgaacatttctttaggtgcgtcttggacattggatattcctcaattgagaattctttgtttaactctgtaccccatttttattagggttatttggttctctggagtctaacttcttgagttctttttatatattggatatatattggtaaagatcttgtcctgatctgttggttgccattttgtcctattgacagtgtcctttgccttacagaagcttttcaattttatg

SEQ ID NO: 724 - DNA, 3104 bp, Mus musculus
cgcccggtaggtcctcgcctgcggcgagctcgcggtactgggagtccagccggtccggcgtggcgggaagcttaatctgcggaagccgcggactggaaaaggagtggtccgggaagacgcggcgccgccggacagtgccaccatggggaccacagccccagggcctatttgccttctggatctatgtgaccagaaactcctggactttgtctgcaatgtggacaacaaggacttcatgtggctcaaggagattgaggaggaggctgagcgcatgtttatcagagaattcagcaatgagccagagctgatgcccaaaactccttctcagaaaaaccgtcggaagaagaggcgggtgtctaacattcaggatgaaaacagagatcccgtgaggaaaaggttatcccgcagaaagtctcggagcagtcaggtgggtacccggcacctccgcagcaagcccgttactattgttgaggagaatggcttccctgtgttgcagcggataacccgggccacagctgcagcagcggcagcagcagcggcagcgtctgtggcatcagcttcttcctcttccactgctgggtctcccacagtgctgaccaagaaagcagtggtggagataagcactagtgaacgactgagtgcagaactacaactcactaagctcaaaggtagccttcctccatctccagtttcccaaggcaccctgacatcagaggaggaactaacacccaagaaatcagaggctggaaagctggactctgtcacagtgaactccctcaaggctacccctcagagccccaagaaccgaggggttggggaaggacgttctgtttccaagctcaagattgctcgggcctcctgggggctgcaggactctcctggctctacagactcaccatggcaagagcgggtgctttctcctatcctgctgaataacatcttgcccacaacagccaagagccctcttgggaatattcggtcagtgcggcgaagcctgatttcccaggattcccaagtgccactagcctcgaagtataatttggtggccaaacaagaaaatggcagtcgcagatcaagcagaaggattgccaagaaggctggcaaagagccagaggcctctgctcgaatcatttgtcacagttacctggagaggctcctgaatgttgaagtgcctcagaatgttggcctggagcaggagcctgtcgaggtggccgaacctgaggaggcagaagaggagcaagaggtctccaagaacagtgggtgtccctccaaaccccgcagtgccaccaagattgcgattagtacgcccacctcgaagcctgcggccgctggtcagacaacaactgttgaagagcaagaagctgagcttgaccaaacagatggacacagagaaccaccccagagtgtcaggaggaaacgcagttacaaacaggcaataagtgaaccggatgaggagcaactggaagatgaagaactgcagccctgccagaataagaccccttccccaccctgtccagccaacaaggtggtacggcccctccggactttcctgcacacagtgcagaagaaccagatgctcatgacccccacactggcctcccgcagcagtgtcatgaagtcctttattaaacgcaacactccgcttcgtgtggaccctaaggagaaggagcgccagcgcctagagagcctgcgacggaaggaggaggccgagcagcggcgcagacagaaggtagaggaagacaagcggcggcgactggaggaggtgaagctgaagcgtgaagagcgcctccgcaaggtgttgcaggcccgtgagagggtggaacagatgaaggaggaaaagaagaagcagattgagcagaagtttgctcagattgatgagaagacagaaaaggctaaggaggagcgtctggcagagaaggcaaagaagaaggcaactgccaagaagatggaagaggtagaggcacgaaggaagcaggaggaggaggcacgcaggctcaggtggctccaacaggaggaagaggagcggcggcatcaagaaatgctacaacggaagaaggaggaagaacaggagcgccgcaaagcagctgaggccaggcgcctggcagaacagcgggagcaagagaggcgaagggagcaggagcggcgggagcaggagcggagggaacaggagcggagggaacaggaacggaaggagcaggagcggcgggagcaggagcaggagcgtcttcgggccaagagggagatgcaggagagagagaaagccctgcgactccaaaaggaacgacttcagaaggaactggaggagaagaagaggaaggaagagcaacagcgcctggctgagcagcaactgcaggaggagcaggcaaagaaagctaaggaggtggcagcagccaggaaagtcctgaacatgactgtggatgtgcagtctcctgtttgtacctcatatcaaatgactccacaaggacccaaatccatccccaagatcagcgtagacgattatgggatggacctaaatagtgatgactccacagatgatgagtcccacccccggaaacccatcccttcctgggccaaaggcacccaactcagccaggccattgtccaccagtactaccaccctccaaacattctagagctcttcggatctattctcccactggacttggaggacatctttaagaagaggaagactcgctaccacaagcgcactagctctgctgtttggaactcaccacccctgaaagccaccatggtccccagcagtggggactagactatctagcctgaagagtccatgaggcaggccctcagtcattttggagcacagggcccatgtgtgtctttctgtttgtttctctgtctgttttgatgttgggctggtgcacttctgcctgatatgccattgttcaggtggctatcagtgtcctctgtttgtcaggtattcccagacctgttgggaggatgggcttcatgcctggggaagaaccaggttgagcactgatggctctgtaggcagtactctgtaaataaatagattgttacagttcagttgaatgacttttagtttctagggtttgtgaggtagtttaataaagtgtatagcc

SEQ ID NO: 725 - protein, 916 aa, Mus musculus
VLACGELAVLGVQPVRRGGKLNLRKPRTGKGVVREDAAPPDSATMGTTAPGPICLLDLCDQKLLDFVCNVDNKDFMWLKEIEEEAERMFIREFSNEPELMPKTPSQKNRRKKRRVSNIQDENRDPVRKRLSRRKSRSSQVGTRHLRSKPVTIVEENGFPVLQRITRATAAAAAAAAAASVASASSSSTAGSPTVLTKKAVVEISTSLSAELQLTKLKGSLPPSPVSQGTLTSEEELTPKKSEAGKLDSVTVNSLKATPQSPKNRGVGEGRSVSKLKIARASWGLQDSPGSTDSPWQERVLSPILLNNILPTTAKSPLGNIRSVRRSLISQDSQVPLASKYNLVAKQENGSRRSSRRIAKKAGKEPEASARIICHSYLERLLNVEVPQNVGLEQEPVEVAEPEEAEEEQEVSKNSGCPSKPRSATKIAISTPTSKPAAAGQTTTVEEQEAELDQTDGHREPPQSVRRKRSYKQAISEPDEEQLEDEELQPCQNKTPSPPCPANKVVRPLRTFLHTVQKNQMLMTPTLASRSSVMKSFIKRNTPLRVDPKEKERQRLESLRRKEEAEQRRRQKVEEDKRRRLEEVKLKREERLRKVLQARERVEQMKEEKKKQIEQKFAQIDEKTEKAKEERLAEKAKKKATAKKMEEVEARRKQEEEARRLRWLQQEEEERRHQEMLQRKKEEEQERRKAAEARRLAEQREQERRREQERREQERREQERREQERKEQERREQEQERLRAKREMQEREKALRLQKERLQKELEEKKRKEEQQRLAEQQLQEEQAKKAKEVAAARKVLNMTVDVQSPVCTSYQMTPQGPKSIPKISVDDYGMDLNSDDSTDDESHPRKPIPSWAKGTQLSQAIVHQYYHPPNILFGSILPLDLEDIFKKRKTRYHKRTSSAVWNSPPLKATMVPSSGD

SEQ ID NO: 726 - DNA, 49365 bp, Homo sapiens
tcaattgatcatattcatcgccaggataggagggaggcatttacagaattctatttgattcttctcttgatagttgcctttttgcaggtcatcatattgcagattaatcactgccaatagaaggttaggtggaagtgcagtaggaagtggaactccagaggtggggcttggacaccagacctaattgaggactagttaaaacaggcgtggggcaaaagcaccaccccataagacacacccaccagcaaaggacatgaacagacacttctcaaaagaagacatacctgtggccaaaaatcatgaaaaaaagctgaatatcactgatcattagtgaaatgcaaatgaaaaccacgatgagccattctcacaccagtcagaatggctattattaaaaagtgaaaaaataaccgatgctggtgaggttgtggagaaaaaggaacgtttttacactgttggtgggagtgtaaattagttcaaccattgtggaagacagtgtgggtgtggcaattcctcaaagacctagagacagaattaccatctgacccagcaatcccattactggatatatacccaaaggaatataaatcattctgttacaaagacacatgcacatgtatgttcactgcagcacttttcacaacagcagacatggaatcaacctaaatgctcatcaataatagactaaagaaaatgcagtacatatacaccatggaatactctgtagccataaaaaggaacaaggtcatgtcctttgcagggacatggatggagctggaggccattatccttagcaaactaacgcaggaacagacaaccaaatactgcatattctcacttgtaagtgggagctaaatgataagaacacatagacacatggaggggaacaactcacactggggcctaccagaggacggtgggtgggaggagggaaaggatcaggaaaaatatctaatagatattaggcttaattcctgggtaatgaaataatctgtacatctgtattagtctgttttcacactgctataaagaaatacccaacactgggtaatttataaaggaaagagttccacatggcttgggaggcctcaagaaacttacaatcatgacagaaagtgaaggggaatcaagtagcttcttcacaaggtggcagaagacagaagagcgaaggaagaacttccaaacacttataaaaccattagatcaggtgagaactcactcactatcatgagaacaacatgggggaaacctcccccatgatccaatcaccccccttgctcgacacaaggggattacaaatccctccctcaatacagggggattacaattcgagatgagacttgggtggggacacagagccaaactatattaacaacaaaaccccatgacacacatttacctatgtaacaaacctgcacatcctgcacatttactcataaaattaaaataaaaagacatgcccaccagtgtgccatgcccattgccatggcaacaccccaaagttcctgcccttttccctggcagcgagacaactgggaagttaccaccttatttctagaaatttctgcataatctgccccttaatttgcatataaacaaaagtggttgtaagtatgaccgcagaactgcctctgagctgctactctgggtgtactgcttatggggtagccctgctctgcacactgctgcttcaataaaacctctggctggcccttgatttgtttcctaggcaaagccaagaactctcccaggctaagcctgccctgcattagaagctcctcagttgcacagttgactggaactgtagcttaaatttgaaaaattatctgctgcgaatttgtgtgggaatgcagattttgattcttgttttgacttttgacatcataagaaacatgtaaagcagtttgactttacttgtgattcaaacagtgtagccatcataaaaatgactttactgcagtataagttttgcatattagtgctgttttgactgctaattttaggttgaattcattaagaaatattaccaagtctatagcaaaagctaatttccaaagccactcagtgttccttaataagggttgagggcagttcctattcagaaaaaattcagctctgagcttaaacaatcacagtaaatctttactactgtgaatcccttgaactgctgcgtaatagggcaagcaaagagattcagtttctattttggacaaaaattcatggagctgaagatggctatggcacgagagtgaattaaatttcctgttgaaactgcaggttcaataacacatgacagattcaaatattttcaggaaagtatctactgatatacaatatgatgaataatcataggtttttaacaccttacactgtcacaaggtttgtaaatttgtccaattaacatttatctgctctatacatttttactaccatcaattgtaacacatcctagcagattccactacaggttatactgaattagtgtttcctcaacttctatgaaaatattccctcctatagttattccatgcagtctattcatagaggctaactctgcagtcatgccagcctcagcactgactcaagtaaaaaacaactgagaagtatcagtaacatctgtcaattcatgaagagccaagaaaaactacctaaaatcacttgacttgtttttttaattaacaactgtattagtttcccagggctgctataacaaattaccacaaacgtagtggcttaaaaagacattcttctggaggccggaagtctgaatcatggtgttagcagggtcacactccctctggaggctgggaggcagaattcttctttgcctctttcagcttctggtggttgctggtttccttggcttgtggccacatcactccaatctttgcctccattttcatatcatcttctcttcttgtctatgtctcctacaagaaaacttgtcattggatttaggacttactgaggttatccaggatgatctcatctcatgatccttaacttaattacatctgcaagggtcctttttccaaataaggtcgcattcacagtttccagggatttgaagtggatgaatttgacatgaatatatattttcgagggcttctctttggcccaccacaactattgatattgctcccaatgtcctcaactctctgagcaactgttctcaccgaaaggctaatagttttatttttttagaggcaaggtcttgctctgtcaccaaggctggagtgcagtggcatgatgatagctgaccacagcctcctgggcccaagtgatcctcctgtctcagtctctcatgtagctgggactacaggtgtgtactaccatgctcagctaattttaccatgatcagttttattttttgtagagatggaggtctcacttcgttgctcaggctggtctcaaactcctggcttcaggtgatcctcccaccttggccttccaaagtgctgggattacaagtgtgagccatcttgcctggcctaggctaagagtttattttctgtggacacattacttggctgctgcaatcaaacacaatttaatcaaattacctgcagaaaacagttttccttgcttggttaacaaatgaggcactaggaaacttactttggttgcagtcaaattttcattttttatttctgtgaagaaattctactgtgatgagatataatgttttatattttataattttttgaacattgctttcctgtgagttgggaatattgtaagtgcttagtctgataatgctgctatatatcatattcctttagcacagcttactatcattgcctaataaacacactgctttgccatctaattagataaaataatccacactccactgttccttaatagcacaacattctaaatccatttttttgctttgtttaggctgataggtttgcactggtaattttaaaatactgtagtatggctgggtgtggtggctcacgcctgtaatcccagcactttgggaggccgaggtggatggatcacgaggtcaggagttcgagaccagcctgctcaacatggtgaaaccccctctctactaaaaacacaaaaatttgctgggcgtggtggtaagcgcctgtaatcccagctgcttggaaggctgaggcaagagaattgcttgaacctgggaggcggaggttgcagtgagccaagatcgtgtcactgcactccagcctaggtgacagagcaagactctgtcttggagaaaaataaaaataaaaataaacaaaaaaacctcccatggtattgtaatatgtgtggcacttgaaatgctgttgaattataactatgccactgcaatttgtagtgcaccaagcagcagttctaaatgatgaaaccagaaatggtctttactgcacctactcaaaagcagccataggtagtacagcattgtctaatgttggctgtgttccagtaaaactttatttatggatgcttaaagttttcatctgtcacaaaatattcttgttttgatttttttttcaaccattgaaaaatgtgaaaaccattctcagcttatgggctatacaaaaacatggtaagccagatttgacctaactgctctaatttgttggcccctggtttaagatctaaactaggaaaagaaatgtgtcagtgtcttagcctcttttctgttgcttatgacagaatacctgaaagagggtaatttataaagaaaaggaatttatttcttgacgttatagagactgagaggtccagggtcaaggacctgcatctggtgagggccttcttgctgatggggactatctgcagagtcccaaggtggcacagggtatcatacggcaagggggcttagcacaatagctgaagtctctctttctcttataaaaccaccaatcctactcccatgataacccattaatccattaacccattgatccatgcatacatgaatggattaatccattcacaggggtaaagcccactcatgacccagtcacctcttaaatacagtctgagctcaactccactaaccaaaaggtgggagtgcaatgctgctatatattgtacatagggttttttgtttgtttttgtttttttgagatggagtctcactctgtcacccaggctggagtgcagtgacatgatcttggctcactggaacctctgcctcctgggttcaagtgattttcctgcctcagccccctgagtagctgggatcacaggcacctaccatcatgcccagctaaattttgtatttttagtagagatggggtttcactatgttggccaggttggtctcgaactcctgacctcaagtaatccaccagcctcagcctcccaaagtgctgggatcacaggcaagagccactgtgcccagttgggtttttaagtgctggagtaagctaatagaaaagttctggagcatatgaggagggaggttgatcaatgggatgtgtgaattgcattgagttattccacactttgcaaaggtttttctctgtgattaggccatctgtgtttgttaatcagcacccattgaagtgagataggggtccttccagactctgggagataggggtgctatctttcttgatggttatatttcaaagagatggtacccatgtttttttaaaaaaatcttaacttttaggttcagtggtacatgtgcaggtttgttatataagtaaatcgcatgtcataggagtttggtgtacagattatttcatcactcaggtaataagcatagtacctgataggtagttttttgattctctccctcctcccacactccagtctcaagtgggtcctggtatctattgttctcttctttgtgtccatgtgttctcaatgtttagttctcacttataagtaagaacatgcggtatttggttttctgcacctgtgttagttttcttaggataatggtctccagctccatctatattgctacaaagggcacgattttgttcttttttatggcagcatagtattccatggtgtacatgtaccacattttctttacccagtctactgttgatgggcatttaggttgattccaggtttttgctattgtgaatagtgttgtgatgaacatatgggtgcatgcgtctttacagtagaatgatttatattcctttgggtatatacccagcaatggcattgctgggttgacatctcacaccaggcacccatgtttttgagaaagacattcctaggttgtaaaacagacaaaaggcttttaaaattatttacatattgaagcagcacagaaagaatctacagttctttctttataaaagttttttttgttctttttttaacccgtgtctagttctgtcacccaggctggagtgcagtggcgcaatctctgctcacagcaaccttggctcactgcaacctctgcctcttcagctcaagtggttctcccacctcggcctcatgagtagctggtactacagacacatgccaccatgcctggctaattttttgtattttttgtagagagaaggtttcaccatgttgcccatgctggtctgaaattgctgggctcaagtgatccaccctcctcagcctaccaaagtgttgggattacaagcgtgagccattgtgcctgacccatgactataatattgatgggacattctaagtccataggctgtgctggggactctctagcttaaaggtggggtggctccgtggcccacattccaagagtctggttacacattacctacgtattctttctggtcctggaagtctgtatccttcagccaggtgccatagacagtttaaccaagcccagagggaggcggacacaattatatcctggtcttctggtcttacttgggcttatgtgcttgctcagggctattctcggctcagtggtcagacaaaagctttgactgtggtgaacctttgtagcttttaccccagaggccctcaatgcaaggggaatgttgcatacagtccactggtctgcaaatcaagaaatacgtcccccactgggggtagaaagaagactttggggaaaataaaaggagagttttaagggagtcaatttcatattctcttaggtgtgtcctgtatgcactttttcttttctttttttttttttttttttgagatggagtttcactcttatctcccaggctagagtgcaatggcacaatctcggctcactgcaacctccacctcctgagtacaagcaattctcctgcctcagcctcccgagtagctgggattacaggcgcacgccaccacacccatattttttttttttttgtattttcagtagaaatggggtttcatcatgttggccaggctagtctcgaactcctgacctcgagtgatccgcccacctcagcctcccaaagtgctgggattacaggcatgagccaccgcgcccagcctgcactgtacttcttcttttatctgcttgtgaatgtacctgccattagctagttttcctttccctcagcccccctcctttttttctattcttttttatttttttgagatggagtttcactcttgttgcccaggctggagtaaactagttttcctttccctcagcccccctcctttttttcttttcttttttatttttttgagacggagtttcactcttgttgcccaggctggagtaaaatggcacgatatcggctcaccgcaacctccacctttcaggttcaagcgattctcctgcctcagcctcccaagtagctgggatcacaggcatatgccaccatgcccggttaattttgtatttttagtagagacagggtttctctatgttggtcaggctggtcttgaactcctgacctcaggtgatccacccaccttggcctcccaaagtactgggattacaggcgtgagccaccacgcccggccccctcagccccttttatagttgctcttctctctcttgagaaagacggaccttaatccccttggaaacttgctaaagtgcactgcacagggtagaaaactctccgaggtaacaatcaaataaacaatttgagatactcatgtcagaattaataaacagaatgattaacgattgggtaacatatccttttatgattcagctgatttccaattatttacattcttcaaagaataactcagaaatgtttagttaatttgctcacaaattatttactcacatatgatggagtcagttggtaaactgagtaaaataacaaaggcaaaaacagaattgataaagagagggaagaaagggagaggaaaaatactacagacgacctgggaacagggtaaactatctgttggtagctgaccgtggatgtacaaatctcttcaagattgaactgccttattttacaggtaacagcaaccttgactcacagagtaaagtgactttgtctaaagcagtttctcaacagcagcaattctggtatctggggccgggtaattccttgctgtggggactgtcttatgcactagatggcgttcagcagcatccctggcctttacccaccaaataccactaaccccttctcccaaacccaaatgaattcacacactgccaaatgtggggggcggaggtgggataaaacctcctctgcatgagaaccacttctctcaagaaacgtccagtaccagggtaggtgaccaaggattctgtcgcccaagagatgacagaaggctctagataaacgcacactccgttgccattcacaaggcgttttgtttttacttctcaaaagcggcagagattttttttttgagacggagttttttgctttttgtggcccaggctggagtgcaatggcgcgatctcggcccactgcaacctctgcctcccgggttcaagcgattctcctgtctcagcctcccgagtcgctgggattacaggtgcaagccaccacgcccggctaatttttttttgtattttagtagagacagggttccactgtgttgcccaggctggtctcgaactcctgagctcaggcaatccacccgcctcggcctcccaaagtgctaggattgcaggcgtgagccaccgcgcccggccagagattcttttttttttttttttttttttttgagacggagtctcgctctgtcgcccaggctggagtgcagtgtgagccacctcgccggccagagattctttataggacatattagtccttgtctttccccccccgcctccatattggaaagatgaactaattgaaatatgacttagtaaaaacattgtgccaacttgaaaccttgatttagtaaaacatctcaatgtttagatcctttgtccaatggtagtatttatcagatgtattcagcttgctcagaaaaccaaaagggcattacaaccacaaaagcaaagaaaaataagaaaacgtcccatgtttggatcttgttctacttgtaaagattaaattgaaatgattaggcttttcgattcatgagccaaataccgtaacaccctggcctttgatgggtttggatttttaacattactcctgagatttcaggaagtggggttacagttacactccttatagctgctaagtgtattaagttgaatgtaaggatgcataatattgtttgaattgagccccactaccaattctttaaaaaatggcatgaattcctatacgtaaatgatttggtggaactattccatcataatttctaaattgtttatataccaaggtagccttaatttgtatatgtttcagtacaatgaaattttactccctctgggatgctgtttggtttgtattttgaggaatgtttttctcatgggaagaggaacctatgacttctgtacctagataatttgttacattaaaaagctggtctttcagcaatgtaagtatatacatacatgtttttatgaggaaaaaaaagcagcagagatcagaagactgccaccgtgcttggagaagaaagaaagccgcgcgtggccttcgcagtgctcgccgggactcgtagttccaggtctgcgggctcctcccaggcggggatctacttcctctctcggccgcggccgcagcacccggaagctgagggggcttaaagtctttcgcttcctttccccgcctcttagtcccgcagattgctagtcgatatggccaataggagggctgactggtacttcctgttatttgattggcttaaaattttgcaaccgcccggacaaacttgccgaggattggctgagccttcagttttgaaaatcatagttttcgcccgcgctgcgccgcctggttgctcctcccgtgcggtgagtcccgaaggcccggagccaagtgggtctgggcaagcggggccttacctagggataccaccggacttggatcggagcagccttcaggggacgtggcgcagtcgagtgagtgcgcgtgggcgtggggattggggggtggttcgcgattttttccccggtcctctgctccgtccctgtcgactccggaccagggtcgtgactccccaccccagcccctggctacctgggcatatgagggtcacctcttccaagtggcgaggtcgcctgccttggttctcgggcccgagatgcctcccaccctttccacctaggccctcagcttcctagagcatagccccgttccctccgctcccggctgcttggcaccttgtgcctgtgaggattagtgttgacttggacgcgcaggaagcccgaaaccaacccggttgtttggcggaatgatgccagatggcatttctgtgcagttaaacccctctctcaacgcccccgcccccagctgagcagcattttaaactgaccatttccggaggctgggccgccccttgtcactccccaagcctgttcgctgtcagcggttcagtctcattcagctaacatgggttgctcgcggggttgcccagagccaagactgggcacctgcctttcagaagttgatatctagaaggcggtatagccagtggttaagggcacggtttaaaggcggtatagcccgtggttaagggcacggttctatttatgcccctgatttaccggctgattttgacttctctttgcctcaatttcctcatctgcccatgcgtatcctcaaggttgtggtgagaattaaatgagatgatgtctgactcgggcatggagtatgactcagtaaatgggagcagctgctatgcgctttctgcacagaggtgtggtaggcgcccaacttacagcaccctgaaaaggacaggagtcatagaggaggacgatggggccttcagtctggtgtatggtgtggaagaagtgttggagaggaggaagactggagagtgtcttcctcggtgaggtgttgagtgctctttatctgtgtgcaggtgcttacatgggttgaagaagagatttttgctgctcttccaggagcctgattcttggtacactgattccttctttttcagggtcacctctgttttaacttacggtaaccctttttaaatcgttgcgctaaggtctgctagaagcaaacctccccgtgaaagaagtccaattgctttcatggactttgtgaaagaagctctcatccacgttgcccatttgaacaaatactttttaaaaagttagccagttgttgcttttctctgcaaacctttggcttccttaaacagttttctcttttctggcctgaggtcctgcgctttgccagggctgtggtctgggtgcagaagggttaggggaaggtgagggatgacagtgaaaagggcttgcccatgattggctggctgcagagccgaggtttcagcccaaagcctgtacgatcctgcccatttggccctgccctgattattgctgcccttggcatctgggaacaggggttttgaacatgtgttggtcagttctaacctgtgcagattaagtttatttggtgccctttgtgtggtgggatgagcacctataggatgtttatttctaggtgtagagttgatgggtggattaattcatttaacaaatagtccttgttgccaggcactgctgtgctctgggcattcaacgatgagcaagacagacaggggtttgccctcagagagcaattgtttagtgggcagggacaggcagtaagcaacaggtaaacaagcacgcaagtgctctgcagagaattacaatcaatgaatgggatcatggctggggctactttagattggttttcaggttttcctgaggatctgagatccaagccatgaggagtgagccatacaaaatgtgagacaatgttccagacgcagggcagagcttgttgaggaacaaagactactgtgtccttgaatcaagcctgaggaagtcccatgagactgaaacctgacctggtgctacgccctgtgagggatcaaggggtcagcaatttatcccttccttacaagaccttccattgtaggtgggaggctgagctgtgcatggtttttttgtttttttttttgagacagagtctccctctgtcgcctgggctggagtgcagtggtgtgatcttggctcattgcagcctctgcctcctaggttcaagcgattctcctgcgtcagcctcctgagtagctgggattataggcatgcaccaccacacacggctaatttttttgtatctttagtagagactgggtttcaccacgttggccaggctggtcttgaactcctgacctcgtgatccgcccacttcggccttctaaagtgctgggattacaggcgtgagccaccgtgcccggccggttcttggttttaaagaggtaagtcaggatggtggatcactgccattgacttgaggcatgcagtctgttgttatggcttatgaccaccacccattcatttgttctttcactcattcacctgttgggatatttaatgagcccctgttgtgatgtagtagaatatggttgtctcttggaatcctcaggggattggttccaggacctcctttggataccaaaatccacagatgttcaagtccctgatataaaatgacatagtatttgcatataacctacacacatcctcctgtatactttatatctctatattacttataacacctaataatgatgtaaaagctatgcaagtagttgttatactgtattattagggaataatgacaagggaaaagagtctatacatgttcagtacagatgcagctctttttcaaatattttccactggtggttgattgcatccatggatgtggaactcacagatatggagggctgattgtacttcttccttgcttgaggtttttgtaatggctatcaagttttttgttttgtttttttttttttgagacagtctcgctgcgatgcccaggctggggtgcaatggtgtgatcttggctcactgcaacctccacttccttagttcaagtgattctccaggctcagcctcccaagtagctgggattacaggcgcacaccaccatgactggctaattgtatttctagtagagttggggtttcaccacattggccaggctggttttgaactcctgacctcatgtgatctacctgcctcggcctcccaaagtgctgggattacgggtgtgaaccactgcgcccggctggttatcaagttttaaggaggatacctgagctgctagttttataagaaagtgagaaaaaactgtttttgtgttttctcttgctcaatgcttgtaggcaagttttcttaaaagcaagatattgcttactgttcccttcttgttctatttatgctccatttggagggcatttcagctcaagggagaggggtgtgggaggccccttgagggcatatctctggatcactactttctcactcattcctttggaacacagaatctcttctgctcactggcctcttaaagaggcagttgggtttgatgttctttggcctgatgtctggagtcagcttgtatgtagtgcagggtggctgtgtcttagcccttacttaaccatgagtagtaagatgagggcctactggagagcgagagcaggactgtgtttgggcagggagtgaggggccctggggtggccaggaagacagatggcagtgccctgtcatcttaagcccagaaaaggccatttataaggaggactgtcaatgtcagaattggttgggaactgtggacttatggggacagtcatgctggcgggggggtggggacagggaggtatttgaagagtgtgagtagaagggcttctctttgtagagatgaggctaggggatgagtgtttggaattctgcagctctggggagtggctgtgagcagagaggggccctggttcgggcactgggtgtttgtggtggttgtgggtcaggtgggtattgcagcttggagaaagccccagacccctaccctgggcccctaacttgtgcctcttgtccctgccttcaccagacagagccaccatggggacgacggccccagggcccattcacctgctggagctatgtgaccagaagctcatggagtttctctgcaacatggataataaggacttggtgtggcttgaggaaatccaagaggaggccgagcgcatgttcaccaggtgaagacgggcacagtgagaggctgggaacaccagggcctgtctgggctgctttggtcttggggacacaacagcccctcgtccccgcctacctggcaaaacagacagcctgtcagggctccctgctgtatactgtgtgtgcagtgtgctgggggcctgacctagtgtcatgggaagaggcagcaggagagatccagtcccttgcctattcgccatcgttgctggctgggcctctcagggtatgtggcaatggacgtgcgcctgggagcttgcttccctgccgtgtctccaggaggaagccctgagtgcccgcaggtgacttgcacatggccttggagagctcacttggtgctggacaccccagcttgacctgtcgctgccaggaaatgggcaggggccaggctgggtgggagaggggaccagtggttcccaggcagcctcgagtgacaccctccttgtgccaaacagagaattcagcaaagagccagagctgatgcccaaaacaccttctcagaagaaccgacggaagaagagacggatttcttatgttcaggatgaaaacagagatcccatcaggagaaggtaggaggggttgggggagagtgagctgagcagtgggctctgcggaggcttggtgccatctgggagtttgattctgaaggtgttgatttggaagtagcagcctgtaggaggggtggtgggtaccaccgcgggtactgcgtgggccatgctgagaggggttgggatgccacagggaactatagcttgacccaagaccctggagtccaaatctgtggctgtgtgttgggggtgggtgtgtttgatctgggccctggagaatgggaaagatttccgtaggtgggatgagaaagagaagccatccttctgttaggtgagtgtgaccaggggtgtagaccacgtgccttgtcccagccgtcatattgtcatgcttgttttagtccccctcaggaatgattggggctgcagagtgctagggaaagaggctgggtcttggggttaggcttgggtgtgaaccccagctctgccccttagcagagcagtacggctttgaattgaatttctgcctctctgagcctccgttcctcatccctaaaatggggatagtggtctctgcctctcaagggcgtgctctggattaaggcagagcgtgtgtaaggctttcagcaggggctcggtgtggtgtaacttcagtcagccggaggtttggatgaatataatcttcctagccagttctgtgcggactgtggcatgatccccaatttacagttaggaagactgcggctcagacaagaatggcctggggcctcatggctagaggtggcagaatctggcctggaacccagatcttttgccttcaccttctcttatcatactctatccaagctggtggctcttggagagactgggtgccaccctgtcctgctgcccgtctcagcctctgccctgctgcccctgccaggttatcccgcagaaagtctcggagcagccagctgagctcccgacgcctccgcagcaaggacagtgtagagaagctggctacagtggtcggggagaacggctccgtcctgcggcgtgtgacccgtgctgcggctgcagctgccgcggctaccatggcattggctgcaccttcttcacccacccctgagtctcccacgatgctgactaagaagcccgaggataaccacacccagtgccagctggtgcctgtggtggagatcggcatcagtgagcgccagaatgctgagcagcatgtcacccagctcatgtccaccgagcctctgccccgcactctgtccccgactccagcttcagccacagctccaacctcccagggcatcccgacatcagatgaggaatcaacacctaagaagtcgaaggccaggatactggagtccatcacagtgagctccctgatggctacaccccaggaccccaagggtcaaggggtcgggacggggcggtctgcgtctaagctcaggattgcgcaggtctcccctggcccacgggactcgccagcctttccagattctccatggcgggagcgggtgctggctcccatcctgccggataacttctccacgcccacgggctctcgcacggactctcaatcggtgcggcacagcccgatcgccccgtcttccccgagtccccaagtcttagcccagaagtactctctggtggccaaacaggaaagtgttgtccgcagggcgagcagaaggcttgccaagaagactgccgaagagccagctgcctctggccgcatcatctgtgagtctgggggcttggcagtggcgggtggtccttggtgccaggctcagatggaggctttctgagggatcatctagcaaggagctgtccagagagctttctgcagtgaggtagatgttacacatctgtactgtcctgggatggtggccgctagctggcctcatctggcgattgtgtcctcaaaatgtggctagtgtgattgaggaactgaattttaaattgtattgcattctacttcttttagatttaaatagttacatgtagctagtggcttccacgttggatggtgcaggtctgacccaacctacttgctttacaagtgaggaaactgagcttcgggaaggtcggccactgtgtggctgtggttactggccatgttgaggctggagcctgggcctcttccgcagggccagctcattcctcccaaccctatgctgcagaggccacttaaattcaccgggtttgcgcgccgcctattggcgacactgtgtttgatctagaggagggaattatggcagcaggctccttcggggagatcagatgactgggcatctgatgggagccaggagggggaaccaagctgactctggagctggccggcctgggtctgagtgccaactcagccattcacccaccctgcagcctggggcaggtcctggaaacttcacgggcctccactccttgcctgtcaactggggctaatcgcgtcacttcaaagggtcgttgtgaggttttctttggtcaccccacacagggagtttagaagggtgcctggcatataggaaggactcggtaatgttagctgctctctcagatctcagcttagggggccattgcccactggagcaggtgtctggaggggcaggctggctgcatgaggaggtgaatctgagctgggagggttctgaaggatggctgcgcttttgctgagtggaaaaaaaatgcggggatatgtgttattggcagagggaacagcttgtacgaagaccctgatgcctaaagcaacaagtgatgggtgtctggggctcatgctcacacaagagcttgaacttgaccccactgaagcaaaagaagtggcttgatgatgggaaagtgagggaaacagggagaccagataggaggctgctgtaaggatgcaggcagaggacgggcgaagcagcggattggtggcgaggataggccaggatttatctttttttttttttgatacagagtctcgctctgttgcccaggctggagtgcaatggcacgatctcggctcactgcaacctttgcatgcatctcaggttcaagcaattctcctgcctcagtctcccgagtagcagggattacaagtgcccgccatcacaccaggctaatttttgtgtttttgttttttagtagagatggggtttcaccatgttggccaggctggtttcgaactcctgacctcaagtgattcacccgcctcagcctcccaaagtgccgggattacaagtgtgagctactgcgcccagcccaggttttatctcaacgcatgttaaatagtagctggcatctgcctggcactttaagatttataaaatgaaaggttatttcatttggtccttacagcagcattgttagcttgtgaggaatttttcactttacagaggaggaaactgaggcttaaggaggccatggagtctgtaaatcgggaagctggggcttgagcgctgtgtgtttcattctgtccagaaagtcaggtgcttgcagaagaggctttgtgcaaggccgcagggcagggcctgtcaggcaggggagggcacctcaccttggcagctttctctctgcctgagtcacactgcctggggacgggcctgctccagggtttggggtgacatactctggggcgtgtgcagatgtgcagtctgccacactgtctatttctggattctcagaaggatctaaatggttctgatctgttttggagattttctcaggcctggatctgatcttgggaaggggcttcaagcgggggcaggtgagcctgggcctgtagagggagggccaggcagggttgcagagaatctctggagacctttggagcagacatccagatctgcagctctcatgcccttccatcactcttccctctctgtctaccctttccctgcccatgaatgggcttctgatttgactggtgcatgttacctgggtctgtctgactcccagcccagcatcatctctcctcttgagggggtggaggagagagaggaggatacaggatctaggatctggagtcacacagaccctgggtgaccttgggcacaccccttctctcaacctcagcttttctgtgaaatggtgataacacttgctttgaatgtgaatagataactcatcttagtgcttgagtgtagtggatactcagtacatcttatttgagaaaactcaccaatggctgatgctcagtttgggtgcgacaaggccgacccctagtgaggagctgcaagggtgtcagggagtggggcggtgacaggggaggaggcttcctgagggtcttcctgataccaggctctgggagaggctctcgggcagctccaaggtggggtcttggtttgggtgttccccacgagcagcccttgacacaaggatttgagttcaatttgttaatttttgggaaattaacaaatttaatttcccaaaaattaaattcgggatgggaaggaaacacctgcaccagaggaatggaaaaatgagataggaaaaaaagccagcagtcagcgtgggtggagggggcttctggaagccagagtgtggccccggggcgtggaactgctgtgtgtcagcaggaatcccctgcctcctggcctggtgcgcacctgcctgcggggcccatcgggcagcagttctgaagtggataggaagggacaggcccactgcctcaggactccaccttggggcgttcgagccacctctgcattggagaacagtccttccatccctctgccagtgcttaggccacttccctaccaccagaccagctctgaggcctgaatggcgtgcagatggcacttagcattccagagaatgcttgtgctggtgggagagccatgtagtcacatgggcgtcttcatcagggagcacgtgagctgggatgacacagcatggggagatgaggaggatgtatcttctgggtataaaccccttaaatgggggtcatcaccacccatgactgtcagcccggcgctgcagctgctcccaccacctccccaaacctggctgctatacccaggaagggtcctggcttcccttctctgtgcctggcctgttgtcttccctcttttcctgagaccctgtgcaccccaacctcccgctggccacctcccagcctgaactctgaccaagcccccatggctcaggatgcgccagctcagctaccttctctctgttccccaaaaaagcctctttttttcctgcctcatggccttggccctccttctccctagaccagtggcactgggaacaggcatgctcccagctaggaagaagccggggacataaagctagcagctgtggtgaggataccagggtgagtgctgagggtgagggacctgggcttcctgtttttaatgattaagcctcagcctcaaaaagcttttgacagcctggacaacatggccagaccctatctctaccaaaatggaaaaaattagccaggtatggtggcatgtgcctgtagtcccagctactcaggaggctgaggtgggaggattgcttgaacccaggaggtcgaggctgcactgagctgagattgtgccactgcactccagacagagtgagactctgttaaaaaaaaaaaaaaaaaagctttgattatgaggttatatctattgatcgttactgtattaaaaattaaaactgaggagtttaaaagtattttaaatattaatatttttatatgaatatttagtactttaaagatttaaaaatattgtttaatattttaacattataaaatgcaagtaccaagcctatcacctgtttacattaagactttttatgaaaaaataacttttccaaaacaaaaatgtactgaagacactggcattattctacattttgcaaatctctttattgtatgactttaaataagccacattctgcgtttgatctgttgttgcattgtgttgtttgggttaaagtaactgaagaactggacgggcgaggtggctcacacctgtaatcccagcacattgggaggccgaggtgggcagatcatgaggttaagagattgagactgtcttggccaacatggtgaaaccctgtctctactgaaaatacaaaaaattatctgggcgtggtggcacgtgcctgtagtcccagctactcaggaagctgaggcaggaggattgcttgaaaccgggaggtggaggttacagtgagctgaattcacgccacttcactccagcctgggtgatagagtgagactctgtctcaaaaaaaaaaagtagctaaagaacatctggcctcacatagacgtgtagttgggaaagggaggagtatcttcatagctttttcagataattatgcatattctttgttatcaggaccagcgcaagaagtggtagttcttaaaggtttgttgtggtgtggaatctgaaaccatgttgctgattccacacgggtctaccttgcactttgttttgtttttttttgttttgttttgtttttgagatgaaatctcactctgtcgcccaggctggagtgcagtggtgcgatctcagctcactgcaacctctgcctcccggttcaagtgattctcttgcctcagcctcccgagtagctgggattacaggtgcccaccgacgcccggataatttttgtcttttcagtagagacggggtttcaccatgttgccaggctggtctcaaactcctgacctcaaatcatccgtctgcctcggcttcccaaagtgctgggattacaggcgtgagccaccacaactggccacactttgaatggatcttttagatgtgtctgatttcataaccacatacatcgatcatttcgaaaatattgtttcaccaagttatgcacgtcttccaagtgttgacacccttcattatataatatcctaaaaaagcacatttgttttctgacctcatcagaaaagtccttagatattaggatgctgtgaccctgctggtggtggatacgcgcttttcaaaattctactcttggattcgttttggctcaattttttttttctttttgagatggagtcttgctctgttgcccaggctggagtgcagtggcacaatctcagctcactgcaagctccgcctcccgggttcacgccattctcctgcctcagcctcccgagtagctgggactacaggcgcccaccactacgcccggctaattttttgtatttctactagagacggggtttcaccgtggtctcgatctcctgacctagtgatccgcccgcctcggcctcccaaagtgctgggattacaggcgtgagccaccgcacccggccttggcccaatttttaaattattgtcagcacgtggtgttttatttttgtgatggattcacttcattgacttgtgaaaaaatgtcttccagatacccaagactgaataaccattgtcagtcgttcttttaattaataatagtggttcaggtgaaaaagtggctagtgcagctggcagcttagagacgagcgcttttcacagagagttgggtttgcagcaacaggcattgtgcacacttcccacgtcagcacacagaagagtagaatggcatgtacttgagtttagatttagtaaaattaggacttttgcaggcgcagtggctcacgcctgtaatcccagcactttgggaggctgaggcaggtggttcacttgaggacgagttcaagaccagcctggccaacatagcgaaaccctatctctactaaaaatataaaaaattagctgggtgtgatggtacatgcctgtaattccagctacttgggaggctgaggcaccagaatcccttgaacccatgaggtggaggttgcagtgagctgagattgcgccactgcattcagcctgagtgacagagtgagagtctgtctcaaaaaaagaaaaaaaattagtactttttacaccttcatcaaggacattcctcagtgaaactggacatctctccttcccgtgagtgtgtggtccgaggatagtgtttgatgctctggccttgactggggctgaggcttcagcagctagttcctcattgcttttgtgccatcagggcaaatgtcaacatagtgaaagggaaagtaacattttagtatcataattttagtatcatgattagttacgacctcgtggatcccccatgggtctcaaggacgtccaagggtcagaggatgcaagctgagaaccactggcctggacatcctcctcctttgtaaactcctccaggccagctcaggtccccccatcataggcttttaaaattctctgctctggaccaggcgcagtggctcacgcctgtaatcccagcactttgggaggccgaggcgggtggatcacttgaggtcaggagttcgagaccagactggccaacatggtgaaaccctgtctctattaaaaatacaaaaattagccggaagtcgcttgaacccaggaggcagtggttgcagtgagctgagattgttccactacacaccagcctgggcaacagagcaagactccgtctcaaaaaaaagaaaaaaaatttctctgctctgttccaccattgcccatgctggtgttgttgataggactatttgatgattgttatctagaccagatggtggttctgttttgctcaccattggggtcctggggcctggcccaggtcccagtacactgtagacacttgatgaatatttgttgacagaataagctgctttgtgttgggccccatgctgggagtttggggcctggagctgcagcaaacattgtccctcttctcgagatattcccagcccagtgaaggtgcccagccgtgctctcagatgggcatgggaagaccatctgggaagcagccggggacatgaagccagcagctccgataaggacactagtatgagtgctgaggggagggtcctgggcatggtgggggctccacggctagtgatgggagcagtggccaggcccttgctggaacccggtcccctggaccccttagagtgggacctgtgtggtctctgatgagatcttttgtgcctttcttttccccctcaggtcacagttacctggagaggctcctgaatgttgaggtgccccagaaagttgggtgagttcagttccagggcttcggaggtaggcagggcataccaggacagggagccaaggtgagcaccagggctggaagcaattcctgggctgagtcttccccactgagccttgaccgcccaggagctgccccgttttccctgtctgaccaggcagtgagtgatgtgggtgttggccacctggtctccttgcagcacccgtcagcgttgctggttgcctggctagacctgaccctggggcgtgggctccagaggttgggggtgaggcggggctgccaggaagagctacattcaaactggctggggtaggataggagtgctccaggattacacccagtgctgcttcgggccaggacacagactccttttcctggaggccgtgtcctgccatcactaaaaccagccccctccctccttgctgcagagcagagggtttgttcttgggacggggaaacagggtgacagggcagacctgctggccttgccagccccatggtgaatagagaacagaccacaaaagagatgcagctcacctgggcccaagaggtggaggcggagctgaggacagggctcacatcctgagacagctctgtggtggggtgccagggagatgaagccacattctgaagctgacatccctcgtctgtccatggagccattgccgggagctgccatcctcctatcctacagggggctgtgggttcgtggccctggccagggcaccttgtgttgacctcttgggtccccatccctggaatggtagagggactccctagggggagggcttggactagctgggcagtcccctcagagtccctcttctgttttcagttctgagcagaaggaaccccccgaggaggctgagcctgtggcggcagctgagccagaggtaagacggctgcctggggaagggaggactcacctctggggctcccgctctgcactgcggccatcctgggccttgggttccaggtcaagacccctaaagccttggttctttccacaggtccctgagaacaacggaaataactcgtggccccacaatgacacggagattgccaacagcacacccaacccgaagcctgcagccagcagcccggaaacaccctctgcagggcagcaaggtgaggcttcctgacctgccgtgtgcagtgcccggagccacagcgggccttggcggcctcggcctgaccttctctctggggataaggaagccccattttctgggccagtaggctaaagagaaattaaacctgggggtgcagagatcccttttgagtctgtagacttcacctcccaccgttgggctggagctgtcactgagtgcagcatggggggctgtggctggttgggacaggaagcagaggaaggggctgcatcggggtatggatatgaagaggccaggtcaaggccttgaccttgactccaggggccagtgggaagagctgtgggctggggattgaacaccccacctggcctcctgctttgcctcccccgccagctcctttctgacctttgtatgtccatccttgtctaaagagggctggagagcagtgggtttgggagtgtcccagggtcctgctcacatctccctgagaagggtgcctctctctggtggaaagtgcactgtagctgtgagatcttgaacacggcctcctcctctttacgacgtggtcagggacaatggtcatgccagccctgcagccccaagggctgctgtgaggaacttttggagtaaggtgcaccttctcctagcagtgaaacaaaacaatactgaccctacaccctccatgttgaccctgcagcgggagctgccccctcctgctgtcatggccacaccagctgcatggcccaggaggggtggaatttagaagctgtgcaaggggcttggagctcctgcttctacaaggcgtccacacactgttcttcgtgtcagaggtgggtggggcacgtctggggctgccgcctcgacaggaccgtcccgccctgccttgcctatcatagagccaggcactcgcggggaggtgttcgtgagctgggggtagccaggccctggcatctgtagatttgtatttttagtagaggccgggtttcactatgttggccaggctggtgctgaactcctgacctcaaggatccgcccaccttggcctcccaaagtgcttgtagattcctcaaggctagtcagggttaaggctgatatgtctgcgtttggccaccccggagctgccaggaagggagccttgcccactgccaaggctgctgcccaaggaccccttccccctacacccccattcccaccctgccgccgccatcgtttctgcagccttgctgaaattgctgtcttcacagaggccaagacggaccaagcagatggacccagagagccaccgcagagtgccaggtttgcatccgggaaggggtgtgtaggtaactctgagggccctggaggatgtggccttgtgtccttgctcagggaaggtggatgtgtgctcaggggcttcagagcctctctgctggggtgtggcctggtgttgtgacttaaccaaggaggcggctccatgctgtggatgagcgcaaacctgggaatagggcgacccgattgttgaccccgtcttagtgtggtctcctggccatgtgaccttggactgttcacctcccttcctctgagtgggcagcagagggttgcttaggctctgcagcctctttcagtctagaggcctgtggcctgggcccggtattgttcaccggggtgacttttgatggggtgtggctgggctgtggcgggctgccctgtgatgccgccgcccgcgccttggcaggaggaagcgcagctacaagcaggccgtgagtgagctggacgaggagcagcacctggaggatgaggagctgcagccccccaggagcaagaccccttcctcaccctgcccagccagcaaggtgagccaggcacctgccctctcctggagccctgacccccttcagtaccctgccccgcctgcccacttctgaccctggtcctcgtctgcaggtggtacggcccctccggacctttctgcacacagtgcagaggaaccagatgctcatgaccccgacctcagccccacgcagcgtcatgaagtcctttattaagcgcaacactcccctgcgcatggaccccaaggtgaggggcctgtgcccaggccgggctttgtgggagctgggcagtgtggctgaaggtccagtctgtcctgtaagatactgggagtagtgtgagcctgggcggaggcaagtgtggcctggcactgttaggggccggttgaagcctctgtggccaccagctgtcttgacctctgagggcactgtcctgcacttgaccttgtgggctctggactacagcctggaggcttggccggctcaatgtgagccctggggatctgtgtagttaaggtgagaggtacttgtggacacctccaccactggggtgagggttgggtgacaggagaggcggtgggggtgctgctggcaggagggcaggccccacgcaggcttgctggcacagctgggcatgtggcctgcccggcaggatgctccccggcctggcattaactcttgccttttcccttgtctcctccacagtgcagcttcgtcgtaagtaaagccttttcctgtcggtaacctcgccccacctagcactcacccgctgtagccccttccctgcgtagctgacagcacctgtagatgcactaacattgtaagcgggaggggagccttaggaagagagtgggacggtgaggggtgcactggctggaggcgcccagcagttctgggccccagcgtccttctctgccctccctgcccttgactctgctcttaggaggaagcaagggggtgtggcttttcaccagggctacagcttgatgtgttctccacagccaccttccctccctcctcccctgcaccaggccccgtcagggtctgtgggtctttgaagagaacagacaggttgtctgtggtccccagagctactgagatttattggttcacagacctgagcagtagccttgaggcagtggggtgatgggggagcgcaagtgtgggtctgaactgaggtggaagtgctgggtcttgctgtgctgggtgacagtagaacagtgggtggtagcgtctagaaacaagtcgcagaagctgttctcttctcagacacctcagagctgagccgagccaggctggccctgagcaaggaccctcagatggggacatgcttagcctgcagccccagctccccgtgccatttgccaaggccacagacacctcattcctttagttcctgcaagccttctgaagggtcctctgcagccacacagggacacctgtgacagccgggagggcttctgcctccagttgagggcctcggcaggtgagaggggcttcccagcagctggccaggtgggccctgagctggcttctccgcatggaggcctgttcccctcttgttggagagggtgactgacagtataccttccagtggccttaccacctgtgccgattagagccctgcaggtctcacagggtgatagagaagaccaggaagtggtcccctttcctgctttggggatcccaggtccctgcacaaggcatctagtgggtggggacagtccatagttaggagaccagggggctacggagtcattttggactgcatcctgaacattctgctatgagtctctgggtcttgtttaaatctatggacaatgttgatattttctcagcattgcaatttagtagcaattgacctggttaggtttaggctgcaggttcccatctgccttctgtggactctggttccaatgttagtcccgattttgaagatggcagtgctgtttggacttttcccgggtgtgtgccagtcagcagtcagcctgggacttggcaggtggtctgttagtttagttctcagccttcggtgtggtaattaggatcagatcctagcatctgcagcttagagctgagcctgggcgttcgtcaataacctgcagcatcattttcccgatctcctctggggctcccttttctgtcctccagccaggaagctggggcttcagttaccttgttctgctttgtgtgcttctacgactgtgtccagggccacctgccagggggacagggaaagaacaacacataggatttggccacacttttgggatcacagctcctcctctgagttttgacttggcagctttctctgtccagggtcgcctggcagggggacagacagaagagcaacacacagggtttggcccacacttttgggatcacagctcctccctcgaattttgacttggcagcttttcttcaactgctgctgcccctggttgccataggactgcttgtgggctggggcacaaggcaaagaagaaaagagaacaaacaaaaatgggatttctgccttctctgagcattagatactccctttctgctgcttgagtcaggactagagggcttgtcctggaattctttctgtccgtgccccagtgactcctttggagttccaggctgtgttgagttaggctggagaaaaacaatggagaactcactgctggttggctggtgcttccaagtctggtcttcttccctatctgcctgctcctctttagttttcagaggcctcaagtagccgctccttgcattctgtccaggttttgtagctgcattcagtgggagagagaggtggagtatgtccactccatcttacccgttcccgggaccccttctctccgtctttgggaggatggtattaccttggagccagatttctaggcgagagtgctcctccagttaggctcagaagccaaggagaaatcgatagtaaccagtacaggaagagggggaagctattggacactgtgcctaaaggtgggagtctactgggagccaggttggggtgatgggtgtggggcttccctctgggtcccagcctccacccagccccagactgttcaaggggaaagcactagccttgtccttggccagggagggcttagagcccctgcccatccctgctggctgcccattgctgtggctgtgcccctgggactttctgtgtctgcccaggagggggtgccagcatcaatcagcttttcagccaactagtacttttttaaagttgccttaaaaatgaacatagccagctgggcgtggtagctcacacctgtaatcctagcactttggaaggccaaggcaggcggatcccttgaggtcaggagttcagcaccagcctggccaacatagtgaaaccccacctctactagaaatacaaaaattagctgggtgtggtggcacatgcctgtagctccagctactcgcgaggctgaggcacgagaattgcttgaacctgggaggtggagggtgcagtgagccgagatcgcgccattgcactccagcctgggtgacagagcagactctgtctccacacaaaaaaaaaaaagaaaaaaaagtgcatagccatgtcacaggaagtttggaaaataaaagaaaattaataccatccctaatccatctcactagactgttagcatttgtcaatatttccttttatttttttcaactattatgaaatagttgatatacacaatagaatatatgtatacatatagtatggatattataaagcatgacagtagtaagttaaaccttgcatctgcaccacccccttactagaacattcaccatgattgggagagctgcctttctgctcctcacccttccaagctcatccttcattttctttttcaatgcacagtttatgtagttgtcattagcacataaatcctatttggagcctgacttttgtgttgcccaaaacttggcagggctcaatggagggcactgtggctcaggcccttgcgaggtagctgagtgctcctgggaggaaaggcgggagctgcgggccttggcttgggtgctgttggggccacgttggggatacctctgcctaagaagcattctgatgctgccacccacgtggctgcaggctgctggggactgtgggcagcttttggggctgggtggggggtcgtccttgctcatgtcccatctccctcgctccccgccaccccaggagaaggagcggcagcgcctggagaatctgcggcggaaggaggaggccgagcagctgcgcaggcagaaggtggaggaggacaagcggcggcggctggaggaggtgaagctgtaagtggcctggcttcctggactgtggcccatcccagccttggtggggctccccatgactatcctatgccccgcaggaagcgtgaggaacgcctccgcaaggtgctgcaggcccgcgagcgggtggagcagatgaaggaggagaagaagaagcagattgagcagaagtttgctcagatcgacgagaagactgagaaggtgggagcctgggctgtggaggcccaggcaattcaggacttgggccaagggttaggactggacccctcaggaaattgcagatttgtcactgtacccctgtacccatctcctgtctgccccatgggccctggagtccactcagctctgggtttccctggcagccctttgtgagtggggtctgacactcaggcaggaccggcttctggtgtcctctccctgggtggtgggaacaagccaggtgtgcaggggcaggtggggcctgtcacacacagttctgggctccactctgcaggattgaatgtgggtgctccaatgggcatgtgtgggtgggctctgcaggccaaggaggagcggctggcagaggagaaggccaagaaaaaggcggcggccaagaagatggaggaggtggaagcacgcaggaagcaggaagaggaggcacgtaggctcaggtggctgcagcaggtgcgagcacaggtgggcctcagggaggaggtgggcggggtgggcgctgtctcagcaccatggggccctactgggtgcaccccaccttgtggggttgacccagaccatcttgttgcttcatgctaagaaggaggtttcccagaagtctccagggcggggatggtgaccagaatctgcctctcctgtagcagcagtaatttgagggttaagtgcttgtacttggagccagactgcctatctcagctctgccatttattagctgtgtgactttctacaggctgcttgacctctctgcttccatgtcttcaagtagcagtgagggttaaatgtgttaatgtctgtaaaatgctcagtagtgtctgatgcctgctaagagttctatacaattgctgttatggtccaccccctgactgttctgcctataagagtaagggcccacctcttcccagccagtcttaggactctagagaaggcaaatccaccattaggggttatgtgactagtcaccaaggtcagttatttactgtgtgctaggccctgctgtgtgttgtgcgtatcaacccagcaaccccatgaagtgtaggaataactgcagtctccattttatagacgaggaaacaggccagagggtttaaatgcttgcccgttgtttcatagctagcgagtttggctccgaggttcctttctgctaaatctacagcagcagcagctgtcacaagatgccttttcaggctgctgctggtggttctggcagagccttgctcgggatgtcccacggcgccattcctgggttgtccgtggtggtggctgatatgaggggcacctgggcttcgggggagtagggctgctgtcctgcctctctggcctgggcctggccgcagcacctgaccttgctctctgtttcaggaggaggaagagcggcggcaccaagagctgctgcagaagaagaaggaagaggagcaggagcggctgcggaaggcggccgaggctaagcggctggcagagcagcgggagcaggagcggcgggagcaggagcggcgcgagcaggagcggcgcgagcaggagcggcgggagcaggagcggcgcgagcaggagcgacagctggcagagcaggagcgtcggcgggagcaggagcggctccaggccgagaggtgagggacctgctggcccgcctgcctgccttccatgtgtgtggaagagagacggtgtgaaccttgcctggacacagccccacctgcatgtgacggtttgcaggtgctttccttggcaccaaacccagaggcccacctgaatacactgcccattggctatgggagatccaaggagtgataggtgggcttgcttagggcttggcttggttctgcctccagctgcatgtgctgacctcttaggtgtctttttgtaactgtcaggagtgtggtgctcagaggatgagctgatatttctcagcagggccaccatgggcattttgggcaggaaagatctttgtgttacattgcaggatgtttggcatccttggcccctgtccccactaaatgcatctcccctggtgaggacgataactcagattaccccctaccgatattttcagactgttcccctgccttgggaaccgtggacccaggagccctgggattttccagctgtgcagatgcagtggtctctgtacaatagacaagagttccatgtttagttttacaggcatttgtccctggcctaccctgtgcctggttgttctgagagtcgtggggatgccaaggaggaaaagccacactcactgttggtcaggagatacatgggatcctgtgtctgtgtgcacagaagtagagcacaaggcccgtgtgtgtgagacacgcaggccccgtagctgttccctctcccgctctacctcctgggaaacaccgggcagcacgttttttccgtgtccatcttcgtgggtggcttcaggtttatcagataagtgaagagtcacagccagggggctgcactgagtcagggctgcttgatggggacaaagctgtccttggtcctctgggcagagtctgggaaggcgagaaggcgtagggtgtagctaatgtgcagggtgctgggcagagcagggggctttgagggtggcggtgtgatagtcatagtgtcggcagctttggtgggtacccgagctgcatgctttacacctgtttccttgtttagtcctcagttgaagcccatggtggcatgggagccatcagctccacttcacacagggggaaacaggtccagagaggttaaatgacatgttcaaagtcatgagccagtgtgttgtggaggtgactccagaactcatccacagcctcttgttcatgcttggagccagtgtctgccctgaaggttaggataaaaaggggtattgtggattatcccatttgattctcatgttgaccctggaggaaatgtgttatggtctccattgtataaaagtgttatgaggctcagagacccaagttacaaggaaaagtgggggccaaatgttgggctccagcttgtgttccctgcaccctcaggtgtgcacacttctagccccggggcaaaagcgcagctcttggctctaagctggttgcccattcagcaatcccactttctaaggtgtgtcctactggctgggcctggtttccccagcagggatgggaacagggcttgggctgggcctccacttcctgtcctaacaggctcttgctgggtcctcagggagctgcaggagcgggagaaggccctgcggctgcagaaggagcagctgcagagggaactggaggagaagaagaagaaggtgaggggagctgggttgcgggctcccctggggtctgccctgagctgtgggcgggtctggactcctgcagcaggggctgcctagggaggggagggaaagggaggagaatggagcggagggaaggggaggggagggaagggcacctgcacagctccctaacaccccattgccacctgggttccaggaagagcagcagcgtctggctgagcggcagctgcaggaggagcaagagaagaaagccaaggaggcagcaggggccagcaaggccctgaatgtgactgtggacgtgcaggtgccacctgggccccagtggagaggctctcaggtggaggggcccactctattctcttcccagtagctagaggcacaggctgtgttaggcccctaaggaaaaggacagatacacttggcccaattgtttttacttctttttatattctttgttattctaaaagtagaatttgttgaggtgggggataaaaaggaactaaactttatagaagagtatacagttttaaaaaaagggaccctcaggaaaactctactaagcgcgttgtatatccttctagatttttacttatgtaacccttttaacacacacacagatatcctctctctctctctctctctttcacccatacacatacatatttaaaatgggcacataccatttggtggcttgatttccaggcccccaacccccatggttttttttcacttagtatattatagacatctgtctatttcaacacaggtcaatttcttagttttgatgactgtgtaccttaattgtgctggaattcagccggctcctcttgatgagcatttgatctattttcacttcactgctgttaccaaacaaaacaatgttttcattgcagcattgttaagatgtggaaaacttggaagttagtatggtatctgtcaatgatggatggttacgttgcaaatcctggagtctccttagtggttcccgggaggattctagacacactgacctggaagaaagtttgcaatacaccttagcatcaaaaaaggagatacagagtcgtgtgtgttctgtgactttttaaaattaaaaagtaggcctggtgcagtggttctcgcctgtaatcccagcatattgggaggccaaggggacagattacttgaggtcaggagttcgagaccagcctggtcaacatagtgaaacccagtctctactaaacatacaaaaaattggccgggtgtggtggtgcacacctgtaatccagctacttgggaaagctgaggcatgagaatctcttgaacctgggaggcggaggttgcagtgagccgagatcacaccactgcactccagcctgggcgacagtgagattctgtctcaaaaaaaaagaaaaagtgatcctgcaccttttgtttctcctgtgaaataggaggaggtgagcagtgccccagcactcctcggtggtgagagatgggaatgccatggagggaactgacggccacgtttgtttttgcagtctccagcttgtacctcatatcagatgactccgcaagggcacagggcccctcccaagatcaacccagataactacgggatggatctgaatagcgacgactccaccgatgatgaggcccatccccggaagcccatccccacctgggcccgaggtaagcaaagcccacagctccctgggagactcaggccctccctggtcctcaccttgagggccctggaagtagtgggttggctgctgcggtgttgggaggctgccgtgtgcttcagttggcagttcgaggctctagccttgggtatgcatgtgccctggggagtgtggggcaccctgtggtcattgtgctttcctgaggaccagacctatgaggttgggttcctttgttctcaacaaatatatgaaattgtgctgggcttgggcatggcatatgctgctgggtgtcctgacttggactaggcccttccttagagtcccatccagcagggctgaagagacttggacctaagtaagccacctggggcagaggcagagctagaatggggaagggtttaggcagaacaccaagctggagcctggggcttccagccagctcggggaggcaggaaagtccctgaggagtgcatgaggcacttgagcaggatctgacctggagtttacaggccccagcattaaaccagaatgtgggtgagcgtgactgcaatgtctcaggcctgagtgcaaggccagcttgagtgagcagggtaggtgctagaagtgggtgctgccagagtggatggggcccgtgggtaccatgggtgccttgcagtggttgctgagccggaagtcagggaggggtgcagacgccccagagggaagggcctggaatcccatagctggtaggcacactacagaaacttgtttttgtgagtttcacctcatctgaaccctacagtaactggcatgtgctttaagcctcttaactactagtgtcaagtcatttgggagatggcagtgagcaggagccagctcgcttgcaaagccatctaatcggaggtgactttgaacagcttacttaaatagtttcctcatccgtgaaaggggggtgaagacaagacccagctgaggagttctattgagagtgacatgagtgagctcacggctggcccttagagccgcacctggtgctgagcaagtgctggtgcatgtctggcctcctgatcccctgggtcttcctcagccccgttgtcaggactgtgccttcccacatccactgcccagaggccccctcagcactgcaccagggcctgtggggtctgtgagaagcagctggccaaggtggtcaaggatggcatcctatgcttaagctctggaactgggcttgtcttcaaacacaggctctgccattattagctgtatgcctttgggcaaatctgctgaatgggagaatacagaacctgcctcccaggtggtggtcgggacaggttcaaggagtgcctggctcatgcgagctctcaaggactttgtaaggttaagctgccagaggaaggttggaaggatgtgacacaagggcgttctctgggtttgatggtggtacaggcaggggcagggctgaagagggtgacagagctctctgtagggaggttggagagggtgacagggctctgtggtgggcaagggatggggaggttcatggagagccccaaggcagtgtctggtctgtggtctcctgcaggcaccccgctcagccaggctatcattcaccagtactaccacccaccgaaccttctggagctctttggaaccattctcccactggacttggaggatatcttcaagaagagcaagccccgctatcacaagcgcaccagctctgctgtctggaactcaccgcccctgcagggcgccagggtccccagcagcctggcctacagcctgaagaagcactgaggctggcctgcggccttcttggcagcctcgcctcctgtccatgtctatctgtctgtctgtcggtctctgtcttggtctgttgccctccttcttggcatgccattgtggagggcttggccaggtgtatataaacgtcctctgtgctgggtgtttctgctgcaggtggcaggtggccccaggcctgtttggaggatgggctgggtgggtgggtggggaagaaatgggcccagccccacatggcctgcagacagtgctctgtaaatagttgttttaatttagctgaatgttagcattttagtctttggcattttagcgtttgggaggtagattaataaagtatattccttcaagcctgctgttgataccatgaagactgggcgcctcagtcccagccctgtagctgtgtgtcttgggccaccagtggcctgcaggacgaaggtactgttccatcacctgcggtgtgcctcaggatcaccaggtgcaggcccccaccctcggagatgctgctgcagtgagtggttccactgcctggataacccttgaggaacacgtcagttactgtcacgatggggcaggtggagctccttcctattttttggggtgctccctgtttgtaaaggggagtttgttcattgggaaagacctgggtcttgacacggccctgccacttagtcccctaccctctccattccccaggctccacccgtgctgctcaggtgcaaatggacttgagagcatctatgtgctggtgaagcatgaggtctgagtagaaaaggggtatcccttgagaccaccttgggaccagtgcttgcaagcagcgagatatttccccagcaaaaccaggcagctgctaattaaatgcttagaaccaatgaaagctggctgtggtcctgcctgtgagctgcctactgctgccttctgaatgcatatatctgctactgtagccccgggttgtcaaactatggcctgtgggccaaatccagccacagtcggttctttaaagttttatcgaaacacaagcaatggaaatgcccatttccattgttgtctccagttgctctgctccgagggcagtgttaagttgtgcagcagaggcccctccatgcaaagctgaatatgtttactatttgaactttttcagaagttctgcttaaggacaaaataaagcctaaatccaagaacacttttaaaaatgaggaaatagtgaacacaatagacggaagtctggaagtttctacccatgccaagaaaagcattttatgttttgttcacatatgttgtgcaattcaaatttttttccctatattctctgactagacacttgtactgagtcaattggcgagtgtgtctgtctaaaagcacaatatcaaaatatcacttaaagcatctttacatagtgtgtttaagaaaaagttgttattcagcagaaaggtaattccaattggtctgcatatttatcagcacttggtattgtctgtttcttattttagccattctgataggtgtgtactgatatctaatcatggctttaatttgaatttccctaatggctgatggtgaacatcttttcatgtgcatttctgtcatctgtatgtctttggtgaagagtcttcaaatcttttgttcatcttaaaattggattgttatattaccattgggtttaagaatctacatattatggatacaaatatgttgtcagatatgtgttttgcagcattttctcccagtctgtagcttgtctttaaaaaaaaaatttttttttttttttttttttttttttagagatgggatcttgctacgttggccaggctggtctcgaactcctggcctgaagtgatccttctgccttggcctcccaaaatgctgagattgtaggcatgagccgccatgcctagcccagcttgtctttttgtttacttaccagtgtttttcagagaacaaaaattttaatttgatgaagtccaattaattaaatttttaaaatagagtgtgatttttttgtcatgtctaagaaactattgtctagtcctaggtcctaattctcctttgttttcttctaaatgttttattattttacatgttaacgtttagatttatgatctattttaagttttttttaagtatgaggtttatgttttttgtttgtgtttaggagcatatggatggatgtctagttgttccagcaccatttgttggaaagactatcctttctctgctgaatttcttttatatctttgtcaggaattagccatattggtatgggtctatttctagactttttattttctcccattgatctgtacatctctccttttgccaataccacataagtcaagatgactatagctttgtaataagtattaaaatctggtaatataattcttccaattttatttttcttttaaaattattttgactattgtatcagtgttacctttccatttaaattttaggattagcttagctacaaaagtcctgctgggattttgattagaattgcattaaatctatagataagtttggggagaattaacatatttatgatcgccttttaatccgtgaacatgacgtgtctctccatttatttgcatgtttagtttctttcttcagcattttatagttttagcatacagatcttgtacatattttcttagatttgtaactattttcttggagctgttgtaaatggtattgtttttctgatttttggtttctacttgttcattgctggtgtatagaaatacagttggcttttgtgtcggctttgtatcccgtgatgcaagtaaagcagtactgaggggaatttatagggctcaatgcctgtgttagaaaaaaaggtctcaaatcagtgacctcagcttccactttaagaaactaggaaaaaaagaccaaattaaaagtgtacacagaaaaggggaaatcatgcaagtaaaacagaaattagacattaggaagagaaaatatagaaaattaattaaccaaaagctggttctttgagaagctcaagaaaattctctttagactgatcaggagaaaagatagattaccaatgtcagaaattaggtagcttcactacagattctacagatattacaacaataataagagactattacgaataacttctaggaatacatttgacaatttagatgaacccatgcagattccttaaaagatacaaattagtttacttaggaagaagtggaaaacctacatagctctatgaaagatgtgttatcacaaagaaaacggtagacataggtagctttagtggtaaatgttgccacgtatttaagggaataatactaattctgcacaacctctcacaagaaatataagaggaaagaatactcagttctgtctctgaggccagcattgctttgatccccaaatcagacattgcaagaaaagaagacaattatccctcatgaacatcaacacaagaattcttagagttttatcaagtccaacaagttaaataaaaaggattacactttttgttgttgttgttgttgttgttggaggcagggtctcactctgttgcccaggctggagtgcagtggtgggatctcggcttgctgcaacctctgcctcctgggtttaagaaactcttgtgccttggcctcctgagtagctgggattacgggtatgcaccaccagcccagctaatttttgtattttcagtagagatggggttttgccatgttggccaggctggtctcaaactcctggcctcgagtgacccacctaccttgtcctcccaaagtgctgagattacaggtgtgagccactatgcccggccaggataatgcatcttgaccaaacagagtttatcttaggaatgcaaggcaggtttaacatttggaagttaatgtaattcactattaattatagaggaggaaaatcatatgattaaattaatagatgcagaaattcaatgatttgatgattccatactagtaatttaagataaaagctttaagatttaaagggaatttcctcagtttgatagggcacttctacaaaactccagcaaacacttcctagtgaatgtctagatgcattcctcctgctaccaagtcaagtacaaggatgcccactctcattccttctgaacattttatggtagttctggccagcacagtaaggcaaaaagaaaaaggcattgggaaagaagaattaaaacctgccagagacaacttgtagaaaatctgatagtatctacctaaaagctattaggattaatatgggcttggcatacaaggttaatatacaaaaatctattgtatttctatgtactagccatgtgcaaccaggaattgaaatttaaggaatacagtttataatgtccaaaattatcaaaatctaaggaataagtctgacaaaagatcaggaagacctgtgcaatacagtgagaacttcaaaaggttgctgagagaaatcaatgaagacttaagtgggatatatactgtgttcatggatcagaaactcagtgtactgaagatgtcagtttccccctaaaagatttagcccagtcttaaccaattccaaatggccttttatttatttatttattttggagagtgtcactttgtcgcctaggctggagtgtagtggcatgatctctgcctcccgagttcaagtgagtcttgtgcctcagcctcccaagtagctgggactacaggtgtgtgccatcatgcctggctaatttttgtatttctagtagagatggggtttgctatgttggtcaggctggtctcactctagtgatacacctgtcttggcctcccaaattgctggaattacaggcatgagccactgcacccagccccaaatggctttttttttttttttttttggatagaagcttatgaaaaaatttggttttacaatttatatttatgctgggtacagtggctcacacctataatcctaggacattgggagtctgaggtgggtggatggcttgagcccagaagtctgagaccagcctgggcaacatcgtaaatccctgcctctacaaaaaatacaaaaattagctgagcacgtatctgtagtcccagctactcaggagactgagatgggaggatcacgtgagcctgggaagtccagactgcaataagcagtgattgtgtcactgctctccggcctgggtgacacagcaagaccctgtctcaaaaattgtatttaacagcataggacctacaatagctaaaacaacttaaaaataacaaatttggagaggtcacactacctgcaaggctcacttcaaagctacaggaggagattgatttgagtaataataaaactccgatctcccgcacagctggctctgcatgaattactctttctttattttgattcccctgtcttgatgaataggctctgtctaggcagcgggcaaggtgaatcccttgggcagttacaaatttgggggctcatctgggattgcgcttgtggctacatgcttgtggttcggtggacccccttcagtgatggatccagtgtcagcccaagcggctgcctagttctcaaagctacaagaatcaggatagtatattggtataaaggtagtcatagatacatgaaattttatggaatccagaaatagaactacacatatataatcacttggttttggcaaaggtggaaaggcaattcaatgggggcagcataattttttcaacaaattgtcgtggaacaactggatacgtttttaaaaagctccagcccttcttaacaccatatatcaggtttaattcctaatggatcataggcctaaatgtaagagctaaaaatacaacactcctagaagaaaacggattgctgggaagatggccaaacaggaacctctctagtctgcagctcccagtgagattgaggcataaggcaggtgatctctgcatttccaactgaggtacccagttcacctcactgggactggttggacagtgggtgcagcccacagagggcgagccaaagcagggtggggcgttgcctcacctgggaagtgcaaggggtcggaattctctccctacccaagggaagccgtgagggactgtgcctgaggaacagtgcactccagcccagatactgcacttttcccaatgtctttgtaacctgcagaacaggagatcccctccaatcctacgccatcagggccctgggtttcaagcacaaaactgggtgaccatttgggcagacactgagctagcagcaggaatttttttttcccataacccagtggtgcctggaacgccagtgagacagaaccattactgccctggaaaggggctgaagccagggagccaagtggtttggcttggtgggtcccagccaccacagagcattggtgaacatgaaagtgacagggagaatggaaccaagttggaaaacactcttcaggatattatccaggagaacttccccaacctagcaagacaggccaacattcaaattcaagaaatacagagaataccacaaagatactccttgagcaaccccaagacacataatcgtcagattcaccaaggtggaaatgaaggaaaaaatgttaagggcagccagagagaaaggtcaggttacccacaaagggaggcccatcagactaacagtggatctctctgcagaaaccctacaggccagaagagagtggggggccaatattcaacattcttaaaagaattttcaacccagaatttcatatccagccaaactaagtttcataagagaaggagaaataaaatcctttacagacaagcaaatgcagagagattttgtccccaccaggcctgctttacaagagctcctgaaggaagcactaaacactgaaaggtacaactggtaccagccactgcaaaaacataccaaattgtaaagaccatcaacactatgaagaaaattcacaactaacaggcaaaataaccagctagcatcaaatttgacaggatcaaattcacacataacaatattaaccttaaatgtaaatgggctgaatgccccaattaaaagacacagactggcaaattggataaagagtcaagatccatcggtgtgctgtattcaggagacccatttaacgtgcaaagacacacataggctcaaaataaagggatggaggaatatttaccaagcaaatgctaagcaaaaaaaagcaggggttgcaatcttagtctctgataaaacagactttaaaccaacaaagatcaaaagagacaagggcattacatagtggtaaagggatcaatgcaacaagaagtgctaactaccctaaatataaatgcacccaatacaggaacactcagattcataaagcaagttcttagagacatacagagagacttagactcccacacaataagaatgggagactttagcaccccactgtcaatattagatagatcaatgagaagaaaattaacaaggatattcaggacttgaactcagctctggaccaagtggaccttatagacatctacagaactctccaccccaaatcaacagaatatacactcttctcagcacctcatcacacttatactaaaactgatcacataattggaagtaaaacactcctcagcaaatgcaaaagaatggaaatcataacagtctctcagaccacagtgcaatcaaattagaactcagattaataaaactcactaaaaactgcacaactacatggaaactgaacaacctgctcctgaaagactactgagtaatgaaatgaaggcagaaataaagatgttctttgaaaccaatgagaatgacacaatgtaccagaatctctgggatacatttaaagcagtgtgtagagggaaatttacagaactaaatgcccacaagagaaagcaggaaagatctaatatcgacactgaaacatcacaattaaaagaactagagaagcaagagcaaacaaatcaaaagctagcagaagacaagacataactaagatcagagcagaactgaaggagatagagacacaaaaaacccttcgaaaaaaatcaatgaatccggagtcggttttgtgaaaagatcaacaaaatagatagacgactagccagactaataaagaagaaaagagagaagaatcaaatacacgcaataaaaaatgataaagaggatcctacagaaatacaaactaccatcagagaatactataaatacctctacccaaataaactagaaaatctagaagaaatggataaattcctggacacatacaccctcccaagtctaaaccaggaagaagtcgaatccctaaatagaccaataacaagttctgaaattgaggcagcaattaatagcctaccaaccaaaaaaagttcaggaccagatggattcacagccgaattctaccagaggtacacagccgaattctggtagaaggtaccattccttctgaaagtattccaaacaatagaaaaagagggaatcctccctgattcattttatgaggccagcattatcctgataccaaaacctggcagagacacaacaaaaatagaaaatttcgggccaatattcctgatgaacattgatgtgaaaatcttcaataaaatactggcaaactgaatccagaagcacatcaaaaagcttatccaccatgatcaagttggcttcatccctgggatgcaagcctggttcaacataagcaaatcaatcaaggtaattcatcacataaacagaaccaatgacaaaaaccacgattatctcaatagatgcagaaaaggcattcgacaaaattcaacacccttcatgctaaaaactctcaataaactaggtattgatggaacatatctcaaaataataagagctatttatgacaaacccacagccaatatcatactgaatgggcaaaaattggaagcattccttttgaaaaccaccacaagacaaggatgccctctctcaccactcctattcaacatagtattggaagttctggccaggccaatcaggcaagggaaagaaataaagtgtattcaaatatgaaaagaggaagtcaaattgtctctgtttgcagatgacatgattgtatatttagaaaactccaccatctcagcccaaaatctccttaagctgataagcaacttcagcaaagtctcaggatacaaaatcaatgtgcaaaaatcacaagcattcctatacaccaataataaacagagagccaagtcatgagtgaactcctgttcacaattgctacaaagagaataaaatacctaggaatacaacttacaagggatgtgaaggaccttttcaaggagaactacaaaccactgctcaaggaaataagagaggacacaaataaatagaaaaacattccatgttcatggatagaaagaatcaatatcgtgaaaattgccatactgcccaaagtaatttatagattcaatgctatccccatcaagccgccattgactttcttcacagaattggaaaaaactactttaaatctcatatggaaccaagaaagagcccgcatggccaagacaatcctaagcaaaaagaacaaagctggagccatcacactacctgacttcaaactatagtacaaggctacagtaaccaaaacagcatggtactggtaccaaaacagatatatagaccaatggaacagaacagaggcctcagaaataacaccacacatctacaaccatctgatctttgacaaccctgacaaaaacaagcaatggggaaaggattccctatttaatacatggtgttgggaaaactggtagccatattcagaaaactgaaactggaccccttccttacagcttatacaaaaattaactcaagatggattaaagacttaaatgtaagacctaaaaccataaaaatgatagaagattcttaggcaataccattcaagacataggtatgggcaaagagttcatgtctaaaacaccaaaagcaatggcaacaaaagtcaaaattgacaaatgggatataattaaactaaaaagcttctgcacagcaaaagaaactatcatcagagtgaacaggcaatctacagaatgggagaaaatttttgcaatttatccatctgccaaagggctgatatccagaatctacaaagaacttaaacaaatttacaagaaacaaacaaacaaccccattaaaaagtgggcaaaggatatgaacagacacttctcaaaagaagacatttatgcagccaacaaacatgaaaaaaagctcatcatcactggtcattagagaaatgcaaatcaaaaccacaattagataccatctcacaccagttagaatggtgattattaaagtcaggaaataacaggtgctggtgaggatgtggagaaataggaacacttttactatcagtgggagtgtaaattagttcaaccattgtggaagacagtgtggcgattcctcagggatctagaactagaaataccattctgtccagcaatcccattagtgggtatatacccaaaggattttaaatcattctaccataaagacacatgcacatgtatgtttattgcggcactattcacaacaacaaagacttggaaccaacctaaatgtccatcaatgatagattggataaagaaaatcttgcacatatacaccatggaatactttgcagccataaaaaaggacgagttaatgtcctttgcagggacatgaatgaagctggaaaccatcatcctcagcaaactaacacaggaacagaaaaccaaacactgcacgttctcactcataagtgggagatgaacaaggagaacacatggacacagcgaggggaacatcacacactggggcctgtcggcaggtgagaagctaggggagggatagcattaaaagaaatacctaatgtaggtgacgagttgatgggtgcagcaaaccaccatggcacatgtatgcctatgtaacaaaactgcacattctgcacctgtacctcagaatttaaagtataataagtaaataaataaataagaaaacaggagaaaatcctagtgtctttgtgtttggcacaggttttttacatatgacaccaaaagtgtgaactataaaagcaaaagtcaattggacttcatcaaaattagaaacttttgctctttaaaagttactgttactcagcatctttcattctgccccggggtgggatggtacaaatagcccatcctgccgtattctcaggaatagaacggggcttgatcctcaccacttggttagga

SEQ ID NO: 727 - DNA, 3954 bp, Homo sapiens
acagagccaccatggggacgacggccccagggcccattcacctgctggagctatgtgaccagaagctcatggagtttctctgcaacatggataataaggacttggtgtggcttgaggaaatccaagaggaggccgagcgcatgttcaccagagaattcagcaaagagccagagctgatgcccaaaacaccttctcagaagaaccgacggaagaagagacggatttcttatgttcaggatgaaaacagagatcccatcaggagaaggttatcccgcagaaagtctcggagcagccagctgagctcccgacgcctccgcagcaaggacagtgtagagaagctggctacagtggtcggggagaacggctccgtcctgcggcgtgtgacccgtgctgcggctgcagctgccgcggctaccatggcattggctgcaccttcttcacccacccctgagtctcccacgatgctgactaagaagcccgaggataaccacacccagtgccagctggtgcctgtggtggagatcggcatcagtgagcgccagaatgctgagcagcatgtcacccagctcatgtccaccgagcctctgccccgcactctgtccccgactccagcttcagccacagctccaacctcccagggcatcccgacatcagatgaggaatcaacacctaagaagtcgaaggccaggatactggagtccatcacagtgagctccctgatggctacaccccaggaccccaagggtcaaggggtcgggacggggcggtctgcgtctaagctcaggattgcgcaggtctcccctggcccacgggactcgccagcctttccagattctccatggcgggagcgggtgctggctcccatcctgccggataacttctccacgcccacgggctctcgcacggactctcaatcggtgcggcacagcccgatcgccccgtcttccccgagtccccaagtcttagcccagaagtactctctggtggccaaacaggaaagtgttgtccgcagggcgagcagaaggcttgccaagaagactgccgaagagccagctgcctctggccgcatcatctgtcacagttacctggagaggctcctgaatgttgaggtgccccagaaagttggttctgagcagaaggaaccccccgaggaggctgagcctgtggcggcagctgagccagaggtccctgagaacaacggaaataactcgtggccccacaatgacacggagattgccaacagcacacccaacccgaagcctgcagccagcagcccggaaacaccctctgcagggcagcaagaggccaagacggaccaagcagatggacccagagagccaccgcagagtgccaggaggaagcgcagctacaagcaggccgtgagtgagctggacgaggagcagcacctggaggatgaggagctgcagccccccaggagcaagaccccttcctcaccctgcccagccagcaaggtggtacggcccctccggacctttctgcacacagtgcagaggaaccagatgctcatgaccccgacctcagccccacgcagcgtcatgaagtcctttattaagcgcaacactcccctgcgcatggaccccaaggagaaggagcggcagcgcctggagaatctgcggcggaaggaggaggccgagcagctgcgcaggcagaaggtggaggaggacaagcggcggcggctggaggaggtgaagctgaagcgtgaggaacgcctccgcaaggtgctgcaggcccgcgagcgggtggagcagatgaaggaggagaagaagaagcagattgagcagaagtttgctcagatcgacgagaagactgagaaggccaaggaggagcggctggcagaggagaaggccaagaaaaaggcggcggccaagaagatggaggaggtggaagcacgcaggaagcaggaagaggaggcacgtaggctcaggtggctgcagcaggaggaggaagagcggcggcaccaagagctgctgcagaagaagaaggaagaggagcaggagcggctgcggaaggcggccgaggctaagcggctggcagagcagcgggagcaggagcggcgggagcaggagcggcgcgagcaggagcggcgcgagcaggagcggcgggagcaggagcggcgcgagcaggagcgacagctggcagagcaggagcgtcggcgggagcaggagcggctccaggccgagagggagctgcaggagcgggagaaggccctgcggctgcagaaggagcagctgcagagggaactggaggagaagaagaagaaggaagagcagcagcgtctggctgagcggcagctgcaggaggagcaagagaagaaagccaaggaggcagcaggggccagcaaggccctgaatgtgactgtggacgtgcagtctccagcttgtacctcatatcagatgactccgcaagggcacagggcccctcccaagatcaacccagataactacgggatggatctgaatagcgacgactccaccgatgatgaggcccatccccggaagcccatccccacctgggcccgaggcaccccgctcagccaggctatcattcaccagtactaccacccaccgaaccttctggagctctttggaaccattctcccactggacttggaggatatcttcaagaagagcaagccccgctatcacaagcgcaccagctctgctgtctggaactcaccgcccctgcagggcgccagggtccccagcagcctggcctacagcctgaagaagcactgaggctggcctgcggccttcttggcagcctcgcctcctgtccatgtctatctgtctgtctgtcggtctctgtcttggtctgttgccctccttcttggcatgccattgtggagggcttggccaggtgtatataaacgtcctctgtgctgggtgtttctgctgcaggtggcaggtggccccaggcctgtttggaggatgggctgggtgggtgggtggggaagaaatgggcccagccccacatggcctgcagacagtgctctgtaaatagttgttttaatttagctgaatgttagcattttagtctttggcattttagcgtttgggaggtagattaataaagtatattccttcaagcctgctgttgataccatgaagactgggcgcctcagtcccagccctgtagctgtgtgtcttgggccaccagtggcctgcaggacgaaggtactgttccatcacctgcggtgtgcctcaggatcaccaggtgcaggcccccaccctcggagatgctgctgcagtgagtggttccactgcctggataacccttgaggaacacgtcagttactgtcacgatggggcaggtggagctccttcctattttttggggtgctccctgtttgtaaaggggagtttgttcattgggaaagacctgggtcttgacacggccctgccacttagtcccctaccctctccattccccaggctccacccgtgctgctcaggtgcaaatggacttgagagcatctatgtgctggtgaagcatgaggtctgagtagaaaaggggtatcccttgagaccaccttgggaccagtgcttgcaagcagcgagatatttccccagcaaaaccaggcagctgctaattaaatgcttagaaccaatgaaagctggctgtggtcctgcctgtgagctgcctactgctgccttctgaatgcatatatctgctactgtagccccgggttgtcaaactatggcctgtgggccaaatccagccacagtcggttctttaaagttttatcgaaacacaagcaatggaaatgcccatttccattgttgtctccagttgctctgctccgagggcagtgttaagttgtgcagcagaggcccctccatgcaaagctgaatatgtttactatttgaactttttcagaagttctgcttaaggacaaaataaagcctaaatccaagaacacttttaaaaatgagg

SEQ ID NO: 728 - protein, 906 aa, Homo sapiens
MGTTAPGPIHLLELCDQKLMEFLCNMDNKDLVWLEEIQEEAERMFTREFSKEPELMPKTPSQKNRRKKRRISYVQDENRDPIRRRLSRRKSRSSQLSSRRLRSKDSVEKLATVVGENGSVLRRVTRAAAAAAAATMAAPSSPTPESPTMLTKKPEDNHTQCQLVPVVEIGISQNAEQHVTQLMSTEPLPRTLSPTPASATAPTSQGIPTSDEESTPKKSKARISITVSSLMATPQDPKGQGVGTGRSASKLRIAQVSPGPRDSPAFPDSPWRERVLAPILPDNFSTPTGSRTDSQSVRHSPIAPSSPSPQVLAQKYSLVAKQESVVRRASRRLAKKTAEEPAASGRIICHSYLERLLNVEVPQKVGSEQKEPPEEAEPVAAAEPEVPENNGNNSWPHNDTEIANSTPNPKPAASSPETPSAGQQEAKTDQADGPREPPQSARRKRSYKQAVSELDEEQHLEDEELQPPRSKTPSSPCPASKVVRPLRTFLHTVQRNQMLMTPTSAPRSVMKSFIKRNTPLRMDPKEKERQRLENLRRKEEAEQLRRQKVEEDKRRRLEEVKLKREERLRKVLQARERVEQMKEEKKKQIEQKFAQIDEKTEKAKEERLAEEKAKKKAAAKKMEEVEARRKQEEEARRLRWLQQEEEERRHQELLQKKKEEEQERLRKAAEAKRLAEQREQERREQERREQERREQERREQERREQERQLAEQERRREQERLQAERELQEREKALRLQKEQLQRELEEKKKKEEQQRLAERQLQEEQEKKAKEAAGASKALNVTVDVQSPACTSYQMTPQGHRAPPKINPDNYGMDLNSDDSTDDEAHPRKPIPTWRTPLSQAIIHQYYHPPNLLELFGTILPLDLEDIFKKSKPRYHKRTSSAVWNSPPLQGARVPSSLAYSLKKH

SEQ ID NO: 729 - DNA, 2788 bp, Homo sapiens
atggcccaggaggggtggaatttagaagctgtgcaaggggcttggagctcctgcttctacaaggcgtccacacactgttcttcgtgtcagagccttgctgaaattgctgtcttcacagaggccaagacggaccaagcagatggacccagagagccaccgcagagtgccaggtttgcatccgggaaggggaggaagcgcagctacaagcaggccgtgagtgagctggacgaggagcagcacctggaggatgaggagctgcagccccccaggagcaagaccccttcctcaccctgcccagccagcaaggtggtacggcccctccggacctttctgcacacagtgcagaggaaccagatgctcatgaccccgacctcagccccacgcagcgtcatgaagtcctttattaagcgcaacactcccctgcgcatggaccccaaggagaaggagcggcagcgcctggagaatctgcggcggaaggaggaggccgagcagctgcgcaggcagaaggtggaggaggacaagcggcggcggctggaggaggtgaagctgaagcgtgaggaacgcctccgcaaggtgctgcaggcccgcgagcgggtggagcagatgaaggaggagaagaagaagcagattgagcagaagtttgctcagatcgacgagaagactgagaaggccaaggaggagcggctggcagaggagaaggccaagaaaaaggcggcggccaagaagatggaggaggtggaagcacgcaggaagcaggaagaggaggcacgtaggctcaggtggctgcagcaggaggaggaagagcggcggcaccaagagctgctgcagaagaagaaggaagaggagcaggagcggctgcggaaggcggccgaggctaagcggctggcagagcagcgggagcaggagcggcgggagcaggagcggcgcgagcaggagcggcgcgagcaggagcggcgggagcaggagcggcgcgagcaggagcgacagctggcagagcaggagcgtcggcgggagcaggagcggctccaggccgagagggagctgcaggagcgggagaaggccctgcggctgcagaaggagcagctgcagagggaactggaggagaagaagaagaaggaagagcagcagcgtctggctgagcggcagctgcaggaggagcaagagaagaaagccaaggaggcagcaggggccagcaaggccctgaatgtgactgtggacgtgcagtctccagcttgtacctcatatcagatgactccgcaagggcacagggcccctcccaagatcaacccagataactacgggatggatctgaatagcgacgactccaccgatgatgaggcccatccccggaagcccatccccacctgggcccgaggcaccccgctcagccaggctatcattcaccagtactaccacccaccgaaccttctggagctctttggaaccattctcccactggacttggaggatatcttcaagaagagcaagccccgctatcacaagcgcaccagctctgctgtctggaactcaccgcccctgcagggcgccagggtccccagcagcctggcctacagcctgaagaagcactgaggctggcctgcggccttcttggcagcctcgcctcctgtccatgtctatctgtctgtctgtcggtctctgtcttggtctgttgccctccttcttggcatgccattgtggagggcttggccaggtgtatataaacgtcctctgtgctgggtgtttctgctgcaggtggcaggtggccccaggcctgtttggaggatgggctgggtgggtgggtggggaagaaatgggcccagccccacatggcctgcagacagtgctctgtaaatagttgttttaatttagctgaatgttagcattttagtctttggcattttagcgtttgggaggtagattaataaagtatattccttcaagcctgctgttgataccatgaagactgggcgcctcagtcccagccctgtagctgtgtgtcttgggccaccagtggcctgcaggacgaaggtactgttccatcacctgcggtgtgcctcaggatcaccaggtgcaggcccccaccctcggagatgctgctgcagtgagtggttccactgcctggataacccttgaggaacacgtcagttactgtcacgatggggcaggtggagctccttcctattttttggggtgctccctgtttgtaaaggggagtttgttcattgggaaagacctgggtcttgacacggccctgccacttagtcccctaccctctccattccccaggctccacccgtgctgctcaggtgcaaatggacttgagagcatctatgtgctggtgaagcatgaggtctgagtagaaaaggggtatcccttgagaccaccttgggaccagtgcttgcaagcagcgagatatttccccagcaaaaccaggcagctgctaattaaatgcttagaaccaatgaaagctggctgtggtcctgcctgtgagctgcctactgctgccttctgaatgcatatatctgctactgtagccccgggttgtcaaactatggcctgtgggccaaatccagccacagtcggttctttaaagttttatcgaaacacaagcaatggaaatgcccatttccattgttgtctccagttgctctgctccgagggcagtgttaagttgtgcagcagaggcccctccatgcaaagctgaatatgtttactatttgaactttttcagaagttctgcttaaggacaaaataaagcctaaatccaagaacacttttaaaaatgagg

SEQ ID NO: 730 - protein, 527 aa, Homo sapiens
MAQEGWNLEAVQGAWSSCFYKASTHCSSCQSLAEIAVFTEAKTDQADGPREPPQSARFASGKGRKRSYKQAVSELDEEQHLEDEELQPPRSKTPSSPCPASKVVRPLRTFLHTVQRNQMLMTPTSAPRSVMKSFIKRNTPLRMDPKEKERQRLENLRRKEEAEQLRRQKVEEDKRRRLEEVKLKREERLRKVLQARERVEQMKEEKKKQIEQKFAQIDEKTEKAKEERLAEEKAKKKAAAKKMEEVEARRKQEEEARRLRWLQQEEEERRHQELLQKKKEEEQERLRKAAEAKRLAEQREQERREQERREQERREQERREQERREQERQLAEQERRREQERLQAERELQEREKALRLQKEQLQRELEEKKKKEEQQRLAERQLQEEQEKKAKEAAGASKALNVTVDVQSPACTSYQMTPQGHRAPPKINPDNYGMDLNSDDSTDDEAHPRKPIPTWRTPLSQAIIHQYYHPPNLLELFGTILPLDLEDIFKKSKPRYHKRTSSAVWNSPPLQGARVPSSLAYSLKKH

SEQ ID NO: 731 - DNA, 4302 bp, Homo sapiens
cggccgcagcacccggaagctgagggggcttaaagtctttcgcttcctttccccgcctcttagtcccgcagattgctagtcgatatggccaataggagggctgactggtacttcctgttatttgattggcttaaaattttgcaaccgcccggacaaacttgccgaggattggctgagccttcagttttgaaaatcatagttttcgcccgcgctgcgccgcctggttgctcctcccgtgcggtgagtcccgaaggcccggagccaagtgggtctgggcaagcggggccttacctagggataccaccggacttggatcggagcagccttcaggggacgtggcgcagtcgaacagagccaccatggggacgacggccccagggcccattcacctgctggagctatgtgaccagaagctcatggagtttctctgcaacatggataataaggacttggtgtggcttgaggaaatccaagaggaggccgagcgcatgttcaccagagaattcagcaaagagccagagctgatgcccaaaacaccttctcagaagaaccgacggaagaagagacggatttcttatgttcaggatgaaaacagagatcccatcaggagaaggttatcccgcagaaagtctcggagcagccagctgagctcccgacgcctccgcagcaaggacagtgtagagaagctggctacagtggtcggggagaacggctccgtcctgcggcgtgtgacccgtgctgcggctgcagctgccgcggctaccatggcattggctgcaccttcttcacccacccctgagtctcccacgatgctgactaagaagcccgaggataaccacacccagtgccagctggtgcctgtggtggagatcggcatcagtgagcgccagaatgctgagcagcatgtcacccagctcatgtccaccgagcctctgccccgcactctgtccccgactccagcttcagccacagctccaacctcccagggcatcccgacatcagatgaggaatcaacacctaagaagtcgaaggccaggatactggagtccatcacagtgagctccctgatggctacaccccaggaccccaagggtcaaggggtcgggacggggcggtctgcgtctaagctcaggattgcgcaggtctcccctggcccacgggactcgccagcctttccagattctccatggcgggagcgggtgctggctcccatcctgccggataacttctccacgcccacgggctctcgcacggactctcaatcggtgcggcacagcccgatcgccccgtcttccccgagtccccaagtcttagcccagaagtactctctggtggccaaacaggaaagtgttgtccgcagggcgagcagaaggcttgccaagaagactgccgaagagccagctgcctctggccgcatcatctgtcacagttacctggagaggctcctgaatgttgaggtgccccagaaagttggttctgagcagaaggaaccccccgaggaggctgagcctgtggcggcagctgagccagaggtccctgagaacaacggaaataactcgtggccccacaatgacacggagattgccaacagcacacccaacccgaagcctgcagccagcagcccggaaacaccctctgcagggcagcaagaggccaagacggaccaagcagatggacccagagagccaccgcagagtgccaggaggaagcgcagctacaagcaggccgtgagtgagctggacgaggagcagcacctggaggatgaggagctgcagccccccaggagcaagaccccttcctcaccctgcccagccagcaaggtggtacggcccctccggacctttctgcacacagtgcagaggaaccagatgctcatgaccccgacctcagccccacgcagcgtcatgaagtcctttattaagcgcaacactcccctgcgcatggaccccaaggagaaggagcggcagcgcctggagaatctgcggcggaaggaggaggccgagcagctgcgcaggcagaaggtggaggaggacaagcggcggcggctggaggaggtgaagctgaagcgtgaggaacgcctccgcaaggtgctgcaggcccgcgagcgggtggagcagatgaaggaggagaagaagaagcagattgagcagaagtttgctcagatcgacgagaagactgagaaggccaaggaggagcggctggcagaggagaaggccaagaaaaaggcggcggccaagaagatggaggaggtggaagcacgcaggaagcaggaagaggaggcacgtaggctcaggtggctgcagcaggaggaggaagagcggcggcaccaagagctgctgcagaagaagaaggaagaggagcaggagcggctgcggaaggcggccgaggctaagcggctggcagagcagcgggagcaggagcggcgggagcaggagcggcgcgagcaggagcggcgcgagcaggagcggcgggagcaggagcggcgcgagcaggagcgacagctggcagagcaggagcgtcggcgggagcaggagcggctccaggccgagagggagctgcaggagcgggagaaggccctgcggctgcagaaggagcagctgcagagggaactggaggagaagaagaagaaggaagagcagcagcgtctggctgagcggcagctgcaggaggagcaagagaagaaagccaaggaggcagcaggggccagcaaggccctgaatgtgactgtggacgtgcagtctccagcttgtacctcatatcagatgactccgcaagggcacagggcccctcccaagatcaacccagataactacgggatggatctgaatagcgacgactccaccgatgatgaggcccatccccggaagcccatccccacctgggcccgaggcaccccgctcagccaggctatcattcaccagtactaccacccaccgaaccttctggagctctttggaaccattctcccactggacttggaggatatcttcaagaagagcaagccccgctatcacaagcgcaccagctctgctgtctggaactcaccgcccctgcagggcgccagggtccccagcagcctggcctacagcctgaagaagcactgaggctggcctgcggccttcttggcagcctcgcctcctgtccatgtctatctgtctgtctgtcggtctctgtcttggtctgttgccctccttcttggcatgccattgtggagggcttggccaggtgtatataaacgtcctctgtgctgggtgtttctgctgcaggtggcaggtggccccaggcctgtttggaggatgggctgggtgggtgggtggggaagaaatgggcccagccccacatggcctgcagacagtgctctgtaaatagttgttttaatttagctgaatgttagcattttagtctttggcattttagcgtttgggaggtagattaataaagtatattccttcaagcctgctgttgataccatgaagactgggcgcctcagtcccagccctgtagctgtgtgtcttgggccaccagtggcctgcaggacgaaggtactgttccatcacctgcggtgtgcctcaggatcaccaggtgcaggcccccaccctcggagatgctgctgcagtgagtggttccactgcctggataacccttgaggaacacgtcagttactgtcacgatggggcaggtggagctccttcctattttttggggtgctccctgtttgtaaaggggagtttgttcattgggaaagacctgggtcttgacacggccctgccacttagtcccctaccctctccattccccaggctccacccgtgctgctcaggtgcaaatggacttgagagcatctatgtgctggtgaagcatgaggtctgagtagaaaaggggtatcccttgagaccaccttgggaccagtgcttgcaagcagcgagatatttccccagcaaaaccaggcagctgctaattaaatgcttagaaccaatgaaagctggctgtggtcctgcctgtgagctgcctactgctgccttctgaatgcatatatctgctactgtagccccgggttgtcaaactatggcctgtgggccaaatccagccacagtcggttctttaaagttttatcgaaacacaagcaatggaaatgcccatttccattgttgtctccagttgctctgctccgagggcagtgttaagttgtgcagcagaggcccctccatgcaaagctgaatatgtttactatttgaactttttcagaagttctgcttaaggacaaaataaagcctaaatccaagaacacttttaaaaatgagg

SEQ ID NO: 732 - protein, 906 aa, Homo sapiens; identical to SEQ ID NO: 728

SEQ ID NO: 733 - DNA, 1455 bp, Homo sapiens
atgatgaggcccatccccggaagcccatccccacctgggcccgcaccccgctcagccaggctatcattcaccagtactaccacccaccgaaccttctggagctctttggaaccattctcccactggacttggaggatatcttcaagaagagcaagccccgctatcacaagcgcaccagctctgctgtctggaactcaccgcccctgcagggcgccagggtccccagcagcctggcctacagcctgaagaagcactgaggctggcctgcggccttcttggcagcctcgcctcctgtccatgtctatctgtctgtctgtcggtctctgtcttggtctgttgccctccttcttggcatgccattgtggagggcttggccaggtgtatataaacgtcctctgtgctgggtgtttctgctgcaggtggcaggtggccccaggcctgtttggaggatgggctgggtgggtgggtggggaagaaatgggcccagccccacatggcctgcagacagtgctctgtaaatagttgttttaatttagctgaatgttagcattttagtctttggcattttagcgtttgggaggtagattaataaagtatattccttcaagcctgctgttgataccatgaagactgggcgcctcagtcccagccctgtagctgtgtgtcttgggccaccagtggcctgcaggacgaaggtactgttccatcacctgcggtgtgcctcaggatcaccaggtgcaggcccccaccctcggagatgctgctgcagtgagtggttccactgcctggataacccttgaggaacacgtcagttactgtcacgatggggcaggtggagctccttcctattttttggggtgctccctgtttgtaaaggggagtttgttcattgggaaagacctgggtcttgacacggccctgccacttagtcccctaccctctccattccccaggctccacccgtgctgctcaggtgcaaatggacttgagagcatctatgtgctggtgaagcatgaggtctgagtagaaaaggggtatcccttgagaccaccttgggaccagtgcttgcaagcagcgagatatttccccagcaaaaccaggcagctgctaattaaatgcttagaaccaatgaaagctggctgtggtcctgcctgtgagctgcctactgctgccttctgaatgcatatatctgctactgtagccccgggttgtcaaactatggcctgtgggccaaatccagccacagtcggttctttaaagttttatcgaaacacaagcaatggaaatgcccatttccattgttgtctccagttgctctgctccgagggcagtgttaagttgtgcagcagaggcccctccatgcaaagctgaatatgtttactatttgaactttttcagaagttctgcttaaggacaaaataaagcctaaatccaagaacacttttaaaaatgagg

SEQ ID NO: 734 - protein, 126 aa, Homo sapiens
GPSPEAHPHLGPHPAQPGYHSPVLPPTEPSGALWNHSPTGLGGYLQEEQAPLSQAHQLCCLELTAPAGRQGPQQPGLQPEEALRLACGLLGSLASCPCLSVCLSVSVLVCCPPSWHAIVEGLARCI

SEQ ID NO: 735 - DNA, 36460 bp, Mus musculus
  misc_feature (1)...(36460): n = A, C, G or T/U
agactgaagaaatgaccatctagagactgcctcacctggggatccttcccataaacaaccacaaaaaccagacactattgtggatgccaacaaaagcttgctgtcaggagcctgaggtagctgtttcctgagaggctctgccagggcctgacaaatacagaaatggattctcatagccatccatgggacagagcacagggtccccaatgaaggagctagtgaaatacccagggagcagaaggtggtggcagccccagaggaggaacaacaatatgaactaaccagtacccccagagctccctgggactaaaccatcaatcaaagaaaacacatggtgggacttatggctctagctgcatacatagcagaggatggcctagtcagtcatcaatgggaggagaggcccttgttcctgtgaaggttatatgccccagtataggggaatgcctgggccaggaagtgggagtgggtgggttggtgtgtgtggggggggggtaaaggggatttttagaggggaaactaggaaaggggataacatttgaaatgtaaataaagaaaatatctaataaaaacaaaatgacatttggaaaaaaaaaagagtcaggttgagttggtatccagctagtacacaaggcactaccttcaaagcatgctgaacatacctgaggaaaaaaagccagtgtttataacttactcctgagattttatgcttgagacaagcacagacacaaaaacaccttcatgactgtttgcagaacacaatcagacacaggctagttcattttagggaaagaagagtaaaaagaaagttttctgaaaaaaaaaatatagattacagagttaccaggtctctttttctttctcaatctcctctttctcctcctcctccttcctctttctctttgtctttcacttcctctttctcttcttcctcttctttttcttctttttaactagaggctttcctccttgagcaccacaaaagtaacccttacatctattctatttgtctttgatcttttactaaccagagagctgcagacaccacccaaaatgtttgtgaggtttctgcatcattccacctccagaaagtcctaccagaactgaaaagataagtcctcagaaagggtgagctccatttttttcttctttttttcccttgtggtaggaatatttttatttttttattagatgtattcttcatttacatttctaatgctttcccttttcctagtttcccctctgaaaatcccctataccctccccctccccttgctccccaacccacctactcctgcttcctggccctggcattcccctatactggggcatagaaccttcacaagataaagggcctcttctcctactaatgaccgacgaggccattctctgctacatatgcagctagagacaggagctgcgggggtaggggtgggatactggatagtttatattgttgttcctcctatagggctgtagatcccttcagctccttggatactttctctagcaccttcattggggaccctgtgttccatccaatagatgactgtgagcatccatttctgaatttaccaggcactgacatagcctcacacaagacagctatatcagggctctgtgagcaagctcttgttggtatatgcaatagtgtctgggtttggtggttgtttatgggatggatcccagggtggggcagtctctggatggtccttctttcagtcttagctccgaactttgtctctgcaactccttccatggatattttgtttcccattctaaaaaggaatgaagtatccacactttagtcttccttcttgagtttcatgagttttacaaattgtttcttgggtattctaagtttctaggctaatatccacttaacagtgagtgcatatcatatgtgttcttttgtgattgggttacctcactcaggatgatatcctccagatctatccatttgcctaagaatttcataaattcattgtttttttagttttttttttgtttgtttttcgagacagggtttctctgtgtagccccagctgtcctggaactcactttgtagaccaggctggcctcgaactcagaagtccacctgcctctgcctcccaagtgctgggatcaaaggtgtgcgccaccacgcccggcaaattcattgtttttaatagtataaatgtaacacattttctgtatccattcctctgttgagggacatctgggttctttccagtttctagctattataaataaggctgctatgaacatagtggagcatgtgtccttattacatgttggggcatcttctggatatatgcccgggagtggtattgctggatcttccagttctctcagcatgaaaatttcctcaagccccagaaataaaatggatctttgccagcagagaagggcacctaactaattgggcctaaggggaaacaaggtcactaggtcacgggtggattgactttttacagaaagagcagtttgtagtgttgagcacagccaaccaaccaccagccagagcaaaaggatataggtggcttccagtaccccaccctcatccaatatccctgcacttgccctctactccttactctttcttgcaagaccaaccactttaaataatgggtcagagtcagctctaccttccaggtttctctatctggagttagaattagctctacaggggacaaggatcctagaacatatgactggatagggctttgaaaaggcccttttagggattttaacctggaacctgctactgtccagctttgaattggccacttgggaaagagcctacttagggtggagggtggaagtgaaccccagttgcccctacatcaaggccagcttgggcaagccaaaactcctggttatgcagttccatctgttgtggcaaaggggcaaatgaggcttgctgagttcgtgggaagatgggagttaggacactcaggtcatttcttaggaggcaaaaaaccctgtagggtctggtgacctaccaaatgtccttattacaagtccatgttccagatgttcatcagtttacttagttcttacttgttactgtttcagatagtatgtttttttctttaatgaactgttaatttaatgtaggtgtgattgttcaatacataaccaatttaaaaaaaaaagaataaaactgccggaggaggtttcagagtatgcacaaggagtcagtgttgagtcaggaaaatctacgtgtcacaggagatggaaagagcaaggctactatggttataatgttaaattagtatttacagacacactttaagaaagcattgctggttgccaggcgtggtggcgcatgcctttaatcccagcacttgggagacaggggcaggcagatttctgagttcgaggccagcctggtctacaaagtgagttctaggacaaccagggctacacagagaaaccctgtctcaaagcaagcaaacaaacaaacaaaccaaaacccaaaacaaacaaaaacaaaaaccaagaaagcattctaaattttgagttattccttacatcaaatggagctgtggcctgcccttcttactgctcctggggactagctgataaagcaggtggctcagctttctgtatggcaccacaggccttgctgttgtgcgttatacagaggaaccgtttgactgagttcttctctctcacttccccttcagctctggccttgctagcccctgaacaccaagttagtaaggagcttatccaccaaccataatgtaaattcttcttggcagagctccaggagtcaggctttgaaccaaattcctaccagaaactctctcggattgctaacttccacagctgctgtggaaagcatgtcctatccggacttttgctttatgtgtaactctctgtcctgatgtacccatgctcacagcttggaatggagagaatagccatatgcatatattagtaaaggttttttttgcagttgaagagttgaaaaacacatcctgcttaccctgatccaaaaatctggaccccatttgagatagaggtgagggatgataaacatgcatgaaacaggcaggaaaacagccagtaaaccttggaaacaaaagaagtttgaaacaagtataaaaaaagaaatcaagaaagctgatccaaaatgataattagaaacccaaaatgataattaagtttactaattgggggttttgtttgaagagtatttttattggtatctttaaagcaaattatcctgtttagtagtgctgaataccactacaaaaacaaacaccatttgaggatgggagaaatacctgtattcaatacctctgtattaaaccatgctggggcatgacatcagatatagtattctcgtggactcaaaaacatttcaaaaaacacataagcaataaatgaatagtgtaggtatatgctattctgtagcacattttaagtgcttttcatatcaatagacttgcatagtttgttcagttccaacggaagctattattagtcctccattacatataaaaaaattgaaattgcatgtaggttagtcttttgttcaacatcacagaactctgttatatgtgcagctggagccatgggtccctttcaaattactctttggttggtggtttagtctctgggagctctggggaagggcttgggaataggagagtggtattgttgagtgttttctaagatgctgtcctgcttttaaaatgtgtttccagtggtcactctctatgaaggaacaaaacctgccatccttcctcagagtccctgatgagttctcccttgaagccacagacaacagtttgttcccctctttgtgaattttctacatttcagaacccttttctttttcttccaaacttgcatgaatataaaattggacacaattggtagatgcttggtcctggggttcaaacaatcgtttattttcctctgttttacttttacattgactaaatgcaatgactatgtagctgccatctagaaaacagcagaggggcatggcatgatttgtgtatccttcaatttcttctttgccacaccagcatttctttgccctattgactttctatcttgtctttggcaggactgagagtgttgagttgtgcatataagctacttgtcccatgaatgtactccccatgaatgagcacatatttcatgtttttgtgtgtgtgtgtgtttcctatggttcacaccaaaggtatttttcatatttgggggaggagtctgatcttgccaagttttctcaggtgaaagtggtcttttggcctttggtgttggttatatcctttggcattttaaaattaaattactttatatatgtacatttcaaaagttgtccctcttcctggttccctctccccaagtccttcatcccatcctcccagcctctcagagggtgcctcccacctgcccaccccctatctcacccctaccagcatccctcttccctgaggcatcaagtttccacaggactaagggcatcctctcctaatgaggccatacaaggcagtcctctttgacatatgtgcccagggaaatgaaccagtccatgtatgctccatggttttggggttagtctctgggagctctgaggggtctgggttagttgacactgttattcttcccatggtgttgccatctccttcagcaccctcaatcctttctccaactcttccatattggcgtctgatctcaattcaatggttggctgaaagcatctgcatttgtctcaatcagttgctggtagagccttttagagtgtagccatgccaggctcttgtctgcacacacaacatggcctcagtaatagtgtcaggacttgggctacatgcataggatggatcccatgttggtctgatcactgggtggcctttccttcagtgtctgctccatttttgtccctgtatttcctttagacaggaacaattctgggttaaaattttgaagatggatgcccttgtctcaaatggggggccatgtatatttactagagatctctttcacttccatttccccattgtccccatttttgtttagataaactcagttgatattttatcttctgtccttgcatctatagtaaactgttagttccctttttatgacttttggttagtggctttacaacctcttggaatgtgttctaagttgtagatgtattcttgctatctcataagcaattaactcatgagtcttgaagactggcagagttctcactgcagttttgacatcagagagaacttaataacagtcctattataaaatatcttaataattactaatattatttcaagaattcttatataatcatcattaataattaagacctacatagcatcactataagattactacatctttgtttttctgcaaagttctgctcaaaagggtgggctaacacctagggattgttatatatatttaataataatagtaaaatcatattaatagcaggaatttttcctaaaatgtaatattcttggtcttgcctagagaagcaaatccatcaataactttaacagttcatggtggaaccaattgaggaagatcacctgctagttttagctcctctttgatgactcctggtagactatacattctttcgtaagtttccatcatctcccatttttatagaactttatcttaagaaccaggaaagagggaaatgagaggacataagtcaaggtctgtaaggaggaaagtctcaatgaaaacaaaaagtgttgaccgttattgtttatagtctgctttaaaagaacctagagtcatcaggagatgggtctctgtgcatgcatgtgggtttcttaattacataaattttggtaagaaacagcctagacatgctggcaatattccctaggttaaaccctgtattgtttatgttgatggggggagaggggggctgagcatgcctgaactgctctctactattcactgcagatgcaacatcactctctccaggttctgctgctgagacttcctgcccatgaggggttatagcaatctgtgagtcaaacaaacctttctgattttaagttgcttctgttggggtatttcactaaagcaatagaaaaaggaaacgaagacagaatctgtcttagtttctctaaaagactcattttctctaagtcatatccatcatgagaaggatgccaacagtcaacgggtttgcacatcagcaaagtcactagctagtcatgcaattagcaaagtgggagcttggttaaaaattaaggctgtcatcatttgtaatgacagtaacattctccgttaaacagaaagaagaatgcaaagcaatataaatcttctctgtccaggcagagtctctcaaaatgcatccctgcagtttagatttcgtcagaaacacccttattgcaaacatgggaatatggtaatagacctccatacatttaaatatttctggataaatatagaattctttaaaaaggatgttttttccctttttgaagtattatacagttcactttggtctcaaattcacaatcttctattctgtaccctgtgatgatgggatcacagcattgtgccactgtttctgcctgatgaactgaaagtgaaagacgtgtcacatgtgttcctcaagcctgctgttacagggtaggagagaaataaactcatctccacttgtcatggattttctagctattttgatgccttgctttctaaaacctggacacacacacacaagaaaaaaaaaagaaaatgttttgacattgcacctcaaatgcatggcatttatctgcagttttgatataataaaaaacattttagtttcagaggacacaatcatttgccatgacagagcctaagagtattaggctctgaatatctcacactaccacgatcaatttaaaaataacaggaattacaaatcatttggtcattaatatctctcaatatcaatggactcaatttcccaataaaaagacacaagctagcaaaatggacgtgaaaacaagatccatcattctgctgcatataataagtaaatatactctgacatcaaagacagacattacttcatagtaaagggctagaaaaagattttccaagcaaatggacccaagaagcaatctggtataggcagtctaattgctattgaaataaggaaggtgggtgtgtttaaaacgtaaacagtcttcagatggctcccatttgactctctgtatgagttacataatatcatgaagaaactatccaggagtgaatattgtacaaattcccttcttagcagacaatgtttttaaaatcatctcacttcttctgaacataaaatataccctagaaagaaccacgccacagctgtgctagcacatgcatgtgaaaatcatctggtaggccacaggaagtcttgagttttgtcacaaatgtgtaaaatctagtctagagggagactgtgggactgagtaatgatgtaaactgacttacattgttaaaaaccattctagaatctatgtgaactacaaactctggggtgtggtagatgtggaaaagagcatatagctagatatatgttttaggttttcagagatgtttgggttctccaaggtggtagcaatagttgtaatctgctcagtctctgtgagctgctatggaaacaggttagttgattctgtgggttttcttgtggtatgcttgacccctctgactcctaccatcttcctccctttcttctgcaggattgcccaagctcttcctaatgtttggctgtgggtttctgcatctgtgtttccattcattgctgggtaaagcctttctgctaatgattatgttaggcgtctgtctgcaagtatgaatgaatatctttagtagtgtcaggggttggcttcctcacatgatatgggtctcaagatggaccagtcatccctggccacctccacaatttctgcaccacttttccccagactatcttgtaggcaggacaatttgtaggtagaatgctttgtggctgggttagtgtcccaaactgttcattggaaatcttgtccagttatagaagattactggttcaggctctgtatcccccattgctggggtcacccttatagattcctgggactttccactgccctagttctttagccatgccctaagcatcctccttcttgccccataacagttgtgtctcccagtaatctcttcccactccctgcctggctccctccctcctcttcctcctttttaatcacagctcatatttctggagtggacactctctttatgagtagaaaatatttactcccaatgatgcacatctggaaaaaaatcaatttattaggtcatcgagatgactcagcatctgctgccaagtctgactgagtttgatccactagactcacatggtaggaaagagcctgaattcctgaaagttgtgacatgtggcatacacacacatacacatattacacacaaataataaatttaatacatttttgaaaaatgagtctttgacaaggatttgcagcttctttctgatttgttcaagtactgaagctggtctgctgtggggatgttaccccctagaaaggccctgagtcctccagccttcctcctcctagctcattctcttcctgcctgcagccagaaagcatgtcactaacctgctgccctggtctctcttgctatttggaagaaaatccctggacctgcctgaaaccaggagggaacccagatctagtcctggctcctcagcttcccactgagtccagttagcatacctcatttgactaggctctaaaaggagatccctggagagtagaggaccacacccactcgattggcgggcttccttgactaggcggcccttagagaccagggcggatgcacactgcgcttgctctggtccagtcccgcgctctgaatgcagccaatggactgaagcacagctggttgctgttcagagaaaggaccaatccgcagtctctccaccctctgaacaaagacgtcaaatgacagtctggttctgttttttctaaaagacccgggattccagcggctggagcgaagctgccatagagtggaaagatccagtaagtaaaaagccactttaagattaatttcttcatgtcagaatgtggtgtgcagcaaatattcaccaatatatttagcaagtctatttcatcttggaataaaaatacacaagtgacaaatactgatttctttctcaggcttgcctagcaggtggagtggaagctatccatattcgaataggtggttactacattaacctgatttgtctgctgtttccatcaacataacccagtatgttctgctgaggactagaaaataccagtcatctttagtgttctttaagggcactgtgacggtttcctcccaaaagcagacttaatgctagatgttgggttcaagtgtagctggtcctagctgtgagccagggaaggtggcaggtccataaacaaactgtgctactctgaaatgaagagtgggtgaaatctcaggcacactggtggcatgggggaacttctagcgctggaaagcccttgggacagaggcagaagggctaacccatctgaaggacccagggagcccagggttgttttcagcattctagcctcagcgtgctggtattgatgatgtggtagtgtaggaagaggcaggcttagatcagctctggtctttgcctctggaaagcctttctgagagaaaagtaagtaggcaagaatgtgcacatggctagccagaaaataagcgcctttaagagagggggaagtgaaggtgggggagggagacaaggggctggagaggaagttattaggcaatagggagggacggatgtggctcagaagccagaaagaggcttaaaggggcttggtggggcagggcgttattcagaaatagggagagtgagaaaggccaggggaaagaaaaagggggcaagagaaaggggaagaagatggagaaagcaattccaggaaactgttagggagaccgaggatgggacttggtacaggccatattggtttattgctctactaaagaaagatagtacatgtaagtactttgtcttctcaaattataatgtggtatactcggaggaatttgtattcacatcattctaactgaaaaagcaaggaggagtggaggcaggaggggatcatatgccgggcatggtggcgcacacctttcatcccagcactggggaggcagaggcaggcagatttttgagtttgaggccagcctggtctacaaagtgagtttcaggatccccagagctatacagagaaaccctgtctcgaaaaacaaacaaacaaacaaacaaacaaacaaacaaacgaaggaggggatcatacaatgaacttccaaatacctatcatatagcaaataattctgtattagaggatatttccaccatttttttttgagacaaagtctcatttaactcaggctggctgtggacattttaacctgatcctcctccacattctaataaaatatgacccagcatgaataccgaaaatcgtttgtgtgggggtagatatggaatgattcagaattgtttaagcatgtgcctgtgaactgccaaattcatatttctttctgttagcttttatattttacaatatgaaccatcaacagacagggaacctcacattgtttttctggttgaacagaaatttctgcccaccaagatcagctagtccagaccagttcctcaagtactcatgcactatcattttcttaagtccaaggcgtgtccctgtgggtaaatattggcctcaatcccagcactagcaggaatattctctgagtaatcgttcacagatggccgttcaattttcacagcagatgaggatgactctgcccctccttttagggtgaggaagaggcagaaagtagccagtagccgggcggtggtggcccaagcctttaaaatcccagcactcgggaggcagaggcaggcagatttctgagttcgaggccagcctggtctacaaagtgagttccaggacagccagggctatacagagaaaccctgtctcaaaaaccaaaaaccaaaaaaaaaaaaaaaaaaaaaagaaagaaaaagaaaggaaggagccagccagtaagcccaggtccctgcagctccaacatggctgcctaagctaagcccgtactcttggcattcaccctgctgtgcaaattctcataggatgtccctgccatatttttagttgcttctgcttttcacaaacacagaactagttcaggggggctagtagacatccttcctagctccttagcagcagttactggtagaaatctaggactcaggtgctacaatggaggggttaagatcatggacacaggctttacatggctcccaccggggtatgtgcttcaattacacatagagaaaagaagcaagcnnnnnnnnnnnnnnnnnnnnnnnnnnnnnnnnnnnnnnnnnnnnnnnnnnnnnnnnnnnnnnnnnnnnnnnnnnnnnnnnnnnnnnnnnnnnnnnnnnnnnnnnnnnnnnnnnnnnnnnnnnnnnnnnnnnnnnnnnnnnnnnnnnnnnnnnnnnnnnnnnnnnnnnnnnnnnnnnnnnnnnnnnnnnnnnnnnnnnnnnnnnnnnnnnnnnnaattggcactgcaattgtacaaaaaagacaatcctaacttgttgagtgtgactttcatctactagttaaaaaacacactacagggtttcatatgtggcccagctgttagagcgatcaccttttattcacaaagccctggatttgaatctctgtaccgcttatggcagatgtgatagtacatatctataatccagactgttgaaaagtggaggcaggaggatcaggagttcaaaagtccatagccagcctgagttatatgagacattgtctcagaaaaaacaagaacatatattttcgctcgcgcgcgcgtgcgcacatgtgtgtgtgtgtgtgtgtgtgtgtgtgtgtgtgtgtgtatgagaaaaaacttacaaagaaaaattatttggtatatgataggtatttggaatttcattatatggtcgtctcctgtttccacctccttcttgtcttttcgttagaaaataatgtaaatataaattctccaagatatcctcactggagttttgtgatttttgaatagaagtttgagctctgtagaatgaactgaaacttttaaagcaaggttccgagaactatgtgatggagcttatggaaacttatcagttcactgcctacagcactcattccttgactgtgtcttctgatggtgacctactgaagaagcacaagcttgctctcctttgtggcatatggtctagtggttcttagcaccggaagggcctcaaaggcaggaaacagagttggcaacagtcccctctcccactgttagtggtgtcagtatgtcatttaaaccattttttcctcttttgcttagacagcagggagaagtgccatttcaaacaaaggacctaaagcagtaactaagttggataaactttccatattactttttgatgtttcttaccaatttcttttgttttcagaccactactcagttctcttcatgcctgtttgcctggccttatcatctccattttaaaccaacagcagatattaacatcagtgtaagtagaaaataattttgagtttccaagctgcaaaccctttgtagggtatctgcatctgaattctccatttatttccatctggggggtttggatgcaccatctcccttgacaagaatacccttttcccaaaacaaaatctatatagaacctgnnnnnnnnnnnnnnnnnnnnattatgctaggctcctgtctgcaagtatagcagtaatatcattagcagtgtcaagggtggacgccttctatggcatgggtctcaagctggaccagtcattggttggccagtccctcaaatctgcccctattttaccccagaatatctctgaggcaggacaaattgtagggttgaatgttttgtgactgtgttggggtctcagttgttacactgaaagccttccatggtcacaggggatggctagttcagacttcatatcccccattgctaggagtcttcactagggtcaccctcatagattccagggaggttcgattgccctacatttctagttagttgcacagttccacttccgattctaattctctctcccagtactccctttctctgtccttccctgacctgactgatccttcctgattctgttcccattagattccatccaatactccattatgtaaatgtagtatattttatctatcttttcagttgagtgacatctaagttgtttccagtttctggttagtatgaataaagctgttatgaacatatttaaacaagtgtctttgtagtatggtggtatgtcctttagtatatgtctaggagtggaatagctggatgttaaggtataatgtttattcccaattttttgagaaactgccaaattgatttctaaagtggttgtactcatctgaacttcccccagcaatggaggaattttgccttcttctacatcctctccagcatgagctgtcacttgaatttctgatcttaggcattctgaccattctgacagggctaagatggaatctcagagttgctttgatttgcatttgcctgatgactaaagatgttgaacatttctttaagtgcttcttagccattagagagattcctatgtcaagaattccttgtttagatctagatgtaccccaattttcaattggattatctgctttgttgttgtcaaaattcttgagttctttatatattttagattattgtcctctgtcagatatggggttggtgaagatcttttttattctataggctgctgttttgttctttttatagtatccttttccttacagaagcttttcagtttcataaggtcccatttattaatttttggcctagtggctacacaattagttttctcctttgccaatgcatttaaggatattcctcactctcttctttaagttttactgttacaggcagattttctacctccaggttccttcagtttgtgttttctttattgcttctgtttccatttttcaggtcttgaaaagttttattcattttctcacttgtttgtgtttttctgattttttttttcatttcctctttaaaagactctattattttcnnnnnnnnnnnnnnnnnnnncctgacctgactgatccttcctggttctgttcccattagattccatccaatactccattatgtaaatgtagtatattttatctatcttttcagttgagtgacatctaggttgtttccagtttctggttagtatgaataaagctgttatgaacatatttaaacaagtgtctttgtagtatggtggtatgtcctttagtatatgtctaggagtggtatagctggatattaaggtataaagtttattcccaattttctgagaaactgccaaattgatttccaaagtggttgtactcatctgaactctctccagcaatggaggaattttgccttcttctacatcctctccagcatgagctgtcacttgaatttctgatcttaggcattctgagcattctgacagggataagatggaatctcagagttgctttgatttgcatttgcctgatgactaaagatgttgaacatttctttaagtgcttcttagccattagagagattcctatatcaagaattccctgaagccaggtgtggtggcgtgcacctttaatccgagcactcgggaggcagaggcaggcggatttgtgagttcgaggccagcctggtctacaaactaagttccaggacaaccaggactatacagagaaaccctgtctcgaaaaacaaaacaaaaaaggaattccctgttgagatctagatgtaccccatttttcatttggattatttgctttgttgttgtctactttcttgagttctttatatattttggatgataatcctctgtcagacatggggttggtggagatctttttccagtctataggctgctgttttgttctctttacaatatcctttgccttacagaagcttttcagtttcataagggtcccatttattaattgttggcctagtggctacacaattagttttctcttttgccaatgcatttaaggatattcctcactctcttctataagttttattgtactatgtttttgttgagttctttgatccgtgtagacttgagttttgtgtagagtgatagatattgctctatttgtattcgtctacatgcaggcattcagttagaccagcaccatttgctgaaaatgctttcttttatacattgtataattttggctttttggggggggggatcaaaaatcctgagttcataggtatatggatttacttctatatgttcaacttgagtccattgatcaaccacttttttatgccaatacacatttatgcagattttattactattgcttggaatcagggttggcgatacctccagaagttcttttattttacaggattgttttatctatccttgtttgttttttgtttgtttgtttgttttttgtttttttttccatatgtagttgggtattgattttcaaggtctataaggaactgtgttcaaaattttatgggcattaccttgaatctgtagaaagattttatgactgccatttttactgttactcctatagatctatgtacatagggagatctttccatctactaatatcttcttccagtttctttcttcagaggtgtgaatttcttctcatacaggtctttaacttgttttgttagcgtcacaacaacatactttacattattcgtgactattgtaaagagtatcatttctttaatgtctttcttggtttatcatttatataatgtaagggtactgttttactttttgttgttgtttttgttgttaaatctgtattcagatactttgatgaaggtgtttatcacatgtaggagctcctggtagacttttttgggttgcttatatgaactatcatatctacaaaagagatatgttgatacttcttcccttttgaattcatatctcccttgatttccattagttgtcttatttctctagagaaaaattcaagcactatgttgagtagatagaaagagtgagcagccttgtcttgtaactgattttagtggaattgtttttctcttcattccatttgaggttggctataggcttgctgtatatgcctttattatgtttaagtatgtgccttgtatccttggtctctccaagacttttatgatggtgtgttggattttgtcaaaggcctttttcagaatataatgagatgagcatgtttttttttttttttttatatagtggattacaatgacagattttcatatgttgaaccattcctgcatctcttggatgaaacctactagatcatgatgtgtgatgttttttgatgtgctcttggatgcagttttcatgtgtgctgttgaatatttttgcattaatgttcatgagggaatttggtttgaaatcctctttcttttttttaaaatattttttattaggtattttcctcatttacatttccaatgctatcccaaaactccccgataccctcccccccacactcccctacccacccactcccactttttggcccnnnnnnnnnnnnnnnnnnnncccactcccactttttggccctggcattcccctgtactggggcatataaagtttgcaagttcaatgggcctctctttccagtgatggccgactaggccatcttttgatacatatgcagctagagtcaagagctccggggtactggttagttcatattgttgttccacctatagggttgtagatccctttagctccttgggtactttctctagttctgttaagtacgtggtttaggtgtcagggggactgtgggctcataaaatgaatttggcaatgtttttttctctttccattttgtggcataatttgagatgtattgatattagctcttttttaaaagtctgctttggggatagcatttgaaatgtaaatgaagaaaatatttaattaaaaaatgccttttaaaaaaagaaagtctggtagaattctgcactagaaccatctggcgctgggcttttattggatgagagacttttaatgactgcttctatttccttaggagtctattaaaattgtttaactgtggtaagtgatatctgtcaagaacatatagacagattctttcagattttccaattttgtggaacacaggtttttgaaggaagacctagtgattctttggatttcctcagtgcctgttgttatgtcctcttttcatttctcattttgtaatttagatattctctctttgaatttcagttaggctgaataaggacttgtttattttctcaaagagccaacttcttccttcactgatttttttgtactgttctctctttttatttaattggttccaggcctgaattagagtatttcttaacacctacttgtcttgaatgtattttattctttttgttctagagctttcaagtgtgcctttgggttgctagcttgatatctcactatttttttttttatgaaagtactaaatgctatgaactttcctcttagcactgctttcattttgtcccataacttagagtatgttgtgcattcattttcattgaattctaggaagtctttaatttctttaattttttttccttaacccagtggtcattcagtagaaagttgttcagtttctatgagttgtaggctttctgttgttgctgaaatctgactttaatccatgatggtctgtttggatacagggggttatttcaaatttcttgtatctgttgagacttgctttgtgagtcagtatatggtcatttggagatgctgagaagagggcacattcttttgtgtttgggtgaaatgttctgtagatatatctcttaggtccatttgagttacaatgcattttagttccatttttcgttctagtgtatttatcggatagatttgtgaatagatactgtttaaatctggttttgtcttagaataacttgtttactctaactatgattattgaaggttttgcttgatgtagtaatctgggctggcacctgagatcttttagagtttgcaagacaactgcctaggcccttctagcttttagagtctctcttgaaatgttgagtgtacttttaacaggtctgctatcatatgtcccatggactttttattttgcaggttttaattttctttattctgtacatttagtgttttgattattttgtggaagggggtgcttttttttctggcccaacttatttggtgtcctgtaagcttcttgtgcatttataagaatcctttcctgtaggttggagaaattttctcctatgatgatttgttgaaagtattttctagtcttttgagcttggaatcttctctttcttctattcataatattcacagtatttggtcttttcctactcttcaagatttcttggatgttttgtgccaggaactttttagaattaacattttctttgactaatatatcaatttcttctattatatctgctatgcctgaggagctttctttcatctcttgtactctgtcgatgatgcttgtgtttgtagtttctgttctcttaactagattttccacctccaggattccttcagtttgtgttttctttattgcttctgtttccatgttcaggtcttgaaaagttttattaattttctcacttgtttgtgtttttctgatttttttttcatttcctctttaaaagactctattatttttcctaaggttggatttaaggtcattttcagctgtgttgaaatatgcaagacttgaggtagtaggatagctgggccctgggggtgccatattgctctggctcttgttgattgtattcttacaagagagtccaagcaggtactcagaaccagagagattgcccagtacttggaatcctaaatgcaacagtggcacctgaaaccacagaggtcatacaggtcacaaaaaccgaggcagaggtacctgaacttgcaggcctgctcatcaccagaaccctcctccactcggtccagaagactagagacaaaacagaagccaagggggtaaaaacatctaaaaccaccctttgaacaaagataaactcagaaatcagcacccaaacctataaaaatctcaaacctagatgactagaggctagtattctgtcacctgcgatccaagctgtgggtcataacatggatcccaggtgacaggatacagttcaggactgttggatgtgctctaaggggagtttacaggcagaggaaagtgccgtccctgaaagtctctaatttctgggaaagcagttggagttgtgggttggaatatggagcccaggggatgagtacagttgagggatgttgagctatctctaaggagagttagaggacggtaggtagtgttttacatgggtcccttagccagtacttacatctgggaaagcttgtgagccagaatctgaagctgagggaaggggtaaaatttggggctgttgccatccagttcattttttactctttatgcagatatttccataacttgaaccattttttttttcttttttggaggttgaggacgaagcccaggccttgcaattgctagtctaccactgaactaaatttccaacccaacttaaaccattttggagtttgagtttcagctgagccatctatttcatctctaagccaaaatgagctgtaagaagcggaaatcacagatctcatttaatccaaggaaaaataaaaaaattaaggactatttctctcaggtatgtctataaatgttgctagtgggatatactagtagctagctgttttagccaccataggtcctaggttacataggatctagtgccaagaaactgcctcattgttgaatgggacaatgacacattctacatctttctcacccactttatttagtttggtgaatggcatcaaagatagggaattgtattatagcttttagccctatcaaattagcatttaataaaaaaacttaatgcaatcatgtctaaaacattaataaaactgactaaatgtagtatgtcaaaccaacctgtgaaaaaaacaaaattaatactgttgaatcgcatcaaaatgctgtatgattgacctcttcagtcataataacctatatttgtttagtactttccagtttgcaaaactgtaaattgtatatttattcttagcataaaacttataggcaagtgaggaaggcttttggtttcaatttgcttatgaagaaaaaagagagaatggagttgcttgggcctgtgatgaagacttgggcaagtttaatgagctattcagagcctaacactctcaggctctgtcctgacaaatgattgtgtgctctgagactaacattttcctttattacatcaaggcatctgggaagtgccaggcgcaatgtcagagcctttgccttgtttctttgtgtccaggttttggaagggaaggtatccaaatagctagaagatccatggcaagctgatatctgtttatttctgtcctactccataatagcaagctcgagcaacacatgtgatctctctttccctttcaaatgtgtcagggcaggaatgtggtacaatgtaatcccagaattccaatagaatagaatagaagattttgaatttgagaccagaatgaactatataatactgcaaagaaggaaggaaacatcacacacacaaaaaaagcccatacctatccaggaatatttaagtctattaaagtattacgatgtgtgcaaaaaggatgtttctgaccaaatctagactatagaaaaagtctgaacaaatataaactgcagaaatgcattttgagagactctatgcctgggtgagtagatttatatggctttgttttttttgttttgttttgttttgttttgttttctctttaactgataatgttagtgtaattacaaatgatgactggcttaatttttaaccaagctccaacactgctactcccattaccagtgagtgacttgctggcttctcatgacgaatatgatttggggctaatgagtctttcaggcaaactaaggcaattgctgccttagttccttttcctgtcactgtgataaaataaccggacaaaagcaaattaaaacaggaagggtttgtgtgactcacagtttgtgacaactcatcatgggaaggaagtcacaggagcatgaccttgagagagttagttatgttgtatttgcagtcaacagtagaaaacagtgaacatgcgctcagttcccccattatcaacttaaacagtccgggacccaacctaggggatgttgccaacatgtttgtagagtggttcttcccaggattgatgaagaaacaccccacagacattcccagagacccataccacaggtaatttgaggttctgtcaagacagttaacaatggctgccataaacagtttcagttttcattgagaatttcctatttctggaatttgacttatgtcctcccattttcctctttttttttttttttttttgcgtcttaacataaagtcttataaaaaataggagatgatgaaaatttaccaaaaaaatgtgtagtccaattaaaaaaaaatgagaatttgtattagaatccactgtgcatttgtagctatctacataggatgtaaccaagatatttcatgtgattatattaatttaaggaatttatgtgctaaagagaacagcttgcatgagtttcatgatacatgctgcctaaatcacagtattaaggagatatgaaaattgtgaggttgaagacaaactgggctgaatactgaattccatggaagcattaattgcatacgaagattctgttttacaaattgctaaataaattccggattatggagcacctgttgctgttgcagaggaactgggtttggtcttctgcattcgcacggtggttagtaaatactagtaactccagttcaggggatctgatgctttctccagacttctgtgggcaccaggcctgcgtatggaacacaaacacattaggtaaaaaaaattgatatacataaaatgaataaatcttaagagcaaattaatggtaaataaatagcttaataaaatgttattgtaacacatcttatgcttggataagataaaatgtatattaaaaaaatgagttgacatgccatacagggaagcttgcagacctttgggtatctgaagaacactgtgtctgcactccttttttgtttgtttggtttttctgtttttgtttgtttgtttgtttgttttttagaaaaatgcaccatgtataacaaaaggagcttttctctcctatttgatattaagttgaggttgtattttaaattcaaagatgaaccttgatttaattctacttattggtctttagagatttgtactgaatttcccatatgaactgtgtgttgacactaaagacggacacaggcctcgagatgtcagagttataaatatctaccatttatttttaggtccccaaagaagagcagaatgaccccaacacagtaaaagtggactctaaaaaaatgccaagggatataaccaacaccagggaccaaagaccactttcacccaggaaaactcgacaagatcagactcctcccctaaataagaaaatcacagtaaccttgggtgtgaactctaggaaacacaaaaacatgaaatatgagctcacgtgtagggagacaagcagcttgtatgcagcactcaacactctcagtgctgtcagagaagaggtagaaagtcaaaagggcagagaaatgctggtgtgtggcaaagaaggaattgaagggtacttaaaccttggcatgcccgtctgctgtataccagaaggcagccatgtcgtcattacattttgtcaatgtaaaagtaagacacaggaaaataaacaattctttgaatcacaggaccaagcatctaccaattacgtccgattttgcattcatgcagttgggagtaagaggaaaaagattctgaagtgtggagaacttcagaaagaggggaacaaactctgtgtctatggcttcaaaggagagaccatcagggacactctgaggaaggatggcaggttttgtactttcatagagagtgacgattggaaactcattaatgacctggacaccatcatagaaaacacacagccagttgatgagttagagggcaagctttttcaggttgcagctgagctaccaaagaaccccagagtagtctctgtcactcagaattctgggtcagagaacagaaactttcataagctagaagagtacattgtgaatgagtacactacattgaaagaagaaggaaaaaaacttagagcatacatcaaggaaaaaagtgaaaaaaggaagaagaaagcttccttattcaaagtgcataaagaacactttgggaaaatgacaagaaattctactcctgttaaagtggtcaaacatctttcgagggtcagtgactcagttgggttcctatggtggaacaacaatggaaatgcaggctgtgccacctgctttgtttttaaagagttgtacattttgacttgtcagcatgtgatagctagcattgtgggtgaaggcatagattcaagtgagtgggcaaacataattagtcagtgtgtaaaggtgacctttgattatgaagagttactaccaacaggagacaagttttttatggttaaaccttggtttgaaatatctgataaacaccttgactatgctgtcctggaactgaaggaaaatggacaagaagtacctgctgggctgtatcatagaataagacctgtgccacatagtgggttgatttatatcattggccatcctgagggagaaaagaagtctattgattgctgtacagtggtccctcaaagtagtagaagaaaaaaatgtcaggaaaattttcaagcaagagaggaagcaggcttctgtttttctacatcttttatccatatgtacacacaaagaagtttccaggaaatgcttcacaactctgatgtggttacttatgacaccagtttttttggtgggtcttctggatccccagtatttgattctaatggttcattggtggccatgcatgctgctggcatcacttgtacataccaggctggagtttccaatatcattgagtttggttctattatggaatccattgatgatcatatgaagcaagataaatataaagagtggtataacacaatttctggaaatgttcagaatgtagaaatgctgagcatagatttctgagggctggaaagggtttagtcttttaaaactttaagggaattgcctattgtgtttttctgcagacaataatgttttatgaagtttcaaaatgattgctttcaccccaaaatggcagttctagattacgtcctaggtaccaggcatttttagtttattcaaacaaacaaacaaacaaaccaagacaaaaccatcaattgaactatttatgtaaggtaacatggaaaagaaaattaagtgctaatgtggtctcggagatcctagtgtcaggaaatgctacgatgtgagaaagttcagagcatagaaactggagttgttggccaaaagattcatggaaaaaaaaagaagcctaccatgcttctggaaacttgaaccaatttcaaacatactcatttggttctacgcatatctcccttctctgctgaccagagctcagccaggacactggatcacagagttttcagccctaagatgcccctgatcatagatgtccttccactttggctttcttactaaagacgtggatctgaaattaaccttcaaggaatggttttggaaatcattgagcaggcaaagaactgatctctgccatagaatttgtgcacctgagagttcctggtcttgagttatggagagcaagcactggtttctacttcataggattcacaatggagagggctaggaggatactggacaattttcagcagtgtgacactcaagtcctggtcccttggagagaaaggacgcggtgttcaagaagtaatctcatcaaaatcagagtcaatgagaccttacatacagaagacatgaggtcttagattattggagggaaagtggaacgagtagttgagatgctgagggaaggttgctaagagatctggcattgcttcaattcttcccttatcagaacgaaatatgtcctgtgttagagctagcatgatcgcaagccacaactccccttattttccagacacctcctagtcctattgtgagatattttgtgtcccctgcccaatgtattgttcccaaatcaaatacagatgaatcaccattaaacatagtgaattttgagatacaaattaaaaaaattatttgtatggaattccctttgtttttggtccaaatattcattctcaatattataaagtaataaatgttgttttcacagctgttttctttagttatttattttttgtttgtttgtttgtttataacttataagttactcttaccagccaaaagatcctcattatttttaagttctgttgggagtagagggggttctgaccctgcaagtattatgactgacaacgaagtggactgcaaagaatgaaaattggggcatctgaattgcggcagtcagatggggatcaaatttagagaaaatggcttaattttcttacacatttaaacacagtaggactttgggaaagtagtttctatgtggtaattctcatagaaaagccttagaaatggatacattgaaatccccttgcaaaatgccccactataggaaagaatctgagactttggtcataagaacagtgcatgttgactgggctacatacagtgcttggggctagaacctgcaaaggaagatttaataagcctgagggtggatcctacagatggagggtacacagtacatgggggcttttcataaggataaattctattttctaagagaaagcccatgactggggcctaattggttctcaagacttgggggaaattcaggtggctgctgctcctaaaagaatagcctagggcaccaagttgtttgaccagtttcactccagcattccaagtgactaggcattcatttccttaaagaaaataggcctgcctaattgacaatcctggttgcggcaatgcttaatctaagctgtgcttcctaccaaattccatattcgctccttaaaattaatctgtaaacatcccaagtcaaattcttacaatgtgtcctgtcgtttgcccataggactgacttgtctgctatactcttctctactgagaggcatgctctaccttctcagctctcaatctatgacttttcttagatttatttatttattttatatgtataggtgtttttgtctctgtgtatgcctatacactaggtatatgcctaatgcctaggaatccagaagaaggcatgagctcctctggaatttggagctataattggagggttgtgagctgccatggctggtctgggaattgaactccagatcctctggaagaaatgctcataaccctggaaccaactctctagcttgtcaacatgtaatcaataactatcttttctattacatattctgctctgtacattccagaacctgagaggattccctgatttgtggaatcaaattctgtcaaccaagaaacacatgcagtgggcaaaggaagaggattaaaagtccccactgacacacatgttaatacgtctgactatgagctagcgatcccaatggctcttcagtattactcaagttattctcagcaaaggagaaaaaaggatgggctgttacattgggtaagcaagtcccatggccctgcagaaaagggatgtagctatagctaccagatacatgacttactagtgtggatattaatcatgtcagcaataaaggacttctgtggtacatagctttgcgttaaccaaatcattagaaatccattcagtttaatacaaaccagttatccaacaccaaagatagaatcatgtaggtgatttcttttttctaactctgaacccactctttgtctacctcctcctcagctgcttttgggggagggagataaaacatacctctgagaggtttctattccaggggggctctgggggccatgcaaaattgtatacccatgttgggaggaattcagaaaggggctcaacagtattattttgactcattcaacgaagtcacagtatccctcactttccaacaaggaggaaaaaatacgaacatcaaagcctggtcagtctgacagaaccaatgggaggaagcacggtgcatgaggccaacacctggacctgggtattctgtagcattgagagttacgtggagagaaatggatgctggcgtgaaaaggtgctgacaatcaagtttcccttctctatctccccacagctgcacttctctactctagctggcctgtaccagagtctttgatttcctgggcttctaagcaggtgtatggggtaaaagcccctgattttcattttgattctgttagtgggaaggaaacaatagaatcaaactgatgtaggttaggtgatacttttgatggggaaggaagataaagggaacccaaagaataggatcatttggatggactcaatacttgatgcagaagaggacctcttgtttgacatctgctccacttggacatgtcgattgccctctgggcctgcatgtaggctagcaaaataaaagtgtgctaaggaggtggaaaagcccagctgtggtgagagactcaagtctgcaggcctgcttagagaccatttcctaacacaacattgccacctattggatggagctgtgaggtacattccctcccaatggcagccaggatcctgtgtcaaaacagacaggtcacaaggaggctttcttctattggcatcctttttgggcaatgactcaactgatatttcataacaatgaaagtatgccatttaaatatatagtttaaccaagattttagcctgcatagtcttagtgttattgatttaaccaaaaaccaaccaaccaaccaacaaaacataagagccttgctgaaggcaatttacaagtttttcactctgaattcacaacaggggtcctggcacacacacacacacacacacacacacacacacacacacacannnnnnnnnnnnnnnnnnnntgaattcacaacaggggtcctggcacacacacacacacacacacacacacacacacacacacacacaccttatggaaatagatcaaaaccaaggataatcaggatatatgaacaccagacttatttgaggatctttatccagagatggtaaaggcacattatcaaatcttccataccttatcaggaagaaggattgggtcagtgaaggaggacaggaatgtggttaacatttaaatgatgtatctaagcctttcccgttactcttttggccatatttgatggttcattgaaagttttatccacttgaggaaagcatggcagatggtctcagacagccaaggaagggaggttttggtcatggcagcatagaagaggccaacactgcgagacatgctagagaaggatgaggagaatggacagcggcagagagatgcaactgagataaaaaaaaaacatgtgattgatcatatcactgcatccagaaaagcattcagcaaaattaaacaataattcacaaacactctcagcaaactaggaatagagctaaatttctcagtatgataaagaactttaaaaaccatacatctattatgatatgtaatgataggagacctaaatgctttcctgccaagatcaaacacgaggctatgaagtttactgtcaccactccaattcaataccagaagtcctagctgatgtaatacaagacatacataacacatgtattaaaaaggaagagaaaggctctttgcagaatacgtttgtctatgtatcttttttaaaaaatcctaaataatgaacaatagccacaaaaagttgctgggtctgatggataagtgatttagttcactgttaaaatatgggcattattcaacacagagactcatacttggtcaaagtgttgagaataatacagagttctcagccctaaatgggacatctgtattaaccccttatcaagttctggacagtaaccaagagccgtggaatagcctgtaatgctttgaggggttgtgtggggcggctttaaaaggtaacccacacctggccccacacctggccccacacctggcactaggctttttatttgatagtcattagtgtcagagggtagttctaattaaacccattttatgtatgtacatatacaacatccaatgggtacagagtataagggtctatttctttgtttcatattgactttcaaaaggtagtacaatatttcagcctgctctgatttctacatagacagcgtaaagtttataccataaacgcatgcatcccttggcactgactttcagtggtcacaactgtgacatttgaccagcagagagcatgaaagctctaagatgctggtgcaaactgacagagggcgtggcttctgcatatctgacacacctccaggattcaggcctgaatgaggtaatagcaggccagaagaagaaggcgtggggctgagcgtgcgtgtgttcgtcagtgtgtgtatgtcagagcgagcaaaagccctcgtgagactcaagtgtaggagctccggcnnnnnnnnnnnnnnnnnnnncacacacacaccttatggaaatagatcaaaaccaaggataatcaggatatatgaacaccagacttatttgaggatctttatccagagatggtaaaggcacattctcaaatcttccataccttatcaggaagaaggatgtatgccacctgatagatttttgggtcagtgaaggaggacaggaatgtggttaacatttaaatgatgtatctaagcctttcctgttactcttttggccatatttgatggctcattgaaagttttatccacttgaggaaagcatggcagatggtctaagacagccaaggaagggaggttttggtcatggcagcatagaagatgccaacactgcgagacatgctagagaaggatgaggagaatggacagcgccagagagatgcaactgagataaaaaaaacaaaaatatcatatcatatcactggatacagaaaagcattcagcaaaattaaacaataattcacaagcactctcagcaaactaggaatagagcttaatttctcagtatgataaagaactttaaaaaccctacatctattatgatatgtaatgataggagacctaaatgctttcctgccaagatcaaacatgaggctatgatgtttactgtcaccactccaattcaatactagaagtcctagctgatgtaatacaagaaatacataacacatgtattaaaagggaagagaaaggctctttacagaatacgtttgtctatgtatcttaaaaaattcctaaataatgaacaatagccacaaaaagttgctgggccggatggataaatgatttagttcactgttgatgttctaacaatgtacatgaggctgaggtacttttctttccttccttctttgtttctttgtttctttgtttctttgtttctttgtttctttctttctttctttctttctttctttctttctttctttctttctttctttctttgtttttatgtgtatggatgttttgcctgcatgtatgtctgtgcagtacatgtgtgtctgatgccatggagccaggaggaagttgtcagatgcattgggactggagttacaaacaattgtgagctgtcatctctctagccctggtctgggttatttttgaatagtagaaatttgttactgtatctgtggagactgggaaatccaagatctaaggacttatgtctctggtaaacctcactgcttccaagatagtgccatttgttgcatcttttgatgacagaaggtggaaggacaaagaggcttgatctttaatgaagtactaatgtcaatcatgacagctcagcctggtaatcttactccactgagccttaggtaacatcttaccaacatgcacgttgtggagggatctatgtatattgagaccagagtgaaaattgaagcaactgtagagtgaacagataataacaaaaaattcttatttaccagcaattagcaattggaatctgacatttaaaacaatgttttttactctgagtgtgtcctacttataatattccaacttagcttattattacagtttgtgaatcaacagtatatactactgataggggacgaacacatatataaatagaattgaatagagagattttgaaaatggataggttcacggaatatttgcaggtgtatttgacaaaggtaccaaagaaattcagatgaaactttttcataaatcacactggagcaagaagtccccaaagtcccaacagaaagaaaaggcaannnnnnnnnnnnnnnnnnnnnnnnnnnnnnnnnnnnnnnnnnnnnnnnnnnnnnnnnnnnnnnnnnnnnnnnnnnnnnnnnnnnnnnnnnnnnnnnnnnnnnnnnnnnnnnnnnnnnnnnnnnnnnnnnnnnnnnnnnnnnnnnnnnnnnnnnnnnnnnnnnnnnnnnnnnnnnnnnnnnnnnnnnnnnnnnnnnnnnnnnnnnnnnnnnnnnnnnnnnnnnnnnnnnnnnnnnnnnnnnnnnnnnnnnnnnnnnaaagtggaagccagaaagttgtaaaaaacaaaaacccctgttaaggatgaaaagagcctccagcttgatagaagatattttcaagtcaagtatccaaaagttttcattgaggatatttttaatgttctcacttcattttaaaagtagccaaacacatgaacaaacatttcacaaagaagatgcagaaatcaagaagtcacatagggaaacactaaataagcatcactattattaacacacggcatgttcacacacattaaaagctcaagaaatatcatgacacccctaatagaaacgctaaaaaaagtatactgataataggattcacaaaatggcccagtggctaaaagagcttaccacacaccaaataacccaagttcaatgcccaggacccacataatgataaaaaagaactgactctacaaagttgtccttccctctccacatacacactatagtttgtgcctcctcacaatgatgctgatgaggacgacaacgacgacgacgatggtgatggtgatggatatgaggagactagatgttgagtacattgcttggtcaaagggagaaacggcacaaccacactagaagactggctccaaatcaatggctggggagctcctagatcctagagtagaagatgccactgctaattcctaaacagtcttgtgtcaaaattccttctcaatatttatgtttatgtccataggcctaggcagaagctttctttaaaatatgggtattattcaacacagagactcatacttacttgttcaaagtgttgagaataatacagagttctcagccctaaatgggacgtctgtattaaccccttatcaagttctggacagtaaccaagagccgtggaatagcctgtaatgctttgaggggttgtgtggggcagctttaaaaggtaacccacacctggccccacacctggcactaggctttttatttgatagtcattagtgtctgggggtagttctaattaaacccattttatgtatgtacatatacaacatccaatgggtacagagtataagagtctatttctttgtttcatattgactttcaaaaggcagtacaatatttcagcctgctctgatttctacatagacagcataaagtttataccataaacgcatgcatcccttggcactgactttcagtggtcacaactgtgacgtttgaccagcagagagcatgaaagctctaagatgctggtgcaaactgacagagggcgtggcttctgcatatctgacacacctccaggattcaggcctggatgaggtaatagcaggccagaagaagaaggcgtggggctgagcgtgcgtgtgttcgtcagtgtgtgtatgtcagtgcgagcaaaagccctggtgagactcaagtgtaggagctctggccgcggatacagccagcgctgagctgaaaacagacaggaagttagtggctgcaaacctcagtccccgcgttggcccctgggaccgggatggcaagcgagcttttggacacccggggacccgggaagtatccgcgggcgtgagctcaccttggcgttcttccggggaggggagacacctggaagcctctgagcggagccccagggagggagctgtgccaccgccgttgcctggctcccagcggagagaggacggagggcgtgaccatgcaactccagcgaggctcaactggtgcgaggcgggtgctgcgtcgcgcttgggccgtgcgccctgggtggctttgcaaggcgggcggcgaatgtgcagggtcaggttttttgcatgaagccgctggacccctcggagcagcggcagcgacaggggcggtggagcacagttggaggcgggcagctacgggtccgcgtcccggtgcctaagcgactgcagactcccccatgaaccacagctgaggcttcccgggaggcggtggcgcccgaggccgggtgtgcaaggacggggaagggagcatctcagggcacttcatgctccagacctcagccttggaccctagtggtgtaggaatggctgaccgatcatggcggctggtgtccctacagccctgctgtgaaacaccacttcaaggcggtgctgcgctggtccacgcgcggggccagcgtggtgttgggctaggtggagagacagattgccccctacatcatcgacctgcagtccatgaaccagttccgccaagacacgggtgagccatccaaatccctggtctgtccactgactcacccagtgactagctttgcttactgatgtcctcacgtgataggtgttgagggcaggtgtttcccttccttagatcctcacaggattccaagaccaccttcaagtatttgtcctggcaagtagtttaaattgtcttgattatacaaacccagcttcggcctagctgcaggagacccctttatgcccccatcgccacccccagcccctactggcccttagtgcaggaattttaggactttgcagttccccaaggaatgcggggtcttcagcaagatactgctggagcccttttactgctcacacctcagctgactttgctttgcctcaagcacctttggggctgccggtacacctccccctcccttcaacctggctgaatctggccctcttctatggacccccccttcccactgacaactcctggatgtaagatttgggaagccgtagggttcctcagtgtctagttacagtctagtgtgtgaaaagtgctggaaaattactgggaagagagattggagccagggattccagagctggagcatctggatgtggtggagagaagaaccggaggactgggctccggaatgcctggcagagaggctcctccctttgtccacagaggacgggacagagtgaacattctgcaacattctccaacagcctgcagagtggagaatgtctttgccagctatgcctcagacaggggctgggcgtctagaatatataaagaactgcagtaattaaacttcaaaatagctagtcaataaatcagccaatgaatggaagataccgttcgcaaaagtaggaccacatatggacaccagagattaaaaaggcgttcagcattcttagttaccagctgagtgaaaattgaagctacgttttggattccatcttcccctagtgacaattactaagataaagaaaagagacagcagtgctgttgaggtaatgtaacctagtacagccattatataaattagtatacatttctaaaaattaaaaaaacagaacttccctatgatccagatatacttctgagtgtgtgagtgtgtgtatgtgtgtgtgtgtgagtgtgtgtgtgtgtgtgtgtgtgtattctaccacagagatacctgcacatccacatttattggttttctattcaaaatagcaaagaaatggaaccagcccaaatggagccaacagatgaatggataaggaaaacgtggcacatatataaatggtatttattcagctgtaaagaaaaatgaaatcacataacttacagaaaaatgaatgaatatgggaattagaaaaaaaaaccctccagatttagacagacagcacatctctcacatgtggagcctagcctataaagtctgtctgtctgtctgtctgtctgtctgtctgtcgtatgtaagttggggtgaattccttgactgtaggctctggaatcagaaaagagtgcacaaagagggaaagaaagtgttgcagaagtagaggaagggcacag

SEQ ID NO: 736 - DNA, 3266 bp, Mus musculus
ctaaaagacccgggattccagcggctggagcgaagctgccatagagtggaaagatccaaccactactcagttctcttcatgcctgtttgcctggccttatcatctccattttaaaccaacagcagatattaacatcagtgttgaggacgaagcccaggccttgcaattgctagtctaccactgaactaaatttccaacccaacttaaaccattttggagtttgagtttcagctgagccatctatttcatctctaagccaaaatgagctgtaagaagcggaaatcacagatctcatttaatccaaggaaaaataaaaaaattaaggactatttctctcaggtccccaaagaagagcagaatgaccccaacacagtaaaagtggactctaaaaaaatgccaagggatataaccaacaccagggaccaaagaccactttcacccaggaaaactcgacaagatcagactcctcccctaaataagaaaatcacagtaaccttgggtgtgaactctaggaaacacaaaaacatgaaatatgagctcacgtgtagggagacaagcagcttgtatgcagcactcaacactctcagtgctgtcagagaagaggtagaaagtcaaaagggcagagaaatgctggtgtgtggcaaagaaggaattgaagggtacttaaaccttggcatgcccgtctgctgtataccagaaggcagccatgtcgtcattacattttgtcaatgtaaaagtaagacacaggaaaataaacaattctttgaatcacaggaccaagcatctaccaattacgtccgattttgcattcatgcagttgggagtaagaggaaaaagattctgaagtgtggagaacttcagaaagaggggaacaaactctgtgtctatggcttcaaaggagagaccatcagggacactctgaggaaggatggcaggttttgtactttcatagagagtgacgattggaaactcattaatgacctggacaccatcatagaaaacacacagccagttgatgagttagagggcaagctttttcaggttgcagctgagctaccaaagaaccccagagtagtctctgtcactcagaattctgggtcagagaacagaaactttcataagctagaagagtacattgtgaatgagtacactacattgaaagaagaaggaaaaaaacttagagcatacatcaaggaaaaaagtgaaaaaaggaagaagaaagcttccttattcaaagtgcataaagaacactttgggaaaatgacaagaaattctactcctgttaaagtggtcaaacatctttcgagggtcagtgactcagttgggttcctatggtggaacaacaatggaaatgcaggctgtgccacctgctttgtttttaaagagttgtacattttgacttgtcagcatgtgatagctagcattgtgggtgaaggcatagattcaagtgagtgggcaaacataattagtcagtgtgtaaaggtgacctttgattatgaagagttactaccaacaggagacaagttttttatggttaaaccttggtttgaaatatctgataaacaccttgactatgctgtcctggaactgaaggaaaatggacaagaagtacctgctgggctgtatcatagaataagacctgtgccacatagtgggttgatttatatcattggccatcctgagggagaaaagaagtctattgattgctgtacagtggtccctcaaagtagtagaagaaaaaaatgtcaggaaaattttcaagcaagagaggaagcaggcttctgtttttctacatcttttatccatatgtacacacaaagaagtttccaggaaatgcttcacaactctgatgtggttacttatgacaccagtttttttggtgggtcttctggatccccagtatttgattctaatggttcattggtggccatgcatgctgctggcatcacttgtacataccaggctggagtttccaatatcattgagtttggttctattatggaatccattgatgatcatatgaagcaagataaatataaagagtggtataacacaatttctggaaatgttcagaatgtagaaatgctgagcatagatttctgagggctggaaagggtttagtcttttaaaactttaagggaattgcctattgtgtttttctgcagacaataatgttttatgaagtttcaaaatgattgctttcaccccaaaatggcagttctagattacgtcctaggtaccaggcatttttagtttattcaaacaaacaaacaaacaaaccaagacaaaaccatcaattgaactatttatgtaaggtaacatggaaaagaaaattaagtgctaatgtggtctcggagatcctagtgtcaggaaatgctacgatgtgagaaagttcagagcatagaaactggagttgttggccaaaagattcatggaaaaaaaaagaagcctaccatgcttctggaaacttgaaccaatttcaaacatactcatttggttctacgcatatctcccttctctgctgaccagagctcagccaggacactggatcacagagttttcagccctaagatgcccctgatcatagatgtccttccactttggctttcttactaaagacgtggatctgaaattaaccttcaaggaatggttttggaaatcattgagcaggcaaagaactgatctctgccatagaatttgtgcacctgagagttcctggtcttgagttatggagagcaagcactggtttctacttcataggattcacaatggagagggctaggaggatactggacaattttcagcagtgtgacactcaagtcctggtcccttggagagaaaggacgcggtgttcaagaagtaatctcatcaaaatcagagtcaatgagaccttacatacagaagacatgaggtcttagattattggagggaaagtggaacgagtagttgagatgctgagggaaggttgctaagagatctggcattgcttcaattcttcccttatcagaacgaaatatgtcctgtgttagagctagcatgatcgcaagccacaactccccttattttccagacacctcctagtcctattgtgagatattttgtgtcccctgcccaatgtattgttcccaaatcaaatacagatgaatcaccattaaacatagtgaattttgagatacaaattaaaaaaattatttgtatggaattccctttgtttttggtccaaatattcattctcaatattataaagtaataaatgttgttttcac

SEQ ID NO: 737 - protein, 611 aa, Mus musculus
MSCKKRKSQISFNPRKNKKIKDYFSQVPKEEQNDPNTVKVDSKKMPRDITNTRDQRPLSPRKTRQDQTPPLNKKITVTLGVNSRKHKNMKYELTCRETSSLYAALNTLSAVREEVESQKGREMLVCGKEGIEGYLNLGMPVCCIPEGSHVVITFCQCKSKTQENKQFFESQDQASTNYVRFCIHAVGSKRKKILKCGELQKEGNKLCVYGFKGETIRDTLRKDGRFCTFIESDDWKLINDLDTIIENTQPVDELEGKLFQVAAELPKNPRVVSVTQNSGSENRNFHKLEEYIVNEYTTLKEEGKKLRAYIKEKSEKRKKKASLFKVHKEHFGKMTRNSTPVKVVKHLSRVSDSVGFLWWNNNGNAGCATCFVFKELYILTCQHVIASIVGEGIDSSEWANIISQCVKVTFDYEELLPTGDKFFMVKPWFEISDKHLDYAVLELKENGQEVPAGHRIRPVPHSGLIYIIGHPEGEKKSIDCCTVVPQSSRRKKCQENFQAREEAGFCFSTSFIHMYTQRSFQEMLHNSDVVTYDTSFFGGSSGSPVFDSNGSLVAMHAAGITCTYQAGVSNIIEFGSIMESIDDHMKQDKYKEWYNTISGNVQNVEMLSIDF

SEQ ID NO: 738 - DNA, 32160 bp, Homo sapiens
caccgatctctaggtcaggggtaaaatgcctccagtctctttgctaaagcatagcaagagtgacatttgctccagtttcaaataagttcctcatctccatataagaacacctcagcctgtacttcgttgtccatatcactctcagcatcttggtcaaaaccattcagcaagtctctaggaagttccacactttcccacatcttcctgtcttctgagccctccaaactgtcccaacttcttcctgttacccagttccgaagtggtttccacatttttaagtatctttgtggcagtgccccaaactcctggtaccaatttcctgtattaatctgtttttacactgctacaaagaaatacccaaaactgggtaatttataaaggaaagaggtttaattcactcacagttccacatggctggggggcctcaggaaacttacaatcatggaattaggggaagaaaatatgtccttcttcacagggtggcaggagagataaaagtgtagtgggaatagccccttataaaaccatcatatcttatgagaactcactatcatgagaacagcatgggcaaaactgtccccatgatccaatcacctcccaccagattccccccttgacacttgggggttattgggattaaaattcaagatgagatttgggtggggacacagagccaaaccatatcagtatggctcttaccttagggaaacctgacagcttggaagagatggctgagtagctgaccagacatttgagttcgaatcgtgaagctgagggaggaaaaagtcagagtttaaagcctgtcagctagtaggaaacctaataaacaccacaggattttggatgggtaaaaagttgttgtacccaaggaataaaaatgttccagaaatatctcagccttcacagggacacaagtcaatttgaaatcacctcaatctaaattaggttaatgtaatctaggactacaagtgactcccacccagctgcttgcaaaaattaatggtaaagtctctttggaggaaggttatattatctttggcttctaattttttctacaagacaaaatttcctacagaaaaatgaatgtcaatctttgacttttataaaaaggtaaggaacttttattggcaaaatcaatcaagaaagatggtaaaaatgtagatttaataagaaaaaatgtgacagtattctatccaatactaaaatgggagttacatattttaactataagtatttgcctataagcccattcaagggcttacagtgctcatggaagtgatcacccttctttcttcatttctacctgaatagtagagcattagagtcattctttctctaccagaccatgtgaattgacatttcctgttttagattgtactgaaactaaaagaaacaactgtacaaccaaagatgaggtataaccttaaccaaaattatatctctggacattttcataaaaccatgggtcctcttattaaatgctggaacccagtactcctcctgctacaaccacacacactaaagatttcaaatcacctgatcctactattgcaaataaatctccactgagttattcatggaagtgtttaatagggtaaatcagttgtaaaatcttgtttttaaacagcatgcaaataaagcctgctcttcatggccccagttctgaaagccctgtcatgtatcactgcttgagcttacctgccgtatgacttctgcctccatccctctgaaccaaagatgggcctcacaagatggaccagaaacacagtggttccaagtggttatagtaagattcatttgccacctaaattttaggtaaaaattatcactggaatgttcaggaactgggcacatagaccctggaattttgcaacagcaaacacatctgaatttggaatctatatctcaaatgttaccacctctgtgacagcatccctgaagccctctctgtgctaccactgcaacctgttcacttctgtattatggttataactctttttttaatttttttttttacttttactcatctactagattgtgacttaatgggtggtgaggacaatgttacgttcatcttagcaatcccaatgcttgacactatatctggcatgcacaaaaatttcctccaaaaagacggaataaaatttttaaaaagatactttaggtttataggtattagacataaattagtggaaggtaacagctatcccatagagcacattagagagactggtgttccaacagctacatgaagtggaaccacacaaaccagctaaaggtgaggccctgcaggttgggcttctccagcactttctgtctttgctgcatgatcctcatggactgcatccaaccttgtaaagtcagccaagaagagaaaaatcagaggctcgtccattccttgccggtgtgatgacatgaggagccatcctttgtgaacagaactcattggtttctgcagttttttgttttgttgttgcttttggtaaaggttggttatagcgttgaagcagaactaaaagacgtccactcacagtgaactctggctaatgattctggacagtccaatcctgtggttcaactacttcaatggccagccaagggaaaagggactgagtatataaattaattcccaggcttcagggagcagaaaacgcctgcaattcgtttggacattgcagtgtgcttttgctcttgttggctataaaaaggctagggagaaaaaccaaagttaaggaattaaacttcctactatataacatattggtttacaagaaaaaacatatatatataaagttatttatatttaaacctttatattttaatccttaactcttccccaggaatccctatacattttcacaataatccaggataccacaaatgatggagagaagggcatttgagatcttgttagcccttgaggccgccccaagaggctcaccagcttcagatctagcaccatcagaccaacagatggttctcagaggagcacatggaagtgaacgtccagcttcccaacttaacacccccgctaatcactcagccagggaaaagcagtttcccagaaggctcaagctctgtccaagagaagtgagggctgggcaaaccatttccacgtcctgctgccactgggcatgagggatgtgggttctcacctcagctccgccctccccttacccggtttccgcaggctaatcctctgtcgccatctgctggcagcgcgcggcactccccagcccggttaggaagaaacggctttgctgggtgagatttaggggctgctctcgcgtctcgtctcgggagctgtcctgaaagggggctgccacgctggtctcattctgtagagctgcaaattaaggagcactgcgggtgcctccagagggtcttggagggtcatttgggctgtgaggttgtagggaaaagaaagagcgatcagactgttactgtgtctatgtagaaaggaagacataagaaactccattttgacctgtaccctgaacaattgctttgccctgagatgctgttaatctgtaactttgccccaaccttgagctcacagaaacatgtgttgtatggaatcaaggtttaacggctctagggctgtggaggatgtgccttgttaacaaaatgtttacaggcagtatgcttggtaaaattcatcgccagtctctatagaccaggggcacaatgcactgtggaaagccgcagggacctctgccctggaaagctgggtatggttcaaggtttctccccatgtgatagtctgaaatatggtctcatgggatgggaaagacctgaccatcccccagcccgacaccctgaagtatctgtgctgaggaggattagtaaaagaggaaaggctcttgcagttgagataagaggaaggccactgtctcctgcctgccccgggaactgaatgtctcggtataatactcgattgtacatttgttcaattctgagataggagaaaaaccgccctgtggtgggaggcaagacatgttggcagcaatgctgctttattattctttactccactgagatgtttgggtggagagaaacataaatctggactatgtgcacatccaggcatagtaccttcccttgaacttatttgtgacacagattcctttgctcacgttttcttgttgaccttctcctcactatgaccctgccctcctaccgcattcatcttgctgagatagtgaaaatggtaatcaataaataatgagggaactcagagaatggtgcaggtgcgggtcctctgtatgctgagggccggtcccctgggcccacttttctttctctatactttgtctctgtgtcttatttcttttctcagtccctcctcccacctgatgagaattacccacaggtgtggaggggctgcctccgaattaaggagcacagcgggcgccttgagagggtcttggagggtcattcgggcggtgaggtctggaggaaagcggggcgggtttcttcctcctgaggtaccaggaagatggaggccactgcagaccgcgtgcccctactagtccctgcggccctgggcgctcgaacctcgggccacagctaggatgggcgcggtggttattcccttttctggaaggaggaaggctagcagcctctggagttttgatggggccgacacccccttaagagtccaaacgaaggctccttatgaaggcattactctcatagaggttctttgccttccaggtctttgactgagctggagtctatgatctggatcctaggaatcccgatctcacaacacttttgacctcaaattgaagtgaacatcaccttttcctgctagtagttgagtaatttggtaatatttatccaaaacctaaaaatcatgcacaatcatctagaccatcaaaacagagtaacatggtagtagtaagagaagtaacaatggcaaaggcgccataccatttccggagcgttcgtgccaggtacatctccacgaccatcccataggctacctcatttaggctcatgccctctatgagacagtattagcgggggcatgttctttacatgcaacgacagaaccaggacagaggcaaacataaagacgcagtggctttcagggtcgagctcagcacagtgttaattctgtctatattctactgcccaaagcccaacattgatggggtggagagcaactgcaaaggcacctggcaaccagtgtgtgtacagggaagggggaagatctgagaacaattttccacactcggccactggttcttccaattctccaagtacttcaaactagattaaacagcaaacgtgtatttaatatagaatgtgtgtgcattttaatatattggataggctatgagacgtgacctggaaaagcactaggcttagatacaatattgcattaaactgctctgggtccatgaatgtgagaatcatattcattcacctctgttccccaatgtccagtacaatacctggcacaaagtaggaattaacacatctcttaaatgaatgaaaccatgtggaaatgatattatttgtgtacctcttctgtcttccctatttgagggcaggggtcaacattttacccttcatagaatgtggcaccggatcttgtaaattgccacccgaaatttataccttgaatagattattggattaatgaaaaagcattatactaggaagaagtaagccactgtgcctttttgcagttagatctgagaggcagccatcattcaatagaataagtttggcttctagtttcagatgggaatacaaatcctcataaggatgtttctgcacaattatttgctaaagctttttgtgaaatggcgaagataatctcaccttccccacagggttattgagagtattaaatgaaacagacacatgtaaatgccaagctcagagaggaactcaaagcagtacagcagcagaggtcatttccctctacacactccctgctgcttccgtgggcagacataagtgttagccaggccaatgaaagcagttaagcagccaagttggactttgccaagggatcccacaccaccaccaccccttttaaaggttactacaaaagtaatcttaagaaagttttatatataataactgtgatatttttaacttgattgcacatcttatcaaacaggtattgattttcagtgctttcaatgattaagaataagggcaacaaaaaagaaaatctgtgtataatatgatgaacctggaatttttggtttcatacgtgtgtgtatatatatgtatatttatgtatatatatatatatacacacacagagcagtaatggcctttaaaataaattcaaataatgatagaaaacaaaacatcttcatgcatggtgtaatctttttcctacaagaaggccttgttttaaaaatgtgcataaggttatgcttttgcatattttatataatttcttaaaggtatgttatcaaattaatgttttccagccagggtatcatatttaagggtgatagtaaatactccaaacacaccagctgtcacaaaataattatgcctatgtctattattgttatctgtttctcataaaattaatcataaatgatatgaattattgattaaaattagtgtttatagactataaacctatgaaaagccacaagagcagtatttttacatatttttcaagaattcagataacagtgtaacctttgattataataacagaattcatttctgtagcagaattacaaatacagcaattataaatataaatgatactccgttaagtccatcctgcttttaactgtgcaactatttacagccagaggcaggaataaaaaagggtgtatacgtgtggaagaaaattcactccatgctgtttttgaccttgcgtgtaaaaaataattcattactatcaaaagaggcattttcccaaataaaaacaaacaaggaaacaaaaacacaggaaaaaaaaaaaaactacttactgaccgtgacttaagtgtggaggaaaaaaccctttgcagctaatgttggcaaaagtgtgtcccccgtagatttagtctaagaattaagaaactggccgggcgcggtggttcatacctgtaatcctagcactttgggaggccaaggtaggcgggctgcctgagttcaggagtttgagaccagcctggggaacatggcgaaatcctgtagtcccagctactcaagtggctgaggcatgagaatcgcttgaacctgggagatggaggtttcagtaagccaagatcatgccacttcactccagcctgggtgacacagtgagactctgtctctaaaaaaaaagaaaaaagaaaaaagaaaaaaatagcctgtttaatgaagcattgacaaggaacccaggctatgattatagaataggagcttcatagtaattgtaagaactctggttcttagaagacaaaagttaaatttaataaataagtttaatggccaaaatatctttttaaaacttgtttgtagtctttagaatgtgaattttatttggtttagatcttactaagctatattttgtaactgaaattaatacttcatttttgcctgaaattagtagaaaaaacaatagctaaagtttgctacagataaataaatgtcaatattagactttttttcttttgaaaaggtagggaactttaattagtaatataagttaagaaaatgacaaagatgtcagataatgaagaaaaaatgtgacagtaatctttcatccaaaaaaaggttatgttcctattgtctaaagccaaaatatatttcattgcaaatatatataaagtttaagaattgttattttaggccctttccgcaataagccaacacataacttatcatgccataaatgtttttaaaagaaatatgattaaaattatacaaaacgacataaaaatttcagaaagaatattgataaatatcttggtacatagtagatttagttgcacagatattaggtggtacaagttttatatcttctataataataactttttattatctccttgtgcactaatatttcaatatgtcaaagtcatttgaataacctttctagtaaatctcaacttcgtagattgaaaacttttttaaaagctttatttaagtttagtggtacatgtgcaggtctgctatatagataaactcatgtcatgggggtttgatgtacagattatttcaccaccaaggtattaagcctagtacccattagttgtttttcccgatcctctcccttcttccatccaccaccctccgataggccccagcgtctgttgttcccctctgcgtgtccatgtgttctcatcatttagctcccacgtataagtgataatatgcagtatttgatttctgttcctgcattagtttgccaagaataatggcctctagctccatccatgtccctgtacaggacatgatctcattattttttatggctgtgtagtattcaatggtatactgagttttctttatccagcctaccactgataggcatttaggttgattctttgctattgtgaacagcgctgcaaggaacatacgtgttcgtgtgtctttatgaaagaatgatttatattcctttgggtacatacccagtcatgggattgctgggttgaatggtagttctgtttttaagtctttgaggaattgccacactgttttccacaatggttgaactaatttacactcccacctagtatataatccttccttttggaaacaaattttatcagtatattcaattctgaacacccatgttttagaaaatgttaagcctattgtcctttaatcactatttgcttacacattaaaatgtaaaacaggcaaaagagaaagaaggaagaaaggagggagggagggaaggagaaaagtgagaaagaaagaaagataaaagaaaaaagaaagaagaaagaaagaaagagaagaaataaagagaaaaaagaaaggaagaaaggaaggaaggaatgaagaagaaaagaaaaaagagaaagaaagaaggaaagaaaaagaaaaaaagaaagagaaagaaagaaagaaagagaaagaaagaaagagagagagagagagaaagagagagaaaagaaaattttctccagattagaattattggctgctattgtttggatgctgggtactagctgtgattaccctttgtgaatgtaggaatgcacagattccaaaagtgagtctcatagaaaaagtcagcattcaaatatgttttaaggttactctatccaaaccccaaagaacccacagaagatgaagcagtaattttagcttctcttggtgtattgtacatgcatttaaggccagttccttccttcaaattcccatgtgttttgtagttaccaacacacctttcaaccctatctgtttatatacatcatatagtcctctgtcaattgcataaaagttgtcccctttgtgactgtaatcgccttttccaatacacatctactcagaatgcaggtccttaaacagcaggctgccttgaaaaccctctccaatcttcttcgatcatcagctttgagatgcatattcctagagcccatatcatcttcttcatcactatcataaacgtctccacatattgatgaacgtttggagaatcgatttatgacaagggagtttactcttcctgcatccgcggcttcttcgtgattttgtcctagtcaccgggcctatcccacctgctggggatgccgccccctcggaagtgcctgaaatctccccacttacccaactagcctcagcgcctcctgtgtgctgcagcagatggcgcgctgcagaccccagcctggtgcctccgcgactcctccccaaccatgatttacaggcggggacagccacattcctgcgccccaacttccacctccgcttcctgcgcgcgcgagactcaagctgccacagtggctctgccgccagcgtcccagctcctcccacacccgagtttttatttcctgctccctctccagcccggcccaggccagcctaccggcgactaggatgctttcgctttcgctctcgctttccaatactcgggactggggaaaccgggagaatagaagcaggcaaggaccgccgtgggcacggggtcagtgagacagggtcctgctcgcggcgtcaaggaggagcgctgtgggtgggtagggtaggcgcgccccctcggccttgcctttccaaccactcttttttgcacgccaacaggtgtccccagcgcagccaatcggcttccgaagtaggtgagttgctgcctgaagagaaaagacaaactccagtatctttcattccattggccagacgcgccattccccaagtgagttctgttctccaaccaaagtgctggattccaagggactggaagggaaagtccctaaaaatcacgagttcaggcgtctgagacttggtgggaacggaccttcctcttaggtgagttactctttggttctggggctgacctggagttttgccaggattcattggccgcagcaggatgctggtggggacagggtaaataaaatctgcactcctgcgggcttttattgttgaaaggggcactgacgctctccctggaaacttaaaaagaacagccaagtgaacggatgtgtctttcttttgcagtgcccaagcctgttctaatttttaaaaactgatgtctattaagacccaatgttaactttatgaaaatggttcctaaggagattcacatctctgtgtccgaattctgtgtgcagcaaacatcatctcaagtgcgttttcccaactacgcttctttccaggataaaatactctaagtgacaaatgttgagtacattatcaggtatgttcactattgtgagaactgaagccatctacactcacatagcttgccaactacattaacctgacttcttattccattattttcatcaacatacatttactatttcaagaaacttttgccagggaccggaaagttgcaaatatctttattgcttaatccagtatcttcttcaaagatccaaccactcttcaatggaaaacatcaaagaacagtttacattctaagactttgaacctttacctcaaaatcctagccttgttttatctaccaatcctaaactgttacccgtagctgactcaattctaaccaattcccctcattaaatattagacttacaatgggacttcaaaatctcaatacatatagcccaaacttgctcttccctctctgagacaccacttaaattctgtcaagttattgttctccattacctaagtgagcaagaaacttagctttgtcttatcaacaggttgctttgatattactgggagccaacatttgacattcttggaggctccagcaagacctaatcaacctcccaaccctcaactcagaatcagtgtgtgccctgaagtcccttcaaccttcttgaggctctccctgatctcaaaggtggagaaagtagatcttgcatcaggttgaactccagtttctttttgctcagtttttcaagcgctgagtttattttgtccctaggcataaagaaatctttctaggaacccctttggttatgggaccagatttttaaaagctttttaggcttggtgaaaaatctgccttatcactagcaacactacgacttgtctctgttcttgttttttgttgtactcgtgtaaaagaaaagttcaagggaagagaacaggctcaagtctacttctcacgctggctctggggattaggaaattcagaaagttttgtttcagactggcagtgctgtctgatataaacacagcgtcaagtactgcacgctgtagctacctgaggtttaggccggaagaggcacggctgatttaaaagtgaaagaaagtaaccaattggttcgcagacaaccttttcccaaaaggcgggcgattcaaacccctagccccacctgctccgtttcccgcccagctggagctctggagcctttgcttcctcaaatacgagcgggaactgcgttgagcgctggattccaggccgagtgctggcgaggcgcgcagtgagtgagcacacagggcgctggggtgctccgcggggcgcggtcacgggcgcggccgcggcgggctcgagtcccggctgggaggagaaggagctgggtgtcaggaagccggggactgacagcgccacccatctggggagccgggaggacacaggttttattttggtagtgctgcaagtccccttgtgtgctggggggagcggggcggcgtggtaggattggaagaggcttagagttggcctcgacccctgcccttgcccctggaaaggcagaaagtgggggttggggtgcggagaagcaggaagagagggagagtgaaggaggggaggaaagggagagaggaagagggagagtgaaggaggggaggaaagggagagaggcagagagggggaaggagagagggaaggaaggagagattgagagacagagaaattcctaaggggagctgtcaggtgggctggacatgggccccaggctgcactgctttatccctttgctgtaggaagtcaagcaagttctttaggtaagtagaaccttgatgtcaagtataaaacaggggttggtataggatagctaagagcactttatattttgatataatctgatttatcctggatactgaaaacaatgtagggagacggaggatattggagtgttttcttaacctcttgcccctttccactgtgattgctcaagtacatgcaaaattaatgtttctttctgcccattttattttcctttttttgtctgtgtctattaatcattcctaaagcacccggatcctctctcaaacttcgtaagatgagacatcatgaacagacacagtgaatccctagattttcttaatagttgggcaacaagttcttgcatttagggatgttgcaacatagcccagttccgcaattgtacattttctattttttttcctaggttctctgctgtttaaaaagtatccctgtggtgagtgtattgatattgataacatttacatgacctttttattgattatttactgggggacctattacatacaggcagtgttttaaaggctttgcatatgctctctctctctctctatatatatatatatttacacacactgtatatatagatagattgcatatataatatatataatatgtgtgtgtatgtgtgtatatatatattgtgtgtgtgtgtgtgacagagagagagagagagagatgaagtctcgctctgttgctcaggcctcaggctggagggcagtggtgtgatctcggatcactgcaacctctgcctcccaggtacaagccactctcctgcctcagtctcccaagtagctgggattacaggcacccaccaccatgcccagctaatttttaattcttagtagagacaggttttcaccaggttggccaagctggcctcgaactcctgacttcaagtgatccatcagcgttggcctcccaaagtgctgagattacaggcatgagctaccgcacccagaccacaatatatttcttaatctttataacaaggttgattcccaccttaaggtgaggaaaatgaaggaagaatagttaattaatatgcccaaggtcatgcagctagtaagtggctacctgatatttgaactcagacagttttataagttctaacattattttagcacttccatattcattatctcatttagaatcattgcttctttttacaaacaagaaattgaggctcagaaaggctaaatgaatttccctagtcaatgactgacagtaaactagaaagccaggactcttgttccatagtggaatggttacgagagtaaacatagcctttagataacttccatttgacaagaaatacaggggctagaacataagttaaacaatgacatgaggaaacaacccaggaggtgaacattctatagagacaatttctctgttctcttcaacaaatcagtgctttttctagaataaaagagccttataagacatataaaggaaactgtgtacctcagttggatcttggtatgaataaatcagtattgtgattataaaagaaaaattatgtaatttttagagatgggaagtgaccattagcgtttaaatgtcatgatgtttctagctgtaacataaatcatctagtaaaataaaaggatggtgtaagggtagccaaacccgggtttggcaactcacacctcaaagccaaacatgagagatgagagttggtgggaggaaaagcaggttcattcagagagccagcaaactgagaagatggcagactagcaacccaaagtagcctcttaagtgagtacaagtttcaggctctttatgttaagggcatggggaagagaagggatttacgatcaagaggtgaccattgactggagacatctgagcaccatcaaggatccaagaaggttgggaatgtctttgtcctgatgttccagtgagcccaagcattgatttgctgaagagaacagataagttgtctctatagaatgttaatttcctgggctgcttctacatgttgttgtttagcttatgttctagcccctgtatttcttgtcaaatggaagttatctaaagattatatttatatttgttctccaggtcacaaccctcctgtaaatttttaacaatccatagttgtttacatactttccctttaatcccagagctagtttttaaaactacattttttttgcatattatctcactgctctaaaattaacctcccctccatgcatgaatggataaagaccccgtgaacaaaaatagagttctttatgttagttcttttactgtttcactgttacataaattggcaaaaaaatgaacaattaactatgtgataggtatgtagaagttcattataccattctctcattttttctctaataaattgttcataataaaaagtcctgaaagtatattctctgagttttatgaccttgagtaaaagtttaatctccctgggtgttcaagctcttttgccagtaaaatgagacaaatagtacctatctcatagggttgtaagaattacatgagatagttgatgaaaagcacttagaacagggcatagtacaccatatgcctactccattcgtttattgaatgtatctttagaaatgtatctttttcaagggcctgacatgtctcagacattgttttgaaatattgaggtactaaggacagacatggctgctgccctcaatggtatttatctttctagcggtatttattactattgaagatgtcactattttatttaaagtttgttcatcctcttctagggagacatcagaggagagatagaaggaaaaatacctctttaaacaaaaaatctaaagcagcaactaaggtttctgactatcatccctagcaaactttccagatttctttttaaaatctcattccaagtttctttcctcagctctatcctcaccacttccctgtaattttatctccccttgccatcttcatcttaaatgaataacagattttaacatcaatgtaactagaacagctttttgaaatttccaactgaaaattattctattatttatacttgcatttgaattccatctctgccacatagctctggccttgggcagttcgtctaccttctctaagctatactttccccatcagcaaagtgtagctatacctaatttgcatagcatccgcaggaatttgcagctagagataattttcataaagtgtttagtataattttcatgaagtgcctgacacgcagtgttctcgaaaagagagcttttattgttaaggtgattatagttggtgaataaactatctatttgctaaggtaccatctccagggagagcaaggttggagcctaaggggaaagatgggacgcaggacaccagctaatcttttcctctgtacaattaatgacagctttgaagatactgctataatttgaaaatttgaaattagtgtttcagctgaaccatccgttcatcttcaagccatcatgagctgtaagaagcagaggtcacggaagcactcagtcaatgaaaaatgtaatatgaaaatcgagcactatttttctccggtatgtctgtaaattctacttatgtaatctagtcatcccttggtatccatgtgagatttgttccaggacctctcttggataccaaaatccatgaatgctcaaattcttcacataacatggcatagtattggcatataatgtatcatatcctcctgtatactttaaatcatctctggattatttgtattacctaatacaaggtaaatgctctgtaaaatgttgatatactgtattgcttagggaataatgacaagaaaaaaaaagtcatgcacgtttagttcaggcacactcattttttttttcccaaaatattttcaatctgcagttggttgaacccatagatacagaactcacagatactaaagcctgtttaccaatattagacttacctatccttggcattgggttttatagttcttcttgccaagaaattaccttgagtgttgggcatattaaataaactaaaattgtccttacttgttttatcctttctattttgggggcggcatggggaagagagttgtaatacaaatcttggctatatcaaagcagtctttaatgaaaaactattgtaatatttcttgaataacaacaaaaacttcaatacaatatgttacagtaaactatgtaataaaccaaaattaataccatttcatagcatgaaaacatataccattccaaacgtggctgatctattcaattgtaattataacctacatttgaatatagtttataaaacaatttttttaatatatttgttcttaccataaccttgttaggaagtcaggaaggattctgacaaatcttcaatttgtttattggagaagagggagaaagtgagttgttgcttaaggcaggaatgaagtgaagacttggagttaagtttaatgacatgtagttgggcctttttctactgattgggctctgttatcatatcaaaccattgtatctttccctgagtctaaaattctccttgaatttatcaagaaaaaagttgaggaatggtaaacatttgagtatgaagcttacaatttctcaacttgttttgttttgtcctggttctggaaaactagaatatccaagtatctaaaaagtctaaggcaaacttagttatgtttttctctatcctattccatgacagagctaattactatatcctattcctcttcccctttcagaagtgtctatatctgcccaagaatcattttaataaataggaaatttattatagtactctaatagggtgcatgacaaagatgtttctgacagcattaggctgaagggatgctctttgagagtttatatgtgagcccagggtaaatctgcattaccttaagtcccttttatttatttatttttgatctggaatattagtataaagaaggaaaacaaatgttaacatattatgtgctagtcattgtgctaggcattgtcatacaatgatgctacacttaatctttacaatattcctagcattgttattcccagtagtagtaaggggcattgctggcatacggacccatatctgctggtacccatgccatgatgaatatgacttgggaaaaatgtgttttttagacataggaaacagacactctaatttttcactgagtttctactatttgattaagcctctttatttaattcctctccccacctccacccccgtttcttaagataatgcgctacaaaaatggcaatcataaatataaagtttacaaaaaagaatgtatacactagtccagtggaaaaaataattggactgggaattgcaattttgatactcactttatttattggttattatgtgaccctagaaaagacgtctacaagaaaaactttctgtgccttagtttctccatcaaaaggatagataagtcatgtttgttcctccttattttataaactttggggattagttgatgtaatagagaaaatagagttcttttcatgatatatgctgggcaaatcaaagtatttattgttacaaataactacattataaccaaatgattagttaaataatgattttgtttaatatgtaatgcttataataaattgcggtagcttatcgctgaattcagtatttcaagaacaatttttttttgctgtaattcattattgtcctcaggaaatataaaaattatatagctgaagataataaacaagtcctgaaataaaactatttcaaatactagtggactttttttttttgagatggagtttcactcttgttgcccaggctggagtgcaatggtgctatctccgctcactgcaacctccacctcccaggttcaagcatttctccagcctcagcctcccaagtagctgagattacaggcatgtgccaccacacccagctaatttttgtattttcagtagagacgggatttcaccatgttgatcatgctggtctcaaactcctgacctcaggtgatccacccgccttggcctcccaaagtgctggaattgcaggtgggagccaccatgcccggccactagtgaacttttaagaatctctgtttttgaggcacctgggaaaaaattttttcttccctcatatttttcagaagaatgcactagtgtagtggtaccaagagtttatctgacagaggttataggaagctccgctttcattttggatcccatgtcaaacactgatttaatattattcactggcccttttagattggttctcagtttctcataggaattttgtgaattgcatacctgaaaagagaaacaaaagactcgggttgcattcagagttttaaagtatctaacatttatttttaggtctctaaagagcaacagaataattgcagtacttctctaatgaggatggagtctagaggagacccaagagccacaactaatacccaggctcaaagattccattcacctaagaaaaatccagaagaccagaccatgccccaaaataggacaatatatgttaccttgaaggtaaaccacaggagaaaccaagatatgaaacttaagctcacacatagtgagaatagtagcttatatatggctctcaacactctccaggctgtcagaaaagagatagaaactcaccaaggccaagaaatgcttgtgcgtggcacagaaggaatcaaagagtacataaaccttggaatgcccctcagttgtttccctgaaggtggccaggtggtcattacattttcccaaagtaaaagtaagcagaaggaagataaccacatatttggcaggcaggacaaagcatcgactgaatgtgtcaaattttacattcatgcaattggaattgggaagtgtaaaagaaggattgttaaatgtgggaagcttcacaaaaaggggcgcaaactctgtgtttatgctttcaaaggagaaaccatcaaggatgcactgtgcaaggatggcagatttctttcctttctggagaatgatgattggaaactcattgaaaacaatgacaccattttagaaagcacccagccagttgatgaattagaaggcagatactttcaggttgaggttgagaaaagaatggtccccagtgcagcagcttctcagaatcctgagtcagagaaaagaaacacctgtgtgttgagagaacaaatcgtggctcagtaccccagtttgaaaagagaaagtgaaaaaatcattgaaaacttcaagaaaaaaatgaaagtaaaaaatggggaaacattatttgaattgcatagaacaacgtttgggaaagtaacaaaaaattcttcttcgattaaagtagtgaaacttcttgtacgtctcagtgactcagttgggtacttattctgggacagtgcaactacgggttacgccacctgctttgtttttaaaggattgttcattttaacttgtcggcatgtaatagatagcattgtgggagacggaatagagccaagtaagtgggcaaccataattggtcaatgtgtaagggtgacatttggttatgaagagctaaaagacaaggaaacaaactacttttttgttgaaccttggtttgagatacataatgaagagcttgactatgctgtcctgaaactgaaggaaaatggacaacaagtacctatggaactatataatggaattactcctgtgccacttagtgggttgatacatattattggccatccatatggagaaaaaaagcagattgatgcttgtgctgtgatccctcagggtcagcgagcaaagaaatgtcaggaacgtgttcagtctaaaaaagcagaaagtccagagtatgtccatatgtatactcaaagaagtttccagaaaatagttcacaaccctgatgtgattacctatgacactgaatttttctttggggcttccggctcccctgtgtttgattcaaaaggttcattggtggccatgcatgctgctggctttgcttatacttaccaaaatgagactcgtagtatcattgagtttggctctaccatggaatccatcctccttgatattaagcaaagacataaaccatggtatgaagaagtatttgtaaatcagcaggatgtagaaatgatgagtgatgaggacttgtgagaattcagtctactggatttaagggaatggcttatggagttgttatttcataggcattgaaaatggttttctaaactccaaaatggtcatcttatcaataataataatattgaccatttcctatctgccaggcatttttctaagcacatgaagaaattagtcctaacaacactatgagatggactataacttgcccaaattttttttttttttttgagactgagtctcactctgtcgcctgggctggagtacagtggtgcgatctcagctcactgcaacttccacctcccaggttcaagcgattcttatgcctcagtctcctgagcagctgggattacaggcaaacgccaccacacccagctaaatttttttttttttttttgtatttttagtagagacagggtttcaccatgttggtcaggcgggtctcgaactcctgacctcgtgatccacctgcctcggccttccaaagtgctgggattacaagtttgagccactgcacctggctaacttgccctattttaaagtcaagcaatgggaagaataacaagattatatagtaatcagtttcatgacactaaaagtcatatagtcatagggttttttcatctttcatatctttgcctaaattcatttgctacagtgcaggaaccaaaacttgttcatctcatgattccctacatctgacataaggaaagtaagtgctcagaaaaatgtgcaggtcaataagttgcaaaagttggggctgcaattaatgctaacataagagctaaatgcttgattagaaatgatctcaaaaccttttagaatttccaaaatcttcatattactgaaactgtcggaatatatgggtcttgaaattcagaagatgatagtcactcttcccatatttataggctattaaggcaagggatatcttaaacatcatattactttatttagatttctactactccaattattaatgttatgtatttctcattgttttacttcttcatggtattatgaagactatatagatgattcaaccaagcctgcaaatctccctcttgtggaattccactggacccaatctgttttccatttccattgcaatactactaaagccatacaatatcaagcaccctccctctaggtccagggactatcacagaagaagcaggcatgtaagattttaaggactggtttcgaggggtcgagtgtaggaaaacagcctgttgcattgtaagagtgatgtcatcttgaagagcagctggcatgatgactgctgtttgactcctgcataccaagatattctgcagcaatgtctttaaacagtgccggtagtacagataacccctcataaagatgcttatctaacctccccagtgttcaggtgtttcacaagaaagtctgagatatgactagctacacgttttgccaaaaatgcttgttatataaagggtacttttgggagggtgagtgccgccatttagtggctgctagaaacattgcttctgtttgtaagttcctattaaatgtttctttctgagaaaccgtatttgtcagcctctttctttggcctctcagcttctttggtctttgggggtaggttggggtaggtttgcattgacctgctcaccgtgaaacacctggtgacttttaatgaagaatggcattagaaaccaagatctaggcactagatatgctcattgctggtggcgtgttgtttcttttaggccccctcagctgacagggcaaagaaatatttgtgtgtatatttacccacatatgtatatgtacacatatgtatatatgccttgcttatctgtaaattccaactccaaacagttggaagcgtgatgcctgccatccctcacacattcacttaattgcttaatccaagtatacatatatagcagtgtcagaattgttaacctctacctcaatgggaaataattttatcaactagaatacagtgcctatgtgcaatttccctgcttttagtcttatatattccattcattcccaaagttatttcagtcaccctgttgtttcttacctccttcagtgacgttttatatgcttatagtacagttatacataatataatagttagattttcttgtcacagtttgaattctttcctttgaccccttgacctcctaaatgatattttaatgtgtattcattgattcactctgtgctgtaaagttctatgggttttatcatacagaatagttatatcaccctagaaatctgtgcttcacctatgtatccctcatatccctcccctctcccctgaaccccagcaaaaaaaaaaaaaaatcactgatctttttactatctttatggttttgcatcttctagaatgctatataatcagattctgtttatatagttagtacattttccacatttttcttttttgttgttggtggtgatttttctgcttaagtgcttaaatgggtcccatgcataaaactgaggttctgtcgagtgttccctaccaaaagatggctgcaatatgccttataaagaaaacatatgtattagataagcttttcagacatgagttatggcattttgggctgtgagttcaatgttaaggaatcaacaatatatattaaataagctgtatttttaacagaaacacacataaagcaagtttatttactgactttgatgaaaatgttgtgaccagaagataatatgaatttaacactgtgttactcctaaaggcaatgcttcagtatttgctaattcaatatttgcagcatctttatagaccataactaccacaaataatgagaactgactgtatcatttcaaatatggtttcaagtctaatgcctgcctaatcgtcacagagacttaaacttacgtggctttactgtttattaaataatttctgacatattatctcaatacacattagagcagatattattatacctgttgcctgtgtgagaaggaagtataactgaatttttacccaaattggtgatatcttggaaaagactgggacttatatcttgaaatatagcttattgttctttctcctaagagctagttcatcagatccagacactactatggccattcctgcatctaaagtacacccaccttggatcacttaagaaatataagcatttcagaatgcagcaaatacctttctctgattttctcttgtcctagctctcaagaccaggtagctagaaaattcagcttaggtctggatttatcaccactcactcatccaattcctggttacagagctaacccactatcacattctactccagatctctctttgaaatgggataatggactaaacaaggttgtagtgggtttaactgtgcctgcccctaagggcaggcactatcctcaccctatatacctataaatgtgaccttatttagacaaaaatgctttgtagatgtaattaaattaagattcaagagatgagatcatcctgcacttactgggtgagccctaaatccagtaacgagcatccttataagtaaagaagaaacacagaggagaaaccgagaaagaaaggccatgtgaagatggagacagaaattggagagatacatctacaagccaggggttgccagggattgccagaggccactaaaagctaggagagaggcatggacaggttctcctcaaaacctccagaaggaaccaaccctgataacatcttaatttcagacttctggtctccagaaataagagagtagatttctgtagtttcaagccaccaagtttggggtaatttgttatgaactgggtggcttaaaacaatttagtctctcacagtcatgagaggacagaaatgtataacctgaagtcaaggtgttggcagggctgtactttctccagaaggtgcagtgggggtaagggcgagtgaattaagggtcccccactgacctacctgctaatgagtctgagtggccagaggtagaattgaaataagccacccaaatgattctttggttgtcactcatgtgactcagtctcctctgggcaggaacaggaagggatgctctcatgacaatggagcagcaagccccacagcccagcagaaaagcaacgtggttgtggctactgagtgaagaatccctgaagttgaaatacatggtgtcagcaataaggaccttgctatttgatatatagcttcgggcgaacaaaacatttgaaatttatttgattgaatacaaactagtcattcaaaactaaaaatacatgtagccaatttccttcccctttgcccccctttaacccatcccttcccttctgcctcaacctcagctgcttttagagaaagataattagaatgcaactgagatatctctgtccccaaatgggacggaggccatgcacacctgtgtgcatatactggggaacttcagggagggaagggctcaagcttatggctctgttggattcaggtgtccaagtcaccatcctaccctgtcctgtaagagaacaagatgttgggcacaggaatggccaaaggcaccaaggactaaaggatggagctgaggcagtgtacataggggtagaaagggatctctgggcctgggtgttcaccaaatactgagaggtgcatggaaaagaactgacacttgtgcttagattctgaccctgcagcaaggagttaaaggagggaaaaggctagcaactaagttttcttccctctctctctctgctgtcttccatttgccaccctagctgtcctttccctctcaccctgaacttccctgggctcctagacaggcacaattgttggagcctgattttcattatgctcctacagggggaaaagcaaacgaattcaactgatggagtttaggtatgatttgctgtgagagaaagaaagctaaagtaacgttatagatggagctccttgggcggattcaagataccgttgttgtggaatgatgttgagtgccttcacttcctcatctcgtgtcagagaggatcaccctgttcagcaactgcttcctgtgggacatgtagatcatcctctcagtttgtttccctgtcccctctcagtagtctagcaacaacaatatagactcttcaaaagaatgggaaatcctagctttgcttaaatacagaagcgctcagaggccatttcctaggacaacattgccacctactggaggtagccacaagtacacaccaataaaggcagctgtcaattaccctgctgccaaactcttgagatccactgcctgactcaaggatgcctcttccatctggcatcccttttgggtcttgggtcaactaagactggttgactaacaaagggagaatccaaaaggccaaaaaagcagttaaatgaaaatggtatattcaagagctcagccagggtggtcttggcgtcacattggttttacaagaaaagaaaatgtcagatgcctttccgggtgaaatgttatctcttactttgtcacctgaattatgttattttcctccaaggagggtttactgtatcctcctgatacagagtgaaatcagatcattaaggtctgattatcaattaagaggtctgattatcaatcagaccttttaatgatcagatttcagtcatggataaaatcaacttgagactcagttgtataatgccaaggctctgtctacctctggttggcttcacttctagagtgtagcctggaagggccccagctgaggccttgggatgtttactagtgtcctcccacttcctgcgttatcgaattcagaactccaatttttatctcctcagcactgtaagtctttagggcactctgctccacttttcactggatgactccaatgggcacaaggcatgaaacttagtgccatccttaaggatctaaaggatacagaaatgatgctccctgtcatgtatgcatttagttcatcagttgtggagaatgaccattcactatcacaaaatcaaccaactggtgggcccagttgcagccactgtgccagatgtggaatctttgctagagcaaatgcacatttaatcaggtacatggtatgtggccatcagttgaattaatgcattctcttctatctctatcagaaaaagggatcataaatagttccactcacatggaatagacaacagtgtacatgtgtatttttgccccaggactatattagatatagtgttccttctgttataatatagatagaaaagatttggactacttgtacttccttcagaccatcacacctgtctactatatcgatgttaacatgctaattaggccagatggcaagaagtaatcaactaccttggaggtgccggtacacatgcatttcaggtgacaggaaataaaccccgtgaggaatcagaggccccctaaatcaggggcatgctaagaccacccatccaaagaaaaggatgaattattgaatcttgcataccccatgaagaaaaagaaagtacactgcctgataaatctctttgggttctgaaggtagcatattccatgcatgggtatactgtttcagccaatttacaggggatgctataggctgccagccttgagtggggtctggattaggaaagggtcccagaagatccaagctatagtgaaaacagtacagctgcttggaccatgtgccctggctgaccctctggtatcagatgtgggaaaagataccatgtggagttgatagcaagcccaagtgggaaaattacaaggcaaagttttggggttctggagaaagcccgtgttttttgcagtggatagttatatatcttttgaataacaactccttttgaattatatactgtttgaatataccttttgggccctggtagggagcacctaaccatgagacattaagtgactctgcatccaaatctcgccattttttagtgagttctatcagaattatcaagtcataatgtcaagtgtggccaaaaaaccagtctctcgtatgatggagttggaatgcctagcattgtgcagcatgagcaggaaaggagaccacaagtgagttgtatgacaaatgtgtggagcaggctcccaaagatgttcacaccataatccctggaatatgactatgtaggttatatgggaaaagggaattaagaccgctaatcatctaagtttaagatagcaaggttatcttggatatctggatagcctgatgtaagcacgatgattcttaaaggtgagaaaagggagaatcagagattcagagggaaacgtgaccatgaaagaggcacagagagatgcaacactgctggctttgaagatgggggaaggggtcatgaaccaagaaatgtgagtgagctctaggagaaagaaaaggcaaggaaacagattctcttctaaaccttccagaagagaactgagccataatgataccttgattttagtccagcgagacccatgtcaggtatctgacctatgtaggcctatacatcagcctgggaaacaaagggtagaggcaggaagggccctgcttagctttatctgtatccctaataacacacttagggaatttgtgcttcctgtctctccctctgccatccatgcccctgccagcccccaggtcagggctctgtaggatgaaaggtcctgattccctgtgggggcacacttctgccaggggacacggaaagagtcctgctgaactctaagctatagcttctgcctgtcactgcaaagactttgtatccagagaccagtatgcaagaagagtcattgcctgggctcaggcaattaacccagttcttcaggaggaggaagtgcttatgtgacacagtaagggcagggagaaatgtgtttgccactcacatgatccatttggaccctacttgaccaaatttgatagtaaacagacaattacaccaccatagcttgaaaatagcatggcagccagggtctcagacccctcagaaatgaagatttgggtcctgccaccaggtaagacaccaatactaggagaagcattacctgaggctgaggctgatatagaatggacaccagagaagggagagagtaaaaatcagttacatcccctaaatcaattgctgtgagaaaaatgagaattctctccgaaattccaaataaaataaattctccctttatttattattttatttatttgagagaattatctctcaaattccagctgtgcattgtaccaactggaatttgaaagtgaaaaaataccatttatttgagcaatttccctccttcccatccaaactaacttgctgagattttgattgcatttgcaatgaatctgtagaacaagttgggaagaactgataacttgacaatactgagcctttctataaatgtacattgactatctctccatgtatttagtcattctttgatttcatttatcggaattttgtagttttcttcatatagagcttgttcagtcttttcagatttatgctccagctgtctcttcccagtggagttgtatagatagtgctatttctcccagccacaatgtgtgacaatacacatgaagtatcatcagccagggaagctcacctgagcttcagtgtcagggtttttactgggggctattcatgtagatatggctgaccttagtctccagatcctccagaagtggtgctgataatgtgtggtccaagtccaccactataaatattaaataaaatagacttcagatcagagaaaattaccagagacagagagtgctattatataataataaaaggattgatcacctaaaagacacagtaattacaggtgtgcaagcacaaaacaacaaagtgacaaaatatgttaagcaaatcctgatataactaaaaggataataggcaaatccacaattatagttagagaactcaacatcctcctctctcaacaacttatagaacaactatacagaaaatcagcctggatatggaagaacggaacaacatgataaaccaacagggtctactggtcatttatagaacacttcatccaacagtagagtacacattcttttcaagcacccacagagtgaatacaaagatagatcatatcctaggccatgacacaaacctcaacaaatttgaaagagttgaaatcatattgagtgtgtcctctgggctacaatgggatcaaactaggaatcaataacctaacaataacagaaaaacctccaaacatttgaaagccaaacagcacacttctcacttctttctttctttctttctttcttttttttttttttttttgagacggagtctcactctgtcaccctggctggagtgcagtggtgcgatctcgcctcactgcaagctctgcctcccgggttcatgccattctcctgcctcagcctcccaaggagctgggactacaggctcccgccaccacgcacagctaatttttttttttgtatttttagtagagacggggtttcaccttgttagccaggatggtctcgatctcctgacctcatgatcctcccacctcagatagtgcgtaggttaaagaagaagactcaggagaaatttaaaaagacattgaactgaataaaggtgaaaataaagcgtctcaaaatttgtgggacacagccaaagccatggtgagaggaaaatcaatagcactaaatgcttacattaggaaagaggaaaagcctcaaaccaataatatcagcttttactataataatctaaaaaaagagcaaaataggtagccaaattaagacaataataaagataagagccaaaataaacaatgagttggttcttttgaaaaaaaaaatacatgaaattgacatactgcttagcgagactggcagggaaggagggaaggagaaagggagaggtggggggagaaaaccaaattgccaataacatcaagaatgaagccatgttatcaccacagcccttgaagatatcaaaagtataataagcacacattatgaacaactccacacataaatttgacaacttgtataaaatggaccaatcccttaaaaaatacaaatgaccacaactcatccgatatgaaataggtaatttgaatagcgctctattaaggaaattgaatttgtaatttaaaatcttctgaaaaagacatctccagggctagatgcttttactggacaattctatcaaacttttaaagaagaattaacaccaattctatacagtctgtttcagaaaatagaagagggtagaaaacttcccaattcatttttatgaagctagtattattctgataccacccctcccaaaatgaaagtattaaaagacaaactttagacaaatttaatttaacagaattttacagagcaaagaacaattcgagaatcaggcaactccacagaactagaatagattgggagacactccaacactgccacttagttgaagataatttatggacagagaaaggaaagtagcttagagaaaatgaaagtgaggtatagaaacagcagccttgtttctatacaataagagagcaactcaaatatctaggaggatattaaatgttcccaacaaaaagaaatgataaatgtttgaggtggacgtatatgctagttaccctgatctgatcactatatattatatgtatcaaaacatcactatgtaccccataaatatgtacaatcatgtgtcaattttaaaatacaattttagaaagtattttgaaataaaaagtttaaaaaagaagaaaaaagaaaagaaaagaaacagttgccttggctacagcgcagcatttaccttgtttgaacactattggaacagttggcctcctgtgagtggttgaagtattgcttctgtgattggctgagactcaggtagttgctacaaaagtaggctagtctgtttccacattcggttaagttatagttcactatgtattgagaaacgtttaggttaaacttaaagtatgtaaggaggtagctttaggctaagcttaatttaacaaaagaaagagaaaagaaaactatacaccaagattctttataaatatagaccaccgccaattttttttttttttttttttttttgagacaggctcttcctctgtcacccaggctggagtgcagtggctcatcatagctcactgtaaccttgaaatcctgggctcaaggtacccttttgccttaacctctgaagttggactacaggtatgcaccaccatgcccagccccctgaaaactttaacaaatgaaatatagcaatattttataataattatacactatgacaaagtggggtttattccagggatgcacatctcattaagtatttgaaaatcaatgcaatccaccatattagcagtctgaagaaacaaaatctcatgatcatatcaattgataccaaaaaagcatttaataaaactcaatatctgttcatgatttaaaaaactctcagaaaaataaggatagaggaaaacttcctcaacttgataaagaacatctaaaatgaacacctacagctattatcacagttcttagtgaaaaactagatgttatctaagatcagaaacaaggcaagaatgtctattctcacaactgtattaaacatagtactggaaattccaggtaata

SEQ ID NO: 739 - DNA, 3290 bp, Homo sapiens
gtctctaaagagcaacagaataattgcagtacttctctaatgaggatggagtctagaggagacccaagagccacaactaatacccaggctcaaagattccattcacctaagaaaaatccagaagaccagaccatgccccaaaataggacaatatatgttaccttgaaggtaaaccacaggagaaaccaagatatgaaacttaagctcacacatagtgagaatagtagcttatatatggctctcaacactctccaggctgtcagaaaagagatagaaactcaccaaggccaagaaatgcttgtgcgtggcacagaaggaatcaaagagtacataaaccttggaatgcccctcagttgtttccctgaaggtggccaggtggtcattacattttcccaaagtaaaagtaagcagaaggaagataaccacatatttggcaggcaggacaaagcatcgactgaatgtgtcaaattttacattcatgcaattggaattgggaagtgtaaaagaaggattgttaaatgtgggaagcttcacaaaaaggggcgcaaactctgtgtttatgctttcaaaggagaaaccatcaaggatgcactgtgcaaggatggcagatttctttcctttctggagaatgatgattggaaactcattgaaaacaatgacaccattttagaaagcacccagccagttgatgaattagaaggcagatactttcaggttgaggttgagaaaagaatggtccccagtgcagcagcttctcagaatcctgagtcagagaaaagaaacacctgtgtgttgagagaacaaatcgtggctcagtaccccagtttgaaaagagaaagtgaaaaaatcattgaaaacttcaagaaaaaaatgaaagtaaaaaatggggaaacattatttgaattgcatagaacaacgtttgggaaagtaacaaaaaattcttcttcgattaaagtagtgaaacttcttgtacgtctcagtgactcagttgggtacttattctgggacagtgcaactacgggttacgccacctgctttgtttttaaaggattgttcattttaacttgtcggcatgtaatagatagcattgtgggagacggaatagagccaagtaagtgggcaaccataattggtcaatgtgtaagggtgacatttggttatgaagagctaaaagacaaggaaacaaactacttttttgttgaaccttggtttgagatacataatgaagagcttgactatgctgtcctgaaactgaaggaaaatggacaacaagtacctatggaactatataatggaattactcctgtgccacttagtgggttgatacatattattggccatccatatggagaaaaaaagcagattgatgcttgtgctgtgatccctcagggtcagcgagcaaagaaatgtcaggaacgtgttcagtctaaaaaagcagaaagtccagagtatgtccatatgtatactcaaagaagtttccagaaaatagttcacaaccctgatgtgattacctatgacactgaatttttctttggggcttccggctcccctgtgtttgattcaaaaggttcattggtggccatgcatgctgctggctttgcttatacttaccaaaatgagactcgtagtatcattgagtttggctctaccatggaatccatcctccttgatattaagcaaagacataaaccatggtatgaagaagtatttgtaaatcagcaggatgtagaaatgatgagtgatgaggacttgtgagaattcagtctactggatttaagggaatggcttatggagttgttatttcataggcattgaaaatggttttctaaactccaaaatggtcatcttatcaataataataatattgaccatttcctatctgccaggcatttttctaagcacatgaagaaattagtcctaacaacactatgagatggactataacttgcccaaattttttttttttttttgagactgagtctcactctgtcgcctgggctggagtacagtggtgcgatctcagctcactgcaacttccacctcccaggttcaagcgattcttatgcctcagtctcctgagcagctgggattacaggcaaacgccaccacacccagctaaatttttttttttttttttgtatttttagtagagacagggtttcaccatgttggtcaggcgggtctcgaactcctgacctcgtgatccacctgcctcggccttccaaagtgctgggattacaagtttgagccactgcacctggctaacttgccctattttaaagtcaagcaatgggaagaataacaagattatatagtaatcagtttcatgacactaaaagtcatatagtcatagggttttttcatctttcatatctttgcctaaattcatttgctacagtgcaggaaccaaaacttgttcatctcatgattccctacatctgacataaggaaagtaagtgctcagaaaaatgtgcaggtcaataagttgcaaaagttggggctgcaattaatgctaacataagagctaaatgcttgattagaaatgatctcaaaaccttttagaatttccaaaatcttcatattactgaaactgtcggaatatatgggtcttgaaattcagaagatgatagtcactcttcccatatttataggctattaaggcaagggatatcttaaacatcatattactttatttagatttctactactccaattattaatgttatgtatttctcattgttttacttcttcatggtattatgaagactatatagatgattcaaccaagcctgcaaatctccctcttgtggaattccactggacccaatctgttttccatttccattgcaatactactaaagccatacaatatcaagcaccctccctctaggtccagggactatcacagaagaagcaggcatgtaagattttaaggactggtttcgaggggtcgagtgtaggaaaacagcctgttgcattgtaagagtgatgtcatcttgaagagcagctggcatgatgactgctgtttgactcctgcataccaagatattctgcagcaatgtctttaaacagtgccggtagtacagataacccctcataaagatgcttatctaacctccccagtgttcaggtgtttcacaagaaagtctgagatatgactagctacacgttttgccaaaaatgcttgttatataaagggtacttttgggagggtgagtgccgccatttagtggctgctagaaacattgcttctgtttgtaagttcctattaaatgtttctttctgagaaa

SEQ ID NO: 740 - protein, 569 aa, Homo sapiens
MRMESRGDPRATTNTQAQRFHSPKKNPEDQTMPQNRTIYVTLKVNHRRNQDMKLKLTHSENSSLYMALNTLQAVRKEIETHQGQEMLVRGTEGIKEYINLGMPLSCFPEGGQVVITFSQSKSKQKEDNHIFGRQDKASTECVKFYIHAIGIGKCKRRIVKCGKLHKKGRKLCVYAFKGETIKDALCKDGRFLSFLENDDWKLIENNDTISTQPVDELEGRYFQVEVEKRMVPSAAASQNPESEKRNTCVLREQIVAQYPSLKRESEKIIENFKKKMKVKNGETLFELHRTTFGKVTKNSSSIKVVKLLVRLSDSVGYLFWDSATTGYATCFVFKGLFILTCRHVIDSIVGDGIEPSKWATIIGQCVRVTFGYEELKDKETNYFFVEPWFEIHNEELDYAVLKLKENGQQVPMELYNGITPVPLSGLIHIIGHPYGEKKQIDACAVIPQGQRAKKCQERVQSKKAESPEYVHMYTQRSFQKIVHNPDVITYDTEFFFGASGSPVFDSKGSLVAMHAAGFAYTYQNETRSIIEFGSTMESILLDIKQRHKPWYEEVFVNQQDVEMMSDEDL

SEQ ID NO: 741 - DNA, 3750 bp, Homo sapiens
ggatgctttcgctttcgctctcgctttccaatactcgggactggggaaaccgggagaatagaagcaggcaaggaccgccgtgggcacggggtgtccccagcgcagccaatcggcttccgaagtaggtgagttgctgcctgaagagaaaagacaaactccagtatctttcattccattggccagacgcgccattccccaagtgagttctgttctccaaccaaagtgctggattccaagggactggaagggaaagtccctaaaaatcacgagttcaggcgtctgagacttggtgggaacggaccttcctcttaggttctctgctgtttaaaaagtatccctgtgtgtttcagctgaaccatccgttcatcttcaagccatcatgagctgtaagaagcagaggtcacggaagcactcagtcaatgaaaaatgtaatatgaaaatcgagcactatttttctccggtctctaaagagcaacagaataattgcagtacttctctaatgaggatggagtctagaggagacccaagagccacaactaatacccaggctcaaagattccattcacctaagaaaaatccagaagaccagaccatgccccaaaataggacaatatatgttaccttgaaggtaaaccacaggagaaaccaagatatgaaacttaagctcacacatagtgagaatagtagcttatatatggctctcaacactctccaggctgtcagaaaagagatagaaactcaccaaggccaagaaatgcttgtgcgtggcacagaaggaatcaaagagtacataaaccttggaatgcccctcagttgtttccctgaaggtggccaggtggtcattacattttcccaaagtaaaagtaagcagaaggaagataaccacatatttggcaggcaggacaaagcatcgactgaatgtgtcaaattttacattcatgcaattggaattgggaagtgtaaaagaaggattgttaaatgtgggaagcttcacaaaaaggggcgcaaactctgtgtttatgctttcaaaggagaaaccatcaaggatgcactgtgcaaggatggcagatttctttcctttctggagaatgatgattggaaactcattgaaaacaatgacaccattttagaaagcacccagccagttgatgaattagaaggcagatactttcaggttgaggttgagaaaagaatggtccccagtgcagcagcttctcagaatcctgagtcagagaaaagaaacacctgtgtgttgagagaacaaatcgtggctcagtaccccagtttgaaaagagaaagtgaaaaaatcattgaaaacttcaagaaaaaaatgaaagtaaaaaatggggaaacattatttgaattgcatagaacaacgtttgggaaagtaacaaaaaattcttcttcgattaaagtagtgaaacttcttgtacgtctcagtgactcagttgggtacttattctgggacagtgcaactacgggttacgccacctgctttgtttttaaaggattgttcattttaacttgtcggcatgtaatagatagcattgtgggagacggaatagagccaagtaagtgggcaaccataattggtcaatgtgtaagggtgacatttggttatgaagagctaaaagacaaggaaacaaactacttttttgttgaaccttggtttgagatacataatgaagagcttgactatgctgtcctgaaactgaaggaaaatggacaacaagtacctatggaactatataatggaattactcctgtgccacttagtgggttgatacatattattggccatccatatggagaaaaaaagcagattgatgcttgtgctgtgatccctcagggtcagcgagcaaagaaatgtcaggaacgtgttcagtctaaaaaagcagaaagtccagagtatgtccatatgtatactcaaagaagtttccagaaaatagttcacaaccctgatgtgattacctatgacactgaatttttctttggggcttccggctcccctgtgtttgattcaaaaggttcattggtggccatgcatgctgctggctttgcttatacttaccaaaatgagactcgtagtatcattgagtttggctctaccatggaatccatcctccttgatattaagcaaagacataaaccatggtatgaagaagtatttgtaaatcagcaggatgtagaaatgatgagtgatgaggacttgtgagaattcagtctactggatttaagggaatggcttatggagttgttatttcataggcattgaaaatggttttctaaactccaaaatggtcatcttatcaataataataatattgaccatttcctatctgccaggcatttttctaagcacatgaagaaattagtcctaacaacactatgagatggactataacttgcccaaattttttttttttttttgagactgagtctcactctgtcgcctgggctggagtacagtggtgcgatctcagctcactgcaacttccacctcccaggttcaagcgattcttatgcctcagtctcctgagcagctgggattacaggcaaacgccaccacacccagctaaatttttttttttttttttgtatttttagtagagacagggtttcaccatgttggtcaggcgggtctcgaactcctgacctcgtgatccacctgcctcggccttccaaagtgctgggattacaagtttgagccactgcacctggctaacttgccctattttaaagtcaagcaatgggaagaataacaagattatatagtaatcagtttcatgacactaaaagtcatatagtcatagggttttttcatctttcatatctttgcctaaattcatttgctacagtgcaggaaccaaaacttgttcatctcatgattccctacatctgacataaggaaagtaagtgctcagaaaaatgtgcaggtcaataagttgcaaaagttggggctgcaattaatgctaacataagagctaaatgcttgattagaaatgatctcaaaaccttttagaatttccaaaatcttcatattactgaaactgtcggaatatatgggtcttgaaattcagaagatgatagtcactcttcccatatttataggctattaaggcaagggatatcttaaacatcatattactttatttagatttctactactccaattattaatgttatgtatttctcattgttttacttcttcatggtattatgaagactatatagatgattcaaccaagcctgcaaatctccctcttgtggaattccactggacccaatctgttttccatttccattgcaatactactaaagccatacaatatcaagcaccctccctctaggtccagggactatcacagaagaagcaggcatgtaagattttaaggactggtttcgaggggtcgagtgtaggaaaacagcctgttgcattgtaagagtgatgtcatcttgaagagcagctggcatgatgactgctgtttgactcctgcataccaagatattctgcagcaatgtctttaaacagtgccggtagtacagataacccctcataaagatgcttatctaacctccccagtgttcaggtgtttcacaagaaagtctgagatatgactagctacacgttttgccaaaaatgcttgttatataaagggtacttttgggagggtgagtgccgccatttagtggctgctagaaacattgcttctgtttgtaagttcctattaaatgtttctttctgagaaa

SEQ ID NO: 742 - protein, 609 aa, Homo sapiens
MSCKKQRSRKHSVNEKCNMKIEHYFSPVSKEQQNNCSTSLMRMESRGDPRATTNTQAQRFHSPKKNPEDQTMPQNRTIYVTLKVNHRRNQDMKLKLTHSENSSLYMALNTLQAVRKEIETHQGQEMLVRGTEGIKEYINLGMPLSCFPEGGQVVITFSQSKSKQKEDNHIFGRQDKASTECVKFYIHAIGIGKCKRRIVKCGKLHKKGRKLCVYAFKGETIKDALCKDGRFLSFLENDDWKLIENNDTISTQPVDELEGRYFQVEVEKRMVPSAAASQNPESEKRNTCVLREQIVAQYPSLKRESEKIIENFKKKMKVKNGETLFELHRTTFGKVTKNSSSIKVVKLLVRLSDSVGYLFWDSATTGYATCFVFKGLFILTCRHVIDSIVGDGIEPSKWATIIGQCVRVTFGYEELKDKETNYFFVEPWFEIHNEELDYAVLKLKENGQQVPMELYNGITPVPLSGLIHIIGHPYGEKKQIDACAVIPQGQRAKKCQERVQSKKAESPEYVHMYTQRSFQKIVHNPDVITYDTEFFFGASGSPVFDSKGSLVAMHAAGFAYTYQNETRSIIEFGSTMESILLDIKQRHKPWYEEVFVNQQDVEMMSDEDL

SEQ ID NO: 743 - DNA, 3477 bp, Homo sapiens
gttctctgctgtttaaaaagtatccctgtgctttgaagatactgctataatttgaaaatttgaaattagtgtttcagctgaaccatccgttcatcttcaagccatcatgagctgtaagaagcagaggtcacggaagcactcagtcaatgaaaaatgtaatatgaaaatcgagcactatttttctccggtctctaaagagcaacagaataattgcagtacttctctaatgaggatggagtctagaggagacccaagagccacaactaatacccaggctcaaagattccattcacctaagaaaaatccagaagaccagaccatgccccaaaataggacaatatatgttaccttgaaggtaaaccacaggagaaaccaagatatgaaacttaagctcacacatagtgagaatagtagcttatatatggctctcaacactctccaggctgtcagaaaagagatagaaactcaccaaggccaagaaatgcttgtgcgtggcacagaaggaatcaaagagtacataaaccttggaatgcccctcagttgtttccctgaaggtggccaggtggtcattacattttcccaaagtaaaagtaagcagaaggaagataaccacatatttggcaggcaggacaaagcatcgactgaatgtgtcaaattttacattcatgcaattggaattgggaagtgtaaaagaaggattgttaaatgtgggaagcttcacaaaaaggggcgcaaactctgtgtttatgctttcaaaggagaaaccatcaaggatgcactgtgcaaggatggcagatttctttcctttctggagaatgatgattggaaactcattgaaaacaatgacaccattttagaaagcacccagccagttgatgaattagaaggcagatactttcaggttgaggttgagaaaagaatggtccccagtgcagcagcttctcagaatcctgagtcagagaaaagaaacacctgtgtgttgagagaacaaatcgtggctcagtaccccagtttgaaaagagaaagtgaaaaaatcattgaaaacttcaagaaaaaaatgaaagtaaaaaatggggaaacattatttgaattgcatagaacaacgtttgggaaagtaacaaaaaattcttcttcgattaaagtagtgaaacttcttgtacgtctcagtgactcagttgggtacttattctgggacagtgcaactacgggttacgccacctgctttgtttttaaaggattgttcattttaacttgtcggcatgtaatagatagcattgtgggagacggaatagagccaagtaagtgggcaaccataattggtcaatgtgtaagggtgacatttggttatgaagagctaaaagacaaggaaacaaactacttttttgttgaaccttggtttgagatacataatgaagagcttgactatgctgtcctgaaactgaaggaaaatggacaacaagtacctatggaactatataatggaattactcctgtgccacttagtgggttgatacatattattggccatccatatggagaaaaaaagcagattgatgcttgtgctgtgatccctcagggtcagcgagcaaagaaatgtcaggaacgtgttcagtctaaaaaagcagaaagtccagagtatgtccatatgtatactcaaagaagtttccagaaaatagttcacaaccctgatgtgattacctatgacactgaatttttctttggggcttccggctcccctgtgtttgattcaaaaggttcattggtggccatgcatgctgctggctttgcttatacttaccaaaatgagactcgtagtatcattgagtttggctctaccatggaatccatcctccttgatattaagcaaagacataaaccatggtatgaagaagtatttgtaaatcagcaggatgtagaaatgatgagtgatgaggacttgtgagaattcagtctactggatttaagggaatggcttatggagttgttatttcataggcattgaaaatggttttctaaactccaaaatggtcatcttatcaataataataatattgaccatttcctatctgccaggcatttttctaagcacatgaagaaattagtcctaacaacactatgagatggactataacttgcccaaattttttttttttttttgagactgagtctcactctgtcgcctgggctggagtacagtggtgcgatctcagctcactgcaacttccacctcccaggttcaagcgattcttatgcctcagtctcctgagcagctgggattacaggcaaacgccaccacacccagctaaatttttttttttttttttgtatttttagtagagacagggtttcaccatgttggtcaggcgggtctcgaactcctgacctcgtgatccacctgcctcggccttccaaagtgctgggattacaagtttgagccactgcacctggctaacttgccctattttaaagtcaagcaatgggaagaataacaagattatatagtaatcagtttcatgacactaaaagtcatatagtcatagggttttttcatctttcatatctttgcctaaattcatttgctacagtgcaggaaccaaaacttgttcatctcatgattccctacatctgacataaggaaagtaagtgctcagaaaaatgtgcaggtcaataagttgcaaaagttggggctgcaattaatgctaacataagagctaaatgcttgattagaaatgatctcaaaaccttttagaatttccaaaatcttcatattactgaaactgtcggaatatatgggtcttgaaattcagaagatgatagtcactcttcccatatttataggctattaaggcaagggatatcttaaacatcatattactttatttagatttctactactccaattattaatgttatgtatttctcattgttttacttcttcatggtattatgaagactatatagatgattcaaccaagcctgcaaatctccctcttgtggaattccactggacccaatctgttttccatttccattgcaatactactaaagccatacaatatcaagcaccctccctctaggtccagggactatcacagaagaagcaggcatgtaagattttaaggactggtttcgaggggtcgagtgtaggaaaacagcctgttgcattgtaagagtgatgtcatcttgaagagcagctggcatgatgactgctgtttgactcctgcataccaagatattctgcagcaatgtctttaaacagtgccggtagtacagataacccctcataaagatgcttatctaacctccccagtgttcaggtgtttcacaagaaagtctgagatatgactagctacacgttttgccaaaaatgcttgttatataaagggtacttttgggagggtgagtgccgccatttagtggctgctagaaacattgcttctgtttgtaagttcctattaaatgtttctttctgagaaa

SEQ ID NO: 744 - protein, 609 aa, Homo sapiens; identical to SEQ ID NO: 742

SEQ ID NO: 745 - DNA, 53768 bp, Mus musculus
  misc_feature (1)...(53768): n = A, C, G or T/U
ctaaagtacagtacaagaaaacactgaaatgcactttgtgtgtaaacaaaacttgtaccgtatcttcaacagctcccctcccccaacctcttagcctctgataaacattcttctattatttctataacagtaatttacaactcatgtaacattaaagtaacacagcatttgtctttctatgccaagcgaatttcacttaatgttctctatctacttccatctgtaaaagacagtttcctttttgttaaaggctgtgggtattaaatttaggttctgttgttcttggttgctggagacaaggttttacatttgtagctgaggctggactggaatttagtggtaatccttctaagacatctgaatgcttggatttacaagtatacgccatatgcccacctagaaacactaaacaaaacccccatggttataaatactgataacacaatgaaattgtcaactcaaactattatcaagaagaatgattaagtgtaaggacctaggaaaaaaagaatgctgcacttctgatggaaatgtgaattagcatgccaatttgaaaaatagggagttcctccctcaaaagactaaatacagtagaggaaaataaattgttacactacaagctaccaagtttgggagatgaattggttatttctttgtcatagtccttcttcaagcttctttctctgattcttggaatgtaaagcgaaatactgtgtaatttttggatggcaaggttcttatgttactacttatatagatagcaacagataatacaataaagaaaaggaagtttagaaagcgttaaaaaggcaaagttatgaacagagtcatataaacaaaccttttttcaacagcacagtaacccatcatgctagcaattccagattaaacaactcaagcaaaaatcatctccataagtagtccaaaattttcttttagaaaactcttttcagatctgatagaaaccaacttcttaaatcaaaaacaaaagcaaacaaaacttcttttagtaaaaactactgtagttctcattaccaagctacattttccctgggtagtaagatctccaaagtgacttctgaataaggaacagaccttccacatatggcagatattaacaccttccaaacagtaacaagaaccttgctagacaaaacaaacaaacaaacaaaaccaaaacaaccccccaaagatacctatcatgtctctatctaatacttttacctggtatttgagatattagctttacattccaagaatcagagaaaagaaactcaaggaagaaatttgacaaaagtcaccaattcaagttattgattcctaatcacactgccattctttcaaatataaaccaaagttttagatgtgatttaaacaattgcaaagcatacttcataaagaaaacttcatttaagttacagaaatataaaatgtcatatatttatatgcacaaatataacatgaatacaggcactaaactattcaagttaaaatcttagcacactttgcgcactcttctaactactagttcaccagttatttgtctacactttactattattacatacaatttttgttacttcttttaaaactcagactggcctttaaattagaacctattactgattttctaaattcgaaggcactgtattgttcaaatctgcttgctgtcctctaaatagattccaacttctccaataggcctactccatcaagtcccctctgaatggaggacactgaataatcaggcttaggtgcagcgccctttctgttagactacagaacaatcaatggatcttacctttatcagttgttagtttttctatacacctgaaagaaaaaaaaagtcatgttaaatgaataattttgtacatttcctttaagcacaagtatttattttagattcatctccagaataataaagaaagcatctataatatgttgttcaaagcaaagcctaactttcagtagtggtagaaataccctatctatactatccccatgtggttgctgatcacttgaaatagctactgtaaccaaggaactcaaattttttaatgttgattaacgtaaacttacagagtggccaccataaacaacagtaaagaaacagaattatcttctgaaatagttgcttttaaacataaaaaaaaggaaaatgttgctaattttattaaaagtggttatgaaagaaaatgaatgtgcttattttatacaagtatagtaagaaagactgaaatgacatctgagacatgctaccaagtaggtatagtaaaatgccagtaactctcactcactgctgaataatgaggttttgttacaccacttcctttactttgtatttattgaacaatctccctaaaaagattcaatgaattttaagagtcctcaaaattgatcaccaaatccaataaacctctaaaaaggcaatctatacatatctgaaataaatgttacttatagcttacaaattaaatacaagtaaaaagctcaaagttataagccttaaaaaacagagatccctacgactttaatttgggatggcttctatcacatgtaactggtagataaagtattatatattccatatccctttcccaaactcagaagtaaactggcttcctatttttaatcataaagatatcaacatagtgtatagcagcagaaagactgcaaataaacttaactaaaagatgttttatgagagaacagctgtgatttttacctcaatttaaaaagcttagtactatgatgactttattctgttagaaacttcccaactgacccaagccaattgtgaaccaccttcactttaggaaatggagcactaaaaacatacttgctggatgcctgaaatgttttttgaaatcattcaatgtttctactaccatcccgactgccctaggatcccaaccacttaggattccagtgctgtgcaaccgcagccttctagaaacaaagagctgtgtttgtcaattcagaatattcaccacttcatccatacttctccacaacccttcaagggaaacaccaagaaatgccacctacaggtttattactacttttgatgaaaacaaccaccccacaaagaaccctaaactccatatatcagagattaaaacacttttcttcatgtgtcactcaactgatcctaaagacttttaaaaatattcaaatctaagtagtttaaaaagactttccaacaactacattttaagacttacttgttgagtttaaaatctggaatgcagatatctgcttttataccacagaataaagtgaataaagacattttgcctcctatgctagtcttaatttgattttgctgtatgcacatggatattttaatttattaaaaaatggagccaggcagtggtggagcacgcctttaatcctagcacttgggaggcagaggcaagcggatttctgagtttgaggccagcctgctctacagagtgagttccaggacagccagggctatacagagaatctctgtctcggggtggggtgggggagtggaaaagccaggcatggtggtacatgcctttaatcaaagcacttgagagactgaggacaagtgacagaagatatgtcgattaggaggacagtttggtttcatacaaaattctaggcaaggactacacagtgagaccctgtcttcaaagaaagaaataaacataaaatccaattcaaccaaacacaccaaaaaaaaaaaaaaaaacccaaaaactgtaagaaacaagccaaaggggaaaaaattatatcctcaaccttcaaactattatacctcccgtttcttgaagcatatccacaagtgaaatgaggatcataactaaaatacggcaaacaatgagctaatttttgaatagcacaaacttcatataaattggatctatcttcttaactactagctatttaggtctttgtgtataatgcatctaacatttaacttgatgcctttcttctgaatacattttctgtaatttttattttcctgaattcatattatgtattctcaagtctcaaaaatgtcaagttgttatagagtcaattaaagtataacctgttattcagctgtaaagctcttgccacaaactcaaaattcaaaagaggaaatagctctaaagatgctagtgacttgctgctcatggtcataagccaatgagcagtataagcagagacatcaaattttcagcctgaacatcaagttcaagctttactttactatataacatgtcttccattaataacacaaattttagttaatccaaattatgtttttgatattttaaatgattttatgtatttggctatttctttaactgaaagaaaaatataggttattaggttataagaattttgtaggcaaaaaagcagggatagggaaagtgagtgaaaagttaaccagggagggaaaaggatctgaaaagaacaaatttattataataatttaataatgcattaaatttctcatctcccttttaaatgtcattttatttggaagagattaatcaaggtcagagttcagtaaactgacactcaaaactgcatgtctcaaaggataaatagaatatgaatttaaaaaatgtgttgtcaaagaacatctgcaaaccaaatgagtactaatcaatgtttccttcaaggtccttgaagacaaggccagatctaattcagccttctacaccctagaggagtaacagtactagccctagttacttttcaaacaacgactgcaaagctggaatgtatgtgttgacatctctctgatttgtgggccactgaataagtgaaatgtgcaagaaaaacaatgaaagttaatttttaagaatctgataaaatggtataattgtaaatacatgagcaagggataagtctgaaagcaaacggaggtagagatcaccataactatagtactagacgaaaaggaacattaagactgcttcttcctcttcacaagaaaaacagtgatcaaaagactaatccaagtaatcatattcatccaaaatcaactgtttctaccattgcattataagactcaaggtccattagcacttcctacgatgtagggaaaagttaaacactattctaggtataatttcacttgattcagatgtacttaactctcaagtggcaggtttatgtaaggtaatataaaaccacaacactacaaaatatatacaaaaacaccactataaagtactcctgcctctgttaggctatcactcctcaaaataacaagttgaatttattattttagtgtgtaagacattgtgtggtttatttaacacacacaaactcaggccatagaggtaattccccatataactgtgtacagaggacacataggttaaaagattttgcctaaggaatttatgcccaattaagattaatggtttacatattttcaagtttgtgagattaaatacattaagatttttgtaaaaatgtacatacagcagttacaactttcaattcagcttaaaaatttgtaaggacagttttactctccacagaactatagttcccaagttttcttaaagaagttaacttccttaagtcacattcaaaacccgggaaaacacttgtagcaaaatatgatacacttggattttattcctgaagtgtctcatgcaactgttctaagtcatagatttaattctggagcaagcttgtttttaagctttaaaaattttctaggtctaaggtaagccaagcccttgcactgtctctactggaaggttgaaggttatctgaaaccgaaattcctgttctttgattttctgtctttttcttacttgtaaatcaagtgacataatactcttaaacagtgaataactaatctgattaaaacgtgtaacttataaactcatgtacttaattattcttaagcattactctaatgagcaatttaaaatatttttgctcctggccatctgttaagggcctctaattagttcaaagtagtaattcagatcaatgtaattttaagaataagtacctacgttaaaatatccgcataaagaaaaagtttatatactagtaaaaagaactacacatctagtttagttgtagaaaatacttgtaatttgcacaacggtgttttcctctgacgaccagactatttagaagggcgaggaaggctactttctaagtggctcgaatgctaagttaagaacaggtaaaaacactcttcagggctagtatggtgcggctgatttcctaacggggatgtgatgtaacactggaagcgataggctgacaaagggggtgcagaagccagagtgaggaccgagcaggcgggaggcagagggcgtgcagcctgcactgggcgacttcgggcgtgggctggcggccacaggcagtgaagcagccggagcccggccgccagcggcgtgacatctggcgtgccgagccggcagggggcagagcaagcagggtgtcacgtggagcgggcgctacgggagccgggaggggagagtgagaactagaggggggtcttccccaacgcttcaaagactgttactcactggagtcgcggactcttcttgccctgagcaggagacgggggcttcgcggccgcgggctgatgccctgggccgtcgggaggcctgttgctggggctgctcctccgccggcggggatactcggcctttctccggcgggacacagcggcagcggcggcggcggcggccgcagcggtccggccgcggtcccgacctcccctcagcnnnnnnnnnnnnnnnnnnnnnnnnnnnnnnnnnnnnnnnnnnnnnnnnnnnnnnnnnnnnnnnnnnnnnnnnnnnnnnnnnnnnnnnnnnnnnnnnnnnnnnnnnnnnnnnnnnnnnnnnnnnnnnnnnnnnnnnnnnnnnnnnnnnnnnnnnnnnnnnnnnnnnnnnnnnnnnnnnnnnnnnnnnnnnnnnnnntcaagccagcgaccgccggcggcgcgcacgcgcgcacccggacggacacgcagcgggccaatcggaggggaggatcggcccccctggcccggcccctcgcggtctcacacgcagcagcgcactcggtgccctcccccaccccttcctccaaccaatcaggaaacggctccgagggagagcgcgaggtttccttgcccgcgcgcccgttctcaccgttaaacggctgcgtctcgcgacaatcccaaagtgacctttctcccccccactttggagttcggctcaagctaggggcggtgggaggggcagggctggcgagggcggaggcgaggacaaaacgcaccgttctcagccgcgcgcgcacccccctgccggctgcgcgcgcacctgcctcccggaggcgccgctgtcccctcaagggttcttactagcctaagaagtagcctggacgttatcccgcctccacccagacccccaccttcctgctctggcctttctgtccccagcgccgccagctctcgaggggagaagtggtaaattatttgagttgcagcttctcctttaagaaaaaaaaggccctgtccgttgccggatgaaagtctctgaaaaaatggcggcgataggatagaggcggggccgaggggacagcgcgggatagtcgtgaggcgcacgcgcagggccaacttcgccgagggcactctgggagacgtagtcctatttactctgcgcttccagagaaatcatgggaaactagaggcagagggaaggctgggagcgtctatctgaggtctgagattacgttttagcgaggcattgcttccgggttaggtcgcgacgcctgcgtacaactggcaaaaatattgagccaattacaggctaggggtccctgggagagaatcctatttctgttaatctttttttgtgtaagtgctccgaagtgccctcgtcatagtctttacttacttcggtctggtcatttgacgcctcctctgcgacctgttagctacgctcctttttattcctccatcttgtgttgagcctctcacttgtgaagcccaggaggtcagggactcgttctgcgtctgtcaacttaattttaataaaacgtgtaggacgaagtgtaaagttgtttcctggtagggatggggcgccacggaattgccgttggctgtggtgctggagctggagagccggttagcgtgactcactgatttttttgtggataagttagctgtcgctcacgttctccaccccgaggctgaatgcctttgcggtctgtagatgtttctgcggcacaggaaacacagtcataatagcagctctgactagcgtttacagctaagtaccttcctgatggggaaagggggctttccaatcgttcaaaccgcaactggtggtaatgcagcctcttatacgtttgtatgcatttctttccctcttaaacattgtttgcattccttgggttgccttttacacattgcaaccaggaaacgactttcaaggagactccttacacttcgaagatgcaaacgtcttaagttaaaatctacacaacagtatggaaagatacaaagtttggaaatctgattcagaattttatattagccattaaattttagacttttaaagaagttcatttttctttcttcttttcctcccagcatctggctcatttgccacacagataaggcaaatgttttatagtctaccgagttttgcgctttcaaaggattagtgtccttttcagttctaaaacccgacggtatcagtaggaatgaattttctagcgctgtttgcaatgagcacgtttggaacagcactgacatccaatggctgcttaaagtaatacaaaaagcgagcctcttaaaaaaggttttagtaaaatgaatgacttgttccttttaaaagatgatcattacaaaactatccctttattctattcttctagccagttattactccctattcctgttagtctcttggtaaacactgggacaaaacccacttcacagggccatacttatagttctttatatactgccttttctaggcaattttctgttaaatgcgtttgttgtttgtttgtttccttttgagatgaacaaaggcacaataagataaaaatctacctctctcacctttttggagaaattgtgaactgagcaggaattgtaattcagattctggaagcttagtacccagtatcttaaatcttctcaattgattcttccttattctgtagacgtttgaatgttgaataactggataaaccaggatcagagaattcaaaagtgaacccacttctcttcaactttaaagaatctataatctgggccagtgagattgcttagcagataaaggcactttgctgaaaagtctgatgaatttcatctgtgggaccccagtggtacaaggagagcgctttcttactcttacaacttatgaatgcctacatgagcacacacacacacacaattattaaaacgtctgttttaaaaaatcacagtttgtatgggaagtgaggtcagctgtactaagtaagtacaaatagtgaaatgaagttgatgctatttaatcagaaattttaagaaaggacctgtacttccatggtcttctagttttataggaaaaggaggaggaagagaaggaaagaaaaggaaggagacagaaaatagcctgcagtgggcaatgggaaacttaaacttggaaaactctttaagtataagcctaaaatttctatgtgtgttcaagataagcccttgaatacagtaggtgtttaaattaaaaaaagaattaactttcaatttttatagccaccttggccaatgtagcatcaaaacttcaatcttgcacaacctgcctttttctgttagcacaattaaaacaacaaacaaacatacaaacccccccccaaaaaaaaaacaaaccaaaaaacaaaacaaaacaaaacaaaaaaaaaaccctgagctactagaaaagaaaaagtattcagcaaatcaaaagtgaggaagtgctaagcaaatacaggaaccaaaaggggtcacagaggctgcttcgcactgtctcattcagttccgttgtggtcctcttcttcaccacatgccaacaaagttcttcacaatcttcgagactagagcatcgcaggtataggacaatggaagagctgggtgagtgaaggggcctttggagaagatgctctaaggaagtgggggcctggctgccatccatccccatctgtaatgatgaagtgtggtctagtcaaactgaggataggactgaaagatttttgttttcacttctgtcctcaattcaaacaagagtgaggcaggaggaactatcattgttgggggagctatggggttgctgtttgcagcggcacagttggcagagcgttgagaccagacagccaaagaaacagaaggaattgtaattgaaagtgccttttcccttggcagctactggaggtcatagggcagctctacagcttggagatatgatactggaagaaaaaaaaaaaaggatgggaaaggaagaagacattaaatgaaggaagggaaggagagaagaaagaaaaggaaaccaggagaaagggaggatagtgcaaggacagtgaaatgaccgagcagtgtaaagggtctgtagagattgcaaaagggccagagtgctttcatttctctgtagtttactgttagactacaggtagaccatcactgtagtaggttttgttgctttttatttagagaaatcttgaaggagcagattgcttctcaagaaaaacagtccatcctttcactctgaggtaatgaaaacgtcagtagaagtgccgctgggctactgtgtccagagaaacctaggtcaaaaagcctggagctgtaaagtctgtctccttggggctcatttcatataccttggcaactttttatcatctacatacctccctgtctgcctgcctgcccatctgtccttccatccatccatccatccatccatccatccatccatccatctatctgtatcacctatttatttttgttatcgctacacaaagttacttttacccacttttcaagctgtattaattccacattgtgtttgtagctatgcaaaaacttccaacaataataagatgcaaagcttgtacattgtcattaaaaataattattggggttgtgttttaagaactggagaaacagaggaacaaagaagagaatagaaattattgagggaaaaaagggtgttttaaataaatccttaactgttttgtcagtaaaatgtagttcaatattgtggttaatgctgtatcttggactttggtatagaatccagattcttttctatataatattgattatttattctttgagaatttgatgaatgcatatcctgtgtgggtattggaggaaatttgcatttcttcatcgagttttaccattttttttcaggtaggatcttagttttgctttattttataggtcacacacatcaaattctcaaagaataagtaaccaatattatataaaaaagaattgggttctatatcaaagtccaaaatacagccttaatcacaatatcaaagtacattctacatttaattcaatattagttcaaaaagttaaagggcaattaatattgggaaaacttaaaatctgtaaataagtttagtgtttgcagcagttttctgaaataggtattattgtttttctttaaataatgaaaacccaaaatatcttgttcactctcaggagcacctgacactaagtacaattaaatggtaatgttacaggttgttcttttatattagaagtgtatttgttctggtggccagtgtagtaatacattttaaaaaaatgtatagtttaaagaatttctgagtagcatagttgttaaggaaatctttttcagaaatgtagaaaataagcaactttggaagctgactgtagataatccaatttgctacaggttaataaactgctagtagttacccctcaatggtctcttcaaattgtaacaatttgcatggaatgtagtgttgcttgccttcaatccttatgctccagaggtggaagcaggaggatcaaaaactaatggttatttttgtttgtatggaaaatttgaggccagcctaggctatctatgtacgatcctatctttaaaaagtcagacatggaaggcagaagcagatagatctctatgaattgaggccagtctggtttatgttacatagcaagttgtagcccaacaagggctatgtactgaggccctgtctcaaaaaccaaaatgaaacaaaaggcaggtagtgtctgccaggcacagtagtttgtacccacgatcccagccagcacttgagactaggttgaatgactggccacagtgtaaggtcagcctgggctaccttgttagttccaggtcagcttgggctagaatgagaccctgccttaacaaacagcaacaggactaaaatccaaacccaagacttggggtggatttctctttctacttgtgtagaaattttatcaaggacaggctggctcaagtgggcaaatatttcctttatgcaatactgccttggatgttagtagcatgtattcacctagaaggttttacctaaatcttctcaatttagggatgagatgactctaacacatggagacgcccagagacttcactgccagtaatctcatatttgtcacaccaaaattagtcatctaatttaaattttagagtctgcatgaagccaaaggagtagcttcaggagctggtgaaatatgtgttcattggaaacaggaagtgaaagtcctggtaactcgtgagcagaaaggagagttataatagatttggtgagctgatgcttccgaggataacttcacatcctctgctcagtgatactcctgtcccatcatgtttaatatacatgagttctcttggtccaggaaggactctcatttctgattggagtgaagcttagaaaacagaaaagagaatggttgcattctaacatgcaaagtgttggaattctgaaattcagagttgaggctggctaattagagtctgagataaaacattggctttgttgttctgttttatttactctaaaacattcccaagatcttttattgtggagaattaaaatatatacagaatgggagataacagtttaatgactttgattgcaccctttgtatcagtttcaataatcattagctcttgacagtcttatttcatatgcttatatttttccattaatctattgtttttaagaaacttcaatgattacatttcttatctgtacataattcagtcttaatctactacaaacaaccatactaacagtatctgacccacaatagctaataaccttaatggcgtttcctcaatatcatgaaataacattattacatctaagattatctgacatcattttaatgttaatattttcaagtttctgagatattagtacttaatattactgactatatacagtgttaaatattcttttaaaaatttaacttatcttgttatgcttatgaaactcatgatgaacactgaatctgaatttggaaaaggatttattttgcacttgcctgtaaatttttgatcacacattcacaaaaatctcaaacaaatgctatcggcaatcttgtctggtttattttttacattaaagttaataatctaaattgaaattagttatatgtctctttgttctctcttaatatatatgtaccccttctgcctgtctttcttttttcttgtcagtttatttcttgaaggacagtttggcctaaagctattagttcaggttggttctttctaaaatggtatatgaaggtcaaacttttgagattaagcaagttctacagaagatttcttttgtgaaaacaaaacaattatatcttctcctataatattgggaaatactaatccttagtctgggcatgtggctcagtggcacagcacaccttgtctagtgtatgtaagttcccgggttcagcattgttaagagggaagacagtggggtgagacagtttttgaactgtacatgatgctatacccataaaaccccaacattcaggaagtggaggcaaaaagatcattgagttttaggccatcctgggctacttggtaaattctaggttggatttatagctgcctttcttaaaaactagacagagcaaaactctgatctccaaataggaaatacatgagcatgttttttccaatgacatttaaagttcattttctttatttgagaacttcagagctaggcaggtcctcagaaatcgtacaatctaatgctttgcaagcttataaaaatgtaatatatattttaaaaatccactgaagttcaaaaacgaacaaaaagacacaagtatcttcacttgcaatttgaaaaaaaatattcttccatccaattgcttcattatgtacatgaagaaagaccttcagagaacatgctgtgcttaagatgactcagacaatctggtgatactggcagctccaatgtacaagttcacagtgttgagactgggatatgatagcactcactggagatctgtgctcagcagcctgtgagaactacaccgcctctctcctttatatgaaatgagaacggtacattaccatttctctacctcaatgtggtaggataattaaatgcaaactgtaggtttcatatactatgattggcatggttaatttgtaatcatgattactgacattacaacagaaaggtattagcaaaattcttgtgaagtctgttgactttctcccaagaaaactgcaaaagaagtcccagtaatttagattgttacatattgcttgattgtataatactttagtttttttttcaaccttttctctccacatccaagaaaacaaacaacaacaaaaccaccaaaatacttaacaatttattgtgttatggtttgggctaacccttgagatagactaaaaaatcaggattaaaatgttttacttcttggtatattttgaaaaattgtaatcaagttgcttctataaagttgcatgagagagagagagagagagagagagataaagagaaagagagacacacagagagagacacagagagagagacagagagacagagagacagagagatctgccctatctggttaaaatcaatacctagaatgtcagaaactaaattgtagagagagtatgaaattgaatgcaaccataggaaataccaaatgtagtctcctcagacattttctgggatatgccacactcctgaagtgaggtaaggatggaagaaggtatttgtaaattttttattattcaaaacaagagaatatttaagaaaaaaataatcctggaaactcatagattctacattatacccctcttgtgtcctgggacatagatgccttattggaggaattggaacgctgcacctttcaggacagtgaggaatattcaaatccagtttcttgtcacctggatcagcaatccacagaggagagcaagattccccaaactccaaagaccttgtcatcgcagggtaacacaagtcccttgaaggtaacatttgaactattgtagtgttgtagacaatcaagtgtgacaacatttctaaaaattgtattccacataaaattatattttgtaaattataaattatatatgttatatattaaggagaaatatatattcaagaaagaaagaatatcatttcaatattgatttaaagatagttgcttttggaaagaggagaactgagaaaatgactgtagtgctttgagtagatttggcttctattcatgtgtttgaatgtttggcccatagggagtgacactattagaaggtgtgtccttgttagaataggtgtgtccttgttggaggaaatatatcactgtgggggagggcttttagggcctatgttcaaggtccacccagtgcagaagagagactcttcctggcggccttcagatcaagaactctcagctccttctccaacaccatgtctgcctaaatattgccatgcttcctgctgtcatgataatggactgaatctctgaaactgtaggctagctctaagtaaatatgttgtcctttataagagtggtcttggtcatggtatctcttcacagcaatggaaatcttaactaagaaaatgaccatagagtaagcctttgaaaataagggcataatagcagagtattgcctggtacactctgactacttgatgttacttcctgaaccataacctgttaccagaggtgtcacattatagtttgactggagtcacatccagtaagaccagggatcacctgatagtttagataagtcttctcgggtgactctatacagctgttactatgtttggcttattttctgttaaatacattcagaaattgttttcatctagatagagatggtaaaactcttggcagtgactacacacacacacacacacacacacacacacacacaaaaccaaaaaaaaaaccaaaatgccctaaatccaccagagatgatttatttgaaagcccagagatctgttgtgttaatttatgattgttaaaactattaagtacatatttgctgagatgtgtattctcttcctttagataattgtgcacaatgcttaattgcgactgaagcttgcttaatgagaatgcaattataagacattgagtggatatcttgtatttatgaactatgatgttctggttcacttttgggtactctctacaatgagtatcccagacctggaatttgagtgcaggaatagctactttccagcttttccccagaatgcttatctgattctgtactagagagtgatatgttttgaaatgattcaagtatactcatagcatcttttttattttattttatttttttagattttatttatttatttatttatttatcagatattttctttatttacattttaaatgttatcacccctttcctagtttcccctctgaaaatcccctatcacctcccctctccccctactcctcaacccacccactcccatttttggccctggaattcccctatactggggcatggaaccttcacaggacctagggcttctcctcccattgatgaacgactaggccatcctctgctacatatgcagctagaaacacaagttccaccatgtgttttctgtggtttagtcccaaggagctctgggggtactggttagttcatattgttgttcctcctatggggctgcgaatcccttcagctccttgggtactttctctagctcctccattgggcatcttaatggaagactgcatggattcctcgactgcagtatcatgcagcagcctcatagtcttgagataagaccaatcatcacattctttcaccctgagtctggtagtgacttctcacctcatttgcagtagaggccacagtgttggcactgacttttgtggatgaccacatctttgtttacttgcgtaagacctgagcttttgcttctttttctgacagctcattgatttcctttcacagaaaactttcaattgtttttgaagttttattattaatattttctttaatacattaatttgactatgactaactccaaagcatcttcttgatctagttcagacagagtatcagtcacaataccttttcatgatagtactcagggagatggctctgaagtctaagagtgagaacataagctaacctctctggtcttaggtagtagcagaagaaatctgctagtcagtctgtatgctgccatgctgtggtccatgcgatgcatacctggaacatctggggtcagtaagtagtgagaaaatcacacatacaatcatagggattagagtttagtattgttattccaaatactatactatgaatggtatgaaagcagttggcttaaagcaaaacggaaaccaaatcttcaggtctcatgctcagctgcaggaagtgttcttgcagatctctgtgagatacacatgtccacttctagcaaagcacttttgtaaacatttctttgcttctttctctctctctctttctctttctctctctctctctctctctctctcttccttccttccttcctctctcttctctctctctttctttctctctctttctttctttctctctctccttctctttctctctttctttctttctttctttctttctttctttctttctttctttctttctttctttctttctttctttcttcctttctttctctctctctttcttttctttctttctatctttctttctctctttctctctttctttctctctctctctttctttctttctctctctctttctttctctctttctttcttctctctctctctctcccccccctctgttcctctctctttgtctctttttccttgtttttgctcactttcaattccacattttcttctgcttatatgcaaggtgggaagagtagactgtctttgaaagtcatcaaaatatgctatattaactcactgtcatcagaggtctcaattagaaaatcagaacattccaagctttttgatttatttttttacccgatgtacagcatcaaaataaaacctctggaagttcatttgttcattatcttgttaaaaaaataaaacaaacaatatcactaatatcagtacagtaagttgaaatagtttaacaatgaagatagtaaaattttatggtaagaataagaaaacagattgtgaatagcatcacaataaagtgttcttaccaacttaaccccaatagcagaaatgtgtcagaagaagaatgtaaagtgcacagaattctcgacttcatcaaaacacacagcagcattttgtccctcaaaactaaaactattaagactggcaaatattttggctgttaccctctggcttttgaaaatgtccaacctctgaaaactcatttcctaaagcttaggttgccttatgtgcaaaatcagctggagatctgtaatcaaattatacaagcaagatagatcgaaaaagtgtttgttaacaaagtacaattgagcagctctaatttttcctagcaaaaaccaaaagagatcatgtagctaaattgcttaatttgaaatcatgtttctgaaaaatattgacattgatggattttggctttattttttggatacatttataaaccaatagaagtcagtgattttgctcttatccattttttacaaactgtgttaaaaagaatcacaaatagaggcaacttcaaagtttggcttattaaaatattaatgcagaaagatgctgtgagtggaggtggatagggaagacacgtgggaatattgttttggacaaagtagaagggggacaataaatatggaagtactgaggggtgagcagaacccaagagaggaaggaggatggaaagaaaacaaatattgtattttatgacatatgtgtctttggtgtattctgtaaattatataaaaacaaaaggacttgtgtgtgtgttggggggaaccacagggaaaggagacaggagggttatgggcggggagatgcaagcagagcacactaatatacatgcaggaaatgggcctagtgaagcccagtgttttgtgcactaagaaattaaccagaagaaggcatttttctgactgtgtatacacattttaataaagaaagcagaattaagaatatgtttcacagagcagaatgtgccctgaatgttcaggttcatcagcattaggggtatcacttcactattaaaacaattgtgccctagaaaaaagtacaagttggctgggcagtggtggcacatgccatgcctttaatcccagcacttgtgaggcagaggcaggcggatctctgagttcgaggccagcctggtcttcagagtgagttccagacagccagggctacacagagaaactctgtctcgggagttggaggggaagcacaagataacaacttcaaatgtactaactataaaatgtagctttggataatattacaaactaaaaagtgacaggactcagcttcttccagccttcccctaattcaaccacaggagttcctgacttctgcccattggtagggtttaagtatcttcttttgtctcagtcagctgcttgttgggcctcttggaggacacacaagctgaggaggagggtaacaccatagggagacaagctgtctcaactaacccagacccctgagatctctcagacactgagccaccaatcaggctgcatatgcaaactggtacaagacccctgacccatatacagcagaggactacctggtttggcctcagtgggagaagaggcgcctaatgctcgagagacttgaggccccagggagtagggaggcctggtgggtgtgtggggcagcatccttttggagatgggggggggggggagaatgggatgaggaactgtgggagggccgaccaagactgggataaggactggactgtaaaaaaataaataaataaaagcaataaaaaagtgacaactatagatattttaaaacataaacattttaaagaaaaattcccaaatcaaaatattagaagcagcaataaccaagtttccaattaaggtaagtgtctatatgttgagcataattcttttcttatgtggttttatatatatttgtgtgtgtgtgtgccaacgtgtgtgtgagcgtgtgcatgagtgtgtgtgttgttttaaattattttgggtaaattgttatagaaatctctccaggtatgttggcttgcatgtgttatcgtgaggagcagaacttcaaggccagcttcagctacatagcaactttggtgctagcctgggctacatgaggctctgccttggaaaaatttaaaacataaggcaaagagattttgatcacaattattgttgttgctactacaattattttaagacagttaccaaggctggcctcaaaattgcagtcttcttgcctcagtttttcaaatgctgggcctaaaacgtaagagcacgagccaccacaccttgttcttgattgaaattattttgtaggtgccctaatacaatagaaccaagttgtttgactagtaatatgtacgtcattagggaattatggtacattatggtacatatatttgaaatctcaattctagtgatataccagaacctgagtgcttgagttccagactagattacacagagtcagattctctttctcactgtctctctctgtctctgtctgtctgtctgtctgtctctcaaaattaaaactttagagatcaaaccacaggaactaattctagaactctcctttcctcttacaagtgtctcagtttgagctgtctgatgcatgattgccacctgcagatctagcccctctccctgccttgcaggcctccctggcctccctgcttcccagctgtcattccctttcagaccttgcacaggggccacatttccctgatacccatttgctttccttacctcatgcacggcattgttcaagtgtcttctactcagtgcgttttcccacatccatgcatcatagcagctatcttcatacttattattactcctttatactcccttattacacttttatacttattattttatactccctgactaacttttaaatctgcttcttgtcagtagaatgcaagctctagaatattcagtttttgttttattattttaggttttaagtaatataggctgactttgagctctttgtgtaggagtggatgagattgaatcctgatcctgcatccagctcccaagtgctggtgttataagagtatactagcacagcaagtttatgtggagttagaattagaacccagtgcctcttggatgcgaggcaggcactccacttcatttcccagagtatttggttttagtgtgattgtcttattttgtggtttgggtacaacatcctatgccctggaacataatagtcactaagtaagtttgtgttaaatgagtaaatagatgaattgctgtccagccgcatctttggttgacacattattacttttcataagccaaggttgtgatttagccttcccttaggcaccattgtgtttaaagtgattttccctgagccaccgtgttactttatgcttcctatctgaggatgacacatctctttatatctttatttttaaggcagggagggtagtaacctttcaagtgccaaattctgtttagaatttggtttttctctgtataataaaaggtaattctgggctggtgagatggctcagcaggtcagagcacccaactgcacgtctgaaggtcctgagttcaaatcccagcaaccacatggtggctcacaaccatccgtaatgagatctgactccctgttctggtgtgtctgaagacagctacagtgtacttacatataataaataaataaatattaaaaaataaataaaaggtaattctacctttggaaatgcttaagcaatatgctagttacttcttttatttattattattatcatcatcattattattactattattagctttgagataagctctcactatgctgcccaaactaagctcatactaatgcatcttctatctcatcctcccaagaagcctagactacaagtgtgaaccaaaatgtcattctggttatcccccttggcagctataagcctaagccgccctcattctccatgttgataagttacagcattctaacacaaatgccatttgttattcttttctgtcacttacttcttaggtgcagctcgtgtatgcaaccaatatccaggagcccaatgtctacaggtatgctttggtgtctaataaataacttcacaattaaaagttatcaggtaatttattattaataagtgacaaattctttttttttgttttttgttttttgtttttgtttgttttctgagtcagggtttctctgtatagccctggctgtcctggaactcactttgtagaccaggctggcctcgaactcagaaattcgcctgcctctgcctcccgagtgctgggattaaaggtgtgcgccaccacacctggctgacaaatttgtttgtaaagattattattggatttcatccatagtacgcctcttcccagagcctttgagtggaggcagaacccttctacaatgacttggcagcctctcaaggtacctcgtttccagacaggtgtccaggctcggggttgggagtatctctgcatttttaaaaatcacctaaaaaggataaaagtttcagaattagcatagagttttggcacttcacttccggatgtcatgcaacagaactcaaaggtgaaaacacacctgaagaaacttaagcaagggtccagcaatatcagtacaaggaccacggctatatgaagacagcaagggtccatcacagacacctgaaaacataattctactttccaggtctgctcaaaggttaggtaggtggtgaaaggaacatttagtaagtgttacacatggaatagattcacttgctaagtcatttcttcaaaccaaagcagattagtaatctaaaataaatcagaaacagaaaggccacctcgtttgtgtttgcctctttaatcataacacacacaaaccacacacacacacacacacaaaagaaactagaaccttttcttaaggatttgtgcttgtcacagagtgctccactgcactatctgatctcaggatcatagtacatagagcatacatggggagctaaatcaggcaatggacttgaactacgggaagtcattttaatacattccacttgaggtcacttccttctgtggtgggagtgaagctagtttacttatatacacattacctatttattccagctccaggaagtgagaggtgaacatatctccattgtcttcacctttctgccctagctaaaaccaaaacaaacacaaacaacaaaagtggtaactgtacttaaaaggctctcagcaacagtatgttttattaagaagtagaaatgcatatgaatactgaaatatgtaacatgaaaaccagtccaagcattaattattttccagtatgtccggcactgtgatcagttatttaatcatgacactattttatggtcatcttctcctacagcactgggtaactggcctctgtctcttttcatattctgtgttctgtcatttagggccaggccatttttgcaaatgctttccatttaacttgcttttctagatacttgctctcctctagcttatagcttattctacatacagatcctatgctaacagaccactcccaacacacacacacacacacacacacacacacacacacacacacttgtgtgcagccacctatcagagctggcctgactgcaagcataaaccacagactgttcatcagtcctgcagtttagagcctccccctttccctaacatgtataggagactcactctgccataggaaccccatcttgctgccatctgtctgtccgtgtatggcatttctaattcttttagtaaatcccttatccaaatagcagtattcccaagttccaagacagttggctgtcatgggctttgataagcaagaagtgctggagagaccagcagatgtagagtannnnnnnnnnnnnnnnnnnnnnnnnnnnnnnnnnnnnnnnnnnnnnnnnnnnnnnnnnnnnnnnnnnnnnnnnnnnnnnnnnnnnnnnnnnnnnnnnnnnnnnnnnnnnnnnnnnnnnnnnnnnnnnnnnnnnnnnnnnnnnnnnnnnnnnnnnnnnnnnnnnnnnnnnnnnnnnnnnnnnnnnnnnnnnnnnnnnnnnnnnnnnnnnnnnnnnnnnnnnnnnnnnnnnnnnnnnnnnnnnnnnnnnnnnnnnnnnnnnnnnnnnnnnnnnnnnnnnnnnnnnnnnnnnnnnnnnnnnnnnnnnnnnnnnnnnnnnnnnnnnnnnnnnnnnnnnnnnnnnnnnnnnnnnnnnnnnnnnnnnnnnnnnnnnnnnnnnnnnnnnnnnnnnnnnnnnnnnnnnnnnnnnnnnnnnnnnnnnnnnnnnnnnnnnnnnnnnnnnnnnnnnnnnnnnnnnnnnnnnnnnnnnnnnnnnnnnnnnnnnnnnnnnnnnnnnnnnnnnnnnnnnnnnnnnnnnnnnnnnnnnnnnnnnnnnnnnnnnnnnnnnnnnnnnnnnnnnnnnnnnnnnnnnnnnnnnnnnnnnnnnnnnnnnnnnnnnnnnnnnnnnnnnnnnnnnnnnnnnnnnnnnnnnnnnnnnnnnnnnnnnnnnnnnnnnnnnnnnnnnnnnnnnnnnnnnnnnnnnnnnnnnnnnnnnnnnnnnnnnnnnnnnnnnnnnnnnnnnnnnnnnnnnnnnnnnnnnnnnnnnnnnnnnnnnnnnnnnnnnnnnnnnnnnnnnnnnnnnnnnnnnnnnnnnnnnnnnnnnnnnnnnnnnnnnnnnnnnnnnnnnnnnnnnnnnnnnnnnnnnnnnnnnnnnnnnnnnnnnnnnnnnnnnnnnnnnnnnnnnnnnnnnnnnnnnnnnnnnnnnnnnnnnnnnnnnnnnnnnnnnnnnnnnnnnnnnnnnnnnnnnnnnnnnnnnnnnnnnnnnnnnnnnnnnnnnnnnnnnnnnnnnnnnnnnnnnnnnnnnnnnnnnnnnnnnnnnnnnnnnnnnnnnnnnnnnnnnnnnnnnnnnnnnnnnnnnnnnnnnnnnnnnnnnnnnnnnnnnnnnnnnnnnnnnnnnnnnnnnnnnnnnnnnnnnnnnnnnnnnnnnnnnnnnnnnnnnnnnnnnnnnnnnnnnnnnnnnnnnnnnnnnnnnnnnnnnnnnnnnnnnnnnnnnnnnnnnnnnnnnnnnnnnnnnnnnnnnnnnnnnnnnnnnnnnnnnnnnnnnnnnnnnnnnnnnnnnnnnnnnnnnnnnnnnnnnnnnnnnnnnnnnnnnnnnnnnnnnnnnnnnnngctccctccacgtatagtctttggatggtggtttagtcccgggggagctctgggtggtccagttagctgatattgttcttcctagggggttgcaatccccttcagctcctttagttattcccttagctcttccattggggtccttgggctcagtccaatggctgactgtatctgcatttgtattggtcaggtgctggtagaacctttcaggggaacagccataccaggcttttgttagcaagcacttgttggtgtcagcaatagtgtgggggtttggtgcctgcagatgggatagatccctaggttgggtggtctctggttggcctttccttcagtctctgttccactttttgtccctgtcttttctttgaacaggaacatttctggattaaaatttttttttttttttttaaagatttatttatttattatatgtaagtacactgtagctgtcttcagacactccagaagagggagtcagatcttgttacggatggttgtgagccaccatgtggttgctgggatttgaactctggaccttcggaagagcagtcgggtgctctaacccactgagccatctcaccagcccatggattaaaatttttgagatgtgtgggtggccccatctctcaactggatggggaggggcatgcctatctactggaagtggtctctacaggttgtagtttcccttttttgtgtttttaggctaaagtcatccctcttgggtcctgggagcctcttgcttccctggagtctggaactttctagtggctatccgcagttccccatcccccagtgctacgtttctagtcagtttcctgaccctgtgtacttctctcctgtcccttctaatacatgatcctaaacccccttttttttcatcgtcctcccttctccctcccagatccctcccttcctctacttcctctgattgttttgttcccccttccatgtacgattgaaacatttatattttcgtcttccttgttcttaaactctgcatggttgtgagttgtatattttcatatgtcaatgtgaaacatagcttttaccttaaaggaaataagagattgtttattctgaagccaaatatgagtagccatggcctacgagcatagatttaggctaccaaaaatcccatgttataacatgggaaaacattgatgaagtctttataaatgacaaaacaagaaaactaataaattaaggaatgttcaaacacattaatagaaacattaaggatgtggattgaaacctctgctctaggcctcactgctaatctaataggatccttagttttatggttgatgaaaactaagattttgttgttaaaatatttcataaaatttttatgtattagtcacaggatgttatatgtgtaagaagtgactgtttatggtcctaaatatagaccaagacaaattgttattagcttctggacctacaacatcccatctgcaacacaatcattgaagttcaagttaattaatcaaccttgctgattacgttgaacacacaatttccttttgggaactttcattctcatatctataataataaacatttaaatctatctttcttcaacctgttaacaatgtagctcatgtttccattggtttgcttttttaatatatagaagttttacaaatattttgaatgattcaactatagtaattttatgaaacagactttattaatagattttcttttttgtttcacttcagaggttttaaacaaactttttccttatttttagattaatttttatgtgtatagatattttgcatgaatttatgtatgtgtagcatctgtgtttctgacgcgtatggaaatcaggaaaggttgtttgatcccttgggactcgggttacagagagttgtaagctgccatgtaggttgtgggtccaaacctaggctctctgctagtgcagtgagtggccttaaccacagaaatatctctttagccttatctctttagtgttctttccttgtttaaaacatgctcatgtctctaagttgttaaaagttactcattttcttctaatactttaattttaaaaatatttatatattcaattccactcacttgtttatatatttgatgtgtcgagggctgtaaaattgttctagacagattgttattaagtccattgagtataattctgacactttaaatgcctcatgaaatatcctggattttttcaggtgtagggggctgcttctgaattttctagtctactcttttgatctgtttatttattctgttaccattacacacatttgattactttcacttgtcagtgttgcataataactgattgctcctaattatctttattttataaaatgttacctctattgggacaagcttttccttccaaaatttgtttttgtttttgttatttttgagatagtgtctgtatatctatgggtggtctggaactcatagcgatctgtgtgcgtctgtcttgaagttgtaaggatgacaaaagtgtttccacatgcttagccttttaaaccttaaacgttttctcttgggtgttctagcccataaatttaatgtaatcttattgatagctcaagtaattcttctggaatttgtatggaattttatagaatttaaaggggaaagcgacatatagtatacatctctacttaatgtggagcttctctttgatttgttttacatatcaatgcttacaatataatattcaggatacatataggtagtgaatacttacttagtgacaattcattatgatagaaatatctcttacacacaaaagtttgcaacttctgctggatttgacagttaataatagacttcaaggtcacataaaatggctttccagctgtatactcagcccacttgtttaattagcttttaagagaacaatgtaacaaccaacctcacttgccttggatttctcatgtaatcagctttagctacctaagcaaacgtgtagctgtaaccctaaattatgtactcctgacccaacagtaatgcatgcatgtttgttatgataatcatttgctgaaaacagaacaaaaacgttaaatgaaacatatggatattgttggatagcattggtttgcttattatctgaatcatttggggttagtttgagttatgatttcatccttataaaactctattgcagatttctgttcagcatttcccattctttcctcactcagtgatttctgtgccacttaagaaatacacagcagggctgacgagatggctcagtgggtaagagcaccgactgctcttccagaggtcctgagttcaaatcccagcaaccacatgggggctcacaaccatctgtactggttgatgccctcttctagtgactctgaagacagcaacagtctacttagatacataaaataaaataaataattctaaaaaaaaagaaaagaaatacacagtgaatgcactttgttaggaatgatggaagacatgaggagagcaaagtagagaattcaaacctaggctctctcctggttaaatgacaccaatgagaagtgctttattgatttctgtccgtaaggcaacactgatgaattaattattggtgacactgaggttattgttaatgtgcttaaggtgatgtaatgaagcaaatatgcacattttcagatctagtagtaatctcaaatatgtccaattttattacctataagccccaacttgtacattattagatctctaaacacatatctactactttgggtcctctggcatacattttatttcctttcacatttcttgctcctagaaaccattgttttgttttatatttctatgtatttaatctttttacattctacatataagcatgtatgtacaatatgcaatactttacttctatttaattttatacaatgtcctttaggctcatttatgttgatctgcttcttctctaaggccaaattatattccagtgtttatgtcatccattatagtttaactgtcctaattaatttactcatccacagataatttggttatttacatatcttgtaaataacactgtaagaaacattgggtcacagacttctttactatgtgccagtttcatttccttcacagcagagagggactgctgggtcatatgagagttctatttttcatttcttcggaagccttcatattgtttctcattgttggtgactacaccaacctgcacaccactggcagtttactgtggtttcagttctccttacttttgccagcatttgcctcaggctgtaatgggtatgaaggactatctcatagtaatattggttttcattttcctgatgaataatgaatctgagcacctttttgtatacctgatgactgttagtcacctttagaggaattcaggtttcttggttatctttaaaactctccattggttatgacttataattttaaatttctctattaaaatacatgctatggctttacagctctgttctgaagtttcttgtactctattaattggagccatgtccaatacttttcttcatacacttgaaaagaaataggttatatatgtatgcatgtgtgtattcatgtatgtatgcatgcatatatttatttatttaggggatcaaaatgaaacagatatacaatacagagaggccttattttaaaatttagagtagtagctatacttaaaatatttcctgtctctggtttttagattcatatcaaatagattaatatgtaaaattgcatcctttggtatgttatatgtgacttaatatttatttgattttttgctttttcttattctatctgtagtgaggtccaagagccaaaggaatcagtcctgcctcccaaaacctcagcagctgctcagttggatgagctcatggcccacctgagtgaaatgcaggccaaggtgggtactgtctgaattatgaagtttctgagttccagagagacaccaaggttgcttagtagtggtcagtcttcatcccttgcttgggaattttaaggtggtgctcactttcttagactatgtttaattcagtggagaaactcatttgtgcacgaacgataacatggtgtaatgtcataggccttgatctggaggatcttgaattgttcttgttatagtcatagagctctgcagtatttatagaagaaaaggatggtgattttccaatgagtggagtaaagctgagggattttgagaggttaaacaaattttatcagagcagttgtgatgggagttagaatggacacttgaagaatagatgaggcctcgatacatatgataagagttagaaaatcccaagggcaaagattgcacctacggcgtgatcatgcagaagggttgttaaacacacatgcctgagcaggacaagaggccggtgggcaggctgtgatggagcaagggaggccaaggtaggaaggataagttctgagcccatacggagataaaatctgctctttgttcttgtctgtagagtgaaaatggcaagctcatgcatcctggcagaaagcagaaaccagataaggagccttaagcatttatcaaggaagtagatctagaattcttaatacagagatctagccattttaaatctgattggaagttaggatgcatacccatgaaatcagtatgaaatgtttaaaggagacttaaaatgtgtgtgctagaggggagcaaggacaagacatgaaactatccacatcctgctcagcaccctagcactcagtaacaacacatagctgttggaggatcagatgaatacatgtcacagacaaggttctctgatggttaatactttacaattagctaacatctatgctaaagttgagtgaattgacactttgcactgcatacttaacaatgctagaacaacaatcattaggaaatttatgctgtgttttcttgttgatttaaagtgtatcttggtatatttaaaatttaacttacaatgtatgttttaaaaataatccacatacattgtataaaaatcaaaagtacaaaaatatctacagtaaaaccgttttcatatcatgtctcggattgtcccattctgccccctgctggtcttcagaatatactgcagcttacatatgtatccagaagtattttagaatatgcaagcaaaaagatgtagatgtgaagaatatttttttatgtttgtcttgaggattttcctttttattaattattttctttatttacatttcaaaatgttatcctctttcctatttttctctccgaaaaacctccaattcaaccccacacacaccgccctactccccaacccacccactcctgcttcctggccttgtcattcccctgcactggggcatagaaccttcataagaccaagggcctctcctcccattgatgactgactaggccatcctctgctacatatgcagctagagacacaagtcccaccatgtgatcttccggtagtagtatgtccatttttctgaggaaccgccagactgatttccagagtagttgtaccagcttgcaatcccaccaacaatggaggagtgttcctctttctccacatcctcgccagcatctgctgtcacctgagtttttgatctgtgaagaatatttttacttagttatttttcaaatgtaaaattagtaactattttgttatctctagatattaaccttgtgaatagataactcacaaacactaaactctattatataaaacagaggaaagaattttgtttaaggatcaatttttgagggaaataagcatttgtatggtaaaataatatgaggctattccagacagtgaaagttgaataactagaggcctctagacagatattgtctgaactgttcaggagagtgttgggagcctgcccacttcaacaataaggcttctaactgtgaaatagagaatgcaaattgggaagacaaagtgagggtaggtgggtgtgaagcattgaatgtctattagaggttgataaaaaatnnnnnnnnnnnnnnnnnnnnttaaatggggaggcagtggagagacagtgtatctatctgataagataagcattaagtagatagatggcagcagcagccaatggtgaaaaggacatgaaatgttgaagggagaaggtgtggtgtggtgtggtgtggtgtggtatggtgtgtgtgtgtgttaaactgacttgaatgatttatagtaattgctttgtttctgtgtttgaataaattcaatccatagatagtctcactaccctctctcttaactggccttaaatacctcacaaatcgttgcaaagtattcctccacattcgctttccttagtctcagattagctgcatgccagccacagtccccccttgttagatgagtcaaacgtcttccataaaggacctagacaatcctcacttccctccatacagtcttctgtgtgttcagtcctagtccttctgctctggctctgttcctcttgtaacttttcttttaatatgccagatggtttgattctttgggccttttctctctgtggaatgacaatctcactaatgccagtatgtctggattcttgagtacatatgctcaagtctgctctagtactcttcctcagaggccactgcctgagtcagttggcacttatcacactacatccagcacatcaacctcataacctacatcttttctttatctgacatgcatcacgtttattgcctgccattcatagatgaaaattccatgagttagaaactcagtatttctacatattgctttatgttcttagaatgctgagtggaacaaattaggtgtttggcaataaatacataaataaaatagtttttacccaggccacactgtaagagccaccaagactaatcttcatacactcaatttttttggcagccagaagatttacaaataaatatcaaatcagatatcattttggtcaaggaatttgaaataaagtagaaataaaagtgtttttattcatgttcatgttgggtgtctccagcaccttgaaggaaggttaggggaaagcaagatctgtcattggacgtgaactgataggttgtatagcagatgtcaaaaagtaaggtgaacgtggggtgatttctctttgtggttctttccttgtcccaggtttcagtgaaagcagacaccagcaggaaacccttgccagaccagcaggatcacaaggcatctctggactcaatgctgggggacttggaacaggaactacaagatcttgggattgccacagtccccaagggctactgtgcttcctgccagaagccaattgctgggaaggtggggtgatctaggatgtcaggccaatatcatctgtgtttgtgggtgtccaaggatggctctttctatttatattataagatgctggagtacttgttatcagtcactgactgcttacagtaatatgaactaagtgttttgtaaatatttctgcatttaatacttgaatcaacccattaaggaggttttattagagtaccatttgcacaagcaatgaagccaagagctcagtgacactgactggcaagaccaaggtctagtaagtaagaagcaagggggacacttgagtccaggacagtctagcttccgagtttgaattcctaatcacttttgttcactgccactactgagattaccttttatgctgttccctttcttcagacattcttggatttatatgtaatccatgcaatttcagctaaatgtaactttaagttagagatactgggacttactctgaatcattatcaccaaaaccatgatacagggctttctgatctgactccagaaggatgagaaacaaggagctcagatctgaggagtagaatctgcttggcttcttgatcagtctggttattttacttgtatataacccagaggtgtggtctatatgaaatgcagcatgcagagtgccccctaggggtacattctgctgcactgccatgtcaggctttatgatgttcctaggtgatccatgctctggggcaatcctggcacccagagcactttgtctgcactcactgcaaggaggagctcggctccagtcccttctttgagcggagtggcctggcctactgctcaaaagactaccaccgcctgttctctccacgctgtgcctactgtgctgctcccatcacagatgtaagtaaagccccaccctgacagctttcatgcactgtctgaccgtgtatgcagagccctgggcatgctttacaactctaaagtcttctaatacctctctgtgtttcctgttctcagaaagtgctgacagcaatgaacaagacatggcacccagagcacttcttctgctctcactgtggagaggtatttggtgcagaaggtaggagagggctacagccaagtgcaagggagggagatgggaaggcctacagcactattccttggggactgctgtctgctgagttttggttctcagcactgtcacaagtccatttcacacctagatgccatctctgtatctttctccaacattactaagttttatttatattgatttttttaaattaaagaagtgaaaattcatcatttaaaaacagactgtgacttcattagataacttggtaggtgaagcatttgctgcaccaatatgaagaaggcctgagtctaaatccctaggacatgcttaggagctaggcctggagcacacgcctgtgacagcaggtgttcaccagggatgtgagggctggagaatccctggaagcctgaaggccagccagcctcatgcacactctgcaaccaagagagtgtctcaagcatggaaagagaggactgccacccaaggttgtcatgacccatatacatgtacactgtactcacacaaacatgcacccaccccatcccccacacaatgtgtccatatcacttaaatacatgaaaccattgtttccccttggagtcagcatttgagtttctttcctttagcttagttttcgctatccttaccactaatttacctgatagaattgtgagatccttttcttttctatttttttctttttccaattttttattaggtattttcttcatttacatttcaaatgctatcccaaaagccccctatattccaccctccctgctcccctactcatccactcccacttcttggccatggtgttcccctgaactggggcatataaagtgtgcaagaccaaggggcctctcttcccaatgatggccgactacgctatcttctgctacatatgcagctagagacacgagctctggggtactggttagttcatattgttgttctacctatagggttgcagaccccttcagctccttgggtactttctctagctcctatattgggggcgctgtattccatccaatagctgactgtgagcatccacttctgtttgccaggcactggcatagcctcaggagagacagctatatcagggtcctttcagcaaaatcttgctggcatatgcaatagtgtctgcgtttggtggctgattatgggatggatccctgggtggggcagtctctggatggtccatccttttgtctccactccaaactttgtctctgtaactccttccatgggtgttttgttcccaattcagaggatgggcaaagtgtccacactttggtctttgttcttcttgagtttcatgtgttttgcaaattgtattttgtatcttgggtattctaagtttctgggctaatatccacttatcagtgagtacatatcatttgagttcttttgtgattaggttacctcactcaggataatgccctccaggtccaaccatttgcctaggaatttcgtaaattcattccttttaatagctgagtagtactccattgtgtaaatgtaccacattttctgtattcattcctctgttgagggacatctaggttctttccagcttctgcctattataaataaggctgctatgaacatagtggagcatgtgtccttcttattgtttagaacatcttctggatatatgcccaggagaggtattgctggatcctcctgtattactatgtccaattttctgaagagccgccacactgatttccagagtggttgtacaagcttgcaatcccaccaacaatggaggagtgttcctctttctccacatcctcgccagcatctgctgtcacctgaatttctgatcttcgccattctgactggtgtgaggtggagtctcaaggttgttttgatttgcatttccctgataattaaggatgttgaacattttttcaggtgcttctctgccattcggtattcctcaggtgagaattctttgttcagttctgagccccattttttaatggggttatttgattttctgaagtccaccttcttgagttctttatatatgttggatattagtcccctatctgatttaggataggtaaagatcctttcccaatctgttggtggtctttttgtcttattgacggtgtcttttgccttgcagaaactttggagtttcattaggtcccatttgacaattctcaatcttacagcacaagccattgctgttctgttcaggaatttttcccctgtgcccatatcttcaaggcttttccccactttctcctctataagtttcagtgtctctggttttatggaggtctttgatccacttagacttgaccttagtacaaggagataagaatggatcagttcaaattcttgtacatgataatcgccagttgtgccagcaccatttgttgaaagtgttgttcccccccccccccactggattgttttagctcccttgtcaaagatcaagtgaccataggtgtgtgggttcattctaggtcttcaattctattccatcggtctacctatctgtcatgataccagtaccatgcagtttttatcacaattgctctgtagcacagctttagctcaggcctggtgattccaccagaggttcttttatccttgagaagagtttttgctatcctaggttttttgttattccagatgaatttgcagattgccctttctaattcgttgaagaattgagttggaattttgatggggattgcattgaatttgaggattgcttttggcaagatagccatttttacaatgttgatcctgccaatccatgagcatgggagatctttccatcttctgagatcttctttgatttcttgtgagatccttttcaaaacatagctgtatctgataatatatctggttcattttattttatcagtgatctggcaagagaggccaaccctcctgctccaacctgaaatgctttctgtcttcctgctaagcagcaggcattctggtccttctttccaaattatccctggaacccccgttgctacctttctttttagatcctgtgtgttctctgctaactccatacatgtacaatgtgtgacctgacccctataacctataacctccctcttcaacctctcttctgcctcactttacccccttccttctgacaaggacccttttcactctgatgactttttgttgttgatttgggagaattttttagttttttggtgtttgtttgtttgctggttggtttgatttttgacgcactgagtttaagcaggtgtgggagcttggtcaaggtcagggtcagggtcacggtcagggtcaagggcgccattatttgccagactttcttaattgcattttcccctgcctgtggagaacttgacttagttcataggtgtgctagagtaccccgagtctctactaaattctttcaagtaatccctgtgttttgtgacaggatggggcatctgattgtccaatgacttttgagactttgaaccaatcttgtcctgaactttgcatcagttcctagagtgctcatgctgaggacccaactgttgaatgggtgggtgttcctttcagttttagctctgtcatgttagaggccactcctgcaatttatgtaacaacgaacaaaactcttactgatattttatactgacatcccctcccatcttttttctgactcatttataatttagatgattccttacatgtttttatcctccactgcccttaagctgctgtttaagggaattatgtaaataaataacagggactgtttgcattaagactgaattcctcttccacagttgaaaggttttcactaagattttgttctcattttttataatgtccacatttttgttgcatttttgttctgtgtgtgaatttgagcatgctatgatgcacatgttgaggtcagaagacaacaagtgtgagttagtctttgctgctacgtgggccccagcgattgaacataggtcctcattgaccctgagccatctcaccagccctgttttatcttttctatgtgaccttctttcagctgcttgtaaagatttttttcctgaattgccttgaccccccctccccttttcttttgttttgtttttggagcagagtgccacatagctcaggctggcttcagacttatcatgtctgaagttgatgactcctggtcctctcccctatgcctcccaagtatacaaatgcatatagatgctggagggcaaccttaggcatgattaggtaccgcagctgccttgtttttttgtttgtgtttgttttttcgttttgtttgtttgtgttttagaggtaaggtctgaaagcttgccaggtagaattgtctgcttgtctattaagccccaagataacacttgtctctgcttcacaggtctgagattacaaatgtgtgtgtctcagtgtcaccgtggctgctttgtttctctgtttgtttgtttggtggtctgggtatctgagttcattgtcttgtgtttacaaggcaaacactttattgaccaaggcatctgccctaaactctaactagatacacttctgctaacagattttaactgctctttgactaacactcaattcttctcctgttactagaacatgttactttcttaggaacaatttgttatactttaccagacaatagagcccgataaagtagcactgacataatgtattaacgaagttctttatagtgatttgcctgttcattggagcttgttcaatgtacttaataaatcagtatgtctttcacttctatattctactttaattaagcaacatttttactgagataatctaaatcatactaaaatgtgtcatattttcatgtataagtagaaatagaaatatgagaataaaatagaattaattaataagtatacattaaatgtatattggctgttgcagaatgctttcctctaaccataacagccatcattttcatctgagcagggatgactaacttgcttgagacactaattgagcttgttgattgttgatatttcttcatagaaggaggggctaaggaggatcacttcctggccagctgaatgtgattctgatctagggttacatggtctcatgttctcaggaggtgctagaaaatacagtgtgtaaggttagtagaagagggaattccatctctgcagctatagggaagttgttatccatgttcagggagactttctggtgatgtggctactccagggttaatcacactatataaacccaataaactcagaaattccctaagctagatttgtactttggtttctcattgatgacctttaaggagaggttgaacagcactgtccattggtattgatgatgtagaaattgcctggaaacaagtaaaggcacatttgaagcatagccatacttatgtacaaaagaaaaatgcccagcctttaggatgactgcaaaacatatctagtttaattgttcttgagttgggctcctcataacctgacaaagttgattaggtcattatgatttgaaataagtatgaaactacactgaaaatatttattaatgaaggcacctggcaaagggactatttactagttagaagctcctttttgggttatagtttattctttttcctggctttcttgtaaatgggtctcctgccatatggtcagtccattaattagacggcatcctgacttttagtccaagctacatagtcacatacagagcatcaataataacagtttaactatggagcctcctgggaaattaagttcatccacgttttcccttagttcagagaatccctctttaagactaaagtttctaaaagcattggtccttagcatccttcctaggggactatgtcctcagtgcctacatctttctttttaattgttcattatccaggccatgcaggtgctctctaatttcccccttggctaagagtcacactagagtgaaaccaccctcctctctctgtggtacttttaattgtcaatgtctctcattcattcttttgaggtaattagacccagagagagccttagggacagtaatgctgaaactttcccaatttattgggttactaagtgtggcaacagtatagcaagtttggtgggttgctttgattctcctcctgagacttatccaagttgaaatggaggctcttactcccctactgtctcactctggagaccaactgccctgaagatttctaaatggaggtcatacctaggttaggtgcatcgtcttgcagctttcttaagaaataccaatttatatcacttgggggcatgttaaaaatgcaaaatcttcagtactatcacagaaacactgaataaaaaaaactaggcacgggttggggggagcggggaggatctagcaatctgcattttaataagtttttaggtgagtgaagcatgctgaaagttaaaaaaaagaaagctgtgctatacaaaagcaaggaagatgacttcctttttcctaagtagtgagtggtttgacattcagtttcccttaaacaaactctaaatatcttttcaatgagtcagaaaagaaagagagataaaagtaaattgctctttctgagtctgcagggttcagaggaataacacaggacaggtatgaaatgagttgtttggagtcctaggtccataggtcttgcaatttttgcaactcacccatttctgaaaagaaagcttaattgagtgaagcgagctgcattcagcagtgacaagaactaagagcaaaaccagcagctatgtgatttagatcatacccctaacatgctattaaagttttctgatctggctattatgatcacaggacatttctagaatgtttagtgagtaggcagcttaagcaattcactaaacacaccttgttgcattccactaggctgtcgaggcatagagtgtgttctcatgttacacagttttggttaggatatccacacttagttgaccttcagttcccacagagagaccacatttaggatgcatttaagtcagggtgtgtgaattttatctcctccattgactagttggttaagaataacttatcaaagataattactctttagtattattttattataaatatggggagaggtaatggtatctagttgagttagggaaagcagactataatgacttaagataaacacttaagtattataaagataatgaagacagacgaattgacaaaaaaggtcagggtcaatgcctctgagaagatgaccatttgagttgagtcacagttgtatcaatgtcaggaacagtacttctggccaagggaacactttgtatcatggaattaaggagaaatagccctgatactgagactgcaacccagaatcaatgctgaaaagacacctgacttatttccgttttgaacatgggcacactgaagttgtgagaggttataacagtgaccttatatttgcttctaatgtagctttaaagaactcagactacagctttgattttatcttttcaggctttcatgagaaggacaagaagccatactgccgaaaggatttcttagccatgttctcacccaaatgtggtggctgcaaccgcccagtgctggaaaactacctttcagccatgaacactgtctggcacccagagtgctttgtgtgtggggtttgtatgctcaattaccttcagttttagggaaaattgaagagttttgtttcctaagaggattagtttctacttagtgagatggtttctagtctaaggagaggaatctgtgtttccttggtagtaattttttctaaagaaaaagtagcacacagaaccaattgtgggcctttgcaggtctctttgaaaaaatgggtaatctagcctttgtttgtcaaggacctgagcaaaatcatacaactggcaggaattttgaagacaaacattttatttggtggcattatcacttgacatgcatttccttcgtctgtgttcactccacccgcaggactgcttcagtagtttttcttctggctccttctttgaactggatggccgtcctttctgtgaactccattaccatcaccgccgagggaccctctgccatgactgtgggcagcccatcactggccgttgcatcagtgccatgggacataaatttcatcctgagcacttcgtgtgtgctttctgcctgacacagctgccgaaaggcatcttcaaggagcagaacaacaagacctactgtgaaaaatgcttcactaagctcttttcacagtagttctcctttgactcacatctgcttcatgttgcctataaaactgaggccaagataggaaagagcatagattctgtccccagccttctgttcagtgggctaatggagtacaaacgggcctttgtagatgttactaggcatataccttcattttgaagatgcttctcattactttttaattatatatttagatttagatcatgctatcaagagcctctgaaggtatatttcttatgtgcacagttctttccactgctggttttctctttctcacctttgacctctgctgatgctccgttcaaatcttcagatgtgggccacagggttttactctctctttgctgtcaggggtcacgcaatagtcttaaacccttagtgtctctgcattttgctttttaagcggaagtgtatttttactgacacatgtgatgaataaagcagcttgtggttttggtgactcactgtcatgttcatgtggtagataaatgttctgctcccacgttagagaagagcagccactacttgcagctgcagtgtaatctgtctcttctttccttgcatatagcagatactgccctcccccaatcagcagacactaacagagaagacccattgcttataactcttcctgttagtctgagtctttagccattttatttttcagaggtaaatctttggatcattagaagctagcaaggcttttagaatttgttttcatcattttctttatggaaaaaggtctggctgtacattaaataccttacaaatgcattttaaaagtaaagaatgaaggatgtgtctccttcaaactcaaaactgcctcatggagagaaatgaccaaaatctgtgcacagcttctttgaggaaagatgttagaaaagatgaagtgatggtcatttagtttggacagggaagccaagtcacaaacacttgttctttcaaaatacattaatttatagaaaactttacacgttactgaagactttgactgtcttatatcctattggtttgtttatgaagtaggctgtacatagagcataagtaaggcactcattgggcaggcatggacatactttattttctttctacaatcttaaaaataatcacatgtttatttttatatagcaaaaaagagacttttacaatcctagattccgagtttaaaggcaaaaaccccttcactggaaggtgatcctttaaaataggactgatgcattatttttagattggcatgagaatagtacttcttagagaattagaatggatgaagtgattcttggaaaagaattctttgataggatgaacaaaagtggagttttgagagttaaaaagaagtagcgaccgttaacgctaagaaatagggacatccctgggaggccacagagatatggagccatctgtctgtctgtcttggttggctggcgagcatagcacaaaaagcatatgcactttcagcttctctgtgccctcttcactctgtctttactgaggacatcactgcgggcttcacagccactttggcaggttgacaaagtaaacttaaggttttagtgcaaaagatggaatgttcaggtactgaatttttttgttttgcttttgtttgaagaattgactgttttgacattcttttacaatctaaacacttaaaaatagtgagagaaatgccagggcttacaagcattcaatttagaatgaaaacattttcctcttgtcgttatgtttgctccagaagagatgatgccttgagacccagtcttttaacaggaaaaccacccttaagtacatattcttaagaacccccatccataccacaagcacattacttacactgatcacctacctccttttcttggttctaagtaactcctgggtatttgaaaaacacaaaaccctcctcttaggcatgacttttccatccacggcagacatcacagacacagatctccgctggtgagggagggttccagcctggtctcctattctgtgaaataaatattgagctctccagggtgatgctttgacaaacacatttgcttttccatgcaagtttggtcatgtgctcctttcatgtggtgtgatggctaccacacatgtgttcctttgtttatgaactctaaggaaaggaaaagtgctttttattttctagattttataaacaaaactccagtgggtcctcatgactagaccagcataggccacattcctattaatgaatgtgaatgtgtctatattgctgggggactggattgtgcagtttggcataagacatactggagtaattctcagaatagaggccagatggatgaaaagtcctaaaaccacaaggactctgtgagggtaatgaggattgttaggaaactttgctacctaaggtcacaatctgcttttcctcgtagctcctctaaggtccttgaaaaatgaagaactcccttttcaagtaggcctcccacttctctgaccttgtctgtgaagcctgaccccccagtcttctacctaagaaaggtcatgtggtccttagcaatcatacaagttcaactttgtctttcccaataagaatccacccagtaagaccctagtattcctggtatataaatgaggcattcacccaagaaaaagcaagaaactaatctttcaacaaaccccaaagaagatagacaagcaaatgtaattccacctttaacaacaaaaataacagaaagcaactacttctggtacttaatatctcttagcatcaatggacttaataccccaataaaaagacatagactaacagactggatacataaacaggacccagaattttgctgcatacaggaaatgcacctcagtgacaaagacagacactgccacagagtaaaaggctcaaaaaaatgtttccaagcaaatggtcctaagaagcaagctgggaagttctagcctgagcaattagacaagaaaannnnnnnnnnnnnnnnnnnntcaaggcccatacctaaacataataaaagcaatctacagcaaaccagtagccaacatcaaagtaaatggagagaagctggaggcaatcccactaaaatcagggactagacaaggttgcccactttctccctaccttttcaacatagtacttgaagtattagccagagcaattcgacaacaaaaggagatcaaggggatacaaattggaaaagaggaagtcaaaatatcactttttgcagatgatatgatagtatatataagtgaccctaaaaattccaccagagaactcctaaacctgataaacagctttggtgaagtagctggatataaaattaactcagacaagtcaatggcctttctctacacaaagaataaacaggctgagaaagaaattagggaaacaacacccttctcaatagtcacaaataatataaaatatctcggcgtgactctaactaaggaagtaaaagatctgtatgataaaaacttcaagtctctgaagaaagaaattaaagaagatctcagaagatggaaagatctcccatgctcatggattggcaggatcaacattgtaaaaatggctatcttgccaaaagcaatctacagattcaatgcaatccccatcaaaattccaactcaattcttcaacgaattagaaggagcaatttgcaaattcatctggaataacaaaaaacctaggatagcaaaaactcttctcaaggataaaagaactcccttttcaagtaggcctcccacttctctgaccttgtctgtgaagcctgaccccccaatcttctacctaagaaaggtcatgtggtccttagcaatcatacaagttcaactttgtctttcccaataagaatccacccagtaagaccctagtattcctggtatataaatgaggcattcacccaagaaaaagcaagaaactaatctttcaacaaaccccaaagaagatagacaagcaaatgtaattccacctttaacaacaaaaataacagaaagcaactacttctggtacttaatatctcttagcatcaatggacttaataccccaataaaaagacatagactaacagactggatacataaacaggacccagaattttgctgcatacaggaaatgcacctcagtgacaaagacagacactgccacagagtaaaaggctcaaaaaaaatgtttccaagcaaatggtcctaagaagcaagctggaagttctagcctgagcaattagacaagaaaaggaggtcagaagtggatgctcacaatcatccatannnnnnnnnnnnnnnnnnnngcctcccacttctctgaccttgtctgtgaagcctgaccccccagtcttctacctaagaaaggtcatgtggtccttagcaatcatacaagttcaactttgtctttcccaataagaatccacccagtaagaccctagtattcctggtatataaatgaggcattcacccaagaaaaagcaagaaactaatctttcaacaaaccccaaagaagatagacaagcaaatgtaattccacctttaacaacaaaaataacagaaagcaactacttctggtacttaatatctcttagcatcaatggacttaataccccaataaaaagacatagactaacagactggatacataaacaggacccagaattttgctgcatacaggaaatgcacctcagtgacaaagacagacactgccacagagtaaaaggctcaaaaaaatgtttccaagcaaatggtcctaagaagcaagctggaagttctagcctgagcaattagacaagaaaaggaggtcagaagtggatgctcacaatcatccataggatggagcacaaggtccccaatgaaggagctggagaaagtacccaaggagctgaaggggtctgaagccccataggaggaacaacaatatgaactaaccagcacccccagagctccttggaactaaatcaccaatcaaagagaaactatggtgggacatgtggctatagctgtatagcagaggatggcctactctgtcatcaatgggaggaggggccctaggtcctgtgaaggttctatgccccagtatagggtaatggcaggactgggaatgggagtgggtgggttggggaacagggggaggggcagaggggataggggattttcagatgggaaactaggaaaggggataacatttgaaatgtaaataaaatatctaataaaaagaaaagaaaaggaggtcaaagggatacaaattggaaaggaagaagtcataatataactatttgcagatgatatgttaatatacttaagagaccccaaaaattccaccagagaactcttagctgataagcaacttcagcaaaatggctagatataaacttaactcaaacaaatcagtagcattcctatattcaagaaataaacaggctgagaaaaaaattagggaagcaacactcttcacgatagttacaaataatataaaataccttggtgtgaccctaaccaagcaagtgaaagatcggaatgacaagaacttcaagtctctgaagaaagaaatcgaagaagatctcagaagatggaaaaatctcccatgctcatggattggcaggattaatataataaaaaaggccatcttgccaaaagcaatctacagattcaatgcaatccctatcaaaattctaactcannnnnnnnnnnnnnnnnnnnagtgggtgggttggggaacagggggaggggcagaggggataggggattttcagatgggaaactaggaaaggggataacatttgaaatgtaaataaaatatctaataaaaagaaaagaaaaggaggtcaaagggatacaaattggaaaggaagaagtcataatataactatttgcagatgatatgttaatatacttaagagaccccaaaaattccaccagagaactcttagctgataagcaacttcagcaaaatggctagatataaacttaactcaaacaaatcagtagcattcctatattcaagaaataaacaggctgagaaaaaaattagggaagcaacactcttcacgatagttacaaataatataaaataccttggtgtgaccctaaccaagcaagtgaaagatcggaatgacaagaacttcaagtctctgaagaaagaaatcgaagaagatctcagaagacggaaaaatctcccatgctcatggattggcaggattaatataataaaaaaggccatcttgccaaaagcaatctacagattcaatgcaatccctatcaaaattctaactcaattcttcacagagatctagcaattctcaaattcatttgcaacaacacaacaacaacaacaacaacaacaacaacaacaacaaccaccaccaccccaggatagcaaaaactattatgaacattaaaagaacttctgggggaataaccatccctgacctcaagctgtactacagagcaatagtgataaaaactgcatggtattggtacagagacaggcaggtagattaacgggatagaattgaagacctggaaatgaacccacaaacctgtggtcacttgatttttgacaaagaggctaaaaccatccagtggaaaaaagcattttcaacaaatggtgctggcataactggcggttatcatgtagaagaatgcaaattgatccattcttatctccttgtactaaggtcaagtctaagtgaatcaaggaactccacataaaaccagatccattgaatctattagaagagaaactgggaaagagccttgaacacattggcacaggggaaagtttcctgaacagaacaccaacagcctggggagaccaggaagggaggtaacatttgaaaagtaaataaataaaataaccaacattaaattaaaaagagaagcatcacagcctattcaagcataaagacctgaattccatccccagaactcacataaaaatccaggtatgctgatgtacacttgtaatcccaatgttgggaaagagctatggtcagtgaattcctatggctcaaatgatagccaacataactcaattgatgcaagaccaccttaaaggcacataaatacaacctgcacatacataaactgcttcccccaccatccacacaatagaaacacaaatcagctttattttaggaatgtggaaaaaaccctcccagataaagacaagaaaattgcatagtatactcaaggctctggtgtcaacccctacaactgaaaaaaaaaaaacctacaaaaaacagcaaacaaaaactccacatatttaaagatgatgagtgacttcttttggagatgagttacaagcaggtattcagtaagactaatagcagaactcactaaaatacaagactgggaaagctgccaagcccctaggacactaaaagttgatactagagagaacttgccatcagcacagtagctattggttctaatcattgtgggttgttataaatgaccctttcacagaggaaacctcagaccattagaaaacacaaatacttacattactattcataacagttgcaaaattacagctgtggagtaccaccaaaaatcattttatggttgaagatcaccacatcatgaggagctgtattgaagctatattaatgcctaaagagccattaggaaggttaagatggccttgggcttagcttaaaggaagctgggaatgctatagagacccacagaaatgataggcaggagaagcagtgcttgagttgtgcttttcacacaacttatttctggagggcagcaaacactcaaagctcttttgtaagaaatgcgaagtttgtgtgggaggttttctgctctgtctagaataagcatatagtacccaaatcagtatcttctgagatgacagctccttcatttaggattctgggacactgcatagattttttttttttttttttttgcatcttgaagtaaatccttcctctccttgacaccactgaacattaacagatgttgtattacagaattaatattgttacttgggataactacccaattctagtgaggtttcagatgggtgctgaataactattgataacagcatacagaccaaaaactctaagaggacattgatttttaaaaactaactcagaggggaatttgattttagactataatgcttttggacttcggagcattgtgctgagtaaagaggaatggatgtaattgagggtcgtgatgggaaattgagtggaagtaagttttctttctttgtttttaagctttccttaactcaattctcaagtttagattacacataaagaaattgcataccccacttttagttcatgtaatttagagagggctgaatttaccttccactcttggaatggaccagtcccaggtctgaccagtgtaacattagttatttttctttgctgtgatcaaacttctgacaagaagcaattaaatggaagcagaccctacttaggttcatagagtgagagtacagtccattctaaaggtgaaggcatagcagctggaaaagaaagtttcttgctcatatctgggttgatgaggcctgggaaaaagcaatgaaggttctcagatagttttcatcattgacttttacttcaatctaagactctagctctgtattattattattattactattactactactaattactattattgctaatatccacttattggtgagtacataccatgcatggccttttgggtctgagttacctcactcaggatattttctagttccatccatttttctgcaaaacacaggatgtccttgttctttatagctgagtagtattccattgtgtaaacgaacccacattttctgtatccattcttctgttgagggacatctaggttgttttcaagttctggctgtcacaaataaggcctctatgaacatagtggaacatgtgctcctgttacatggtggggcatctttttggtatattcccaagagtggtatagctgggtcttcaggtagatctatttccaattttctgaggaacatccagattgatttccagaatggttgcaccagtttgcaatcccaccattcctctttctccacatcttctccaacatgtgttgtcagctgaggttttgatcttagacttgattggtataaggtggaatctcagggtcattttgatttgcatttctctgatcactaaggactttgaacatttcttcaggtgcttctcagccatttgagattccttagttgtgaaatggcagtttatttctataccccattttttgattgggttgttggttttttttggtgattaacttcttgagttctttatatactttggatattagccctctattggatgtgggattagtgaagattttttttctcaatctgtaggttgccgatttgtcttattgactatgtcctttgccttacagaggtcccatttatcaatttttgatcttagagcatgagccattggaattctttttaggaaatttccccctatgccaatgagtttgaggttctttcccactttgtcttctattagattcagtatatctggttttatgttgaggtccttgattcacttggacttaagctttgtacaaggcgacaaatatggactatttttattcttctacatacagacagccagtgaaatgtccaagtgaggacacctcagtctcacttggaaaatagaagaaaggaatcacaagtgcagaggaaggagggacctgggagggatgggagtggatgaggtggtagggagagttgggggagaggggaacctgatctggtattgggtgagggaaaaagactgaagttctgaggtccagcagaaagaatgtaaacaggaaacctcaggatataggaggtttgcaggaaacccccagaatgcaccagagacctgggagatgagagactctcaggactcaaagagtcctgatgaaatgccctacagtagaaagagggaacttagagagcccacctccagcaggaagacaggacatcaagtgaggggtggggttgtcatgccacagtcacacctctgacccataattggtcctgtctgatagaattacaggggtggaaatggagataagcctgaagaaaagaaggtccagcgacaggcccaaagtgggatccagctcaaggggaggtcccaaggtctgacactattactgaggctatgcagtgctcacaaaaagggacctactatgactgccctccaaaagacctaacaagcaactgaaagagtcagatgcagatatttgcacccaaccagtggacagaagcatctgacccctgtgggaaggctgaaagaagctgaggaaaaggatgaccctgtaggagaaccagcagtcttaattaatctggacccccgagatctttcaaacactggaccaaacaggcagagggcaccagcagatatgaagcctcccctcccccccgacacatacagtaaaggacttttgggtctgtgttcattcagagatgatgcatctaaccctcaaaagactggagatcccagggagtttagatgtcaggtggaggggg

SEQ ID NO: 746 - DNA, 1712 bp, Mus musculus
tggtcctcttcttcaccacatgccaacaaagttcttcacaatcttcgagactagagcatcgcaggtataggacaatggaagagctggatgccttattggaggaattggaacgctgcacctttcaggacagtgaggaatattcaaatccagtttcttgtcacctggatcagcaatccacagaggagagcaagattccccaaactccaaagaccttgtcatcgcagggtaacacaagtcccttgaaggtgcagctcgtgtatgcaaccaatatccaggagcccaatgtctacagtgaggtccaagagccaaaggaatcagtcctgcctcccaaaacctcagcagctgctcagttggatgagctcatggcccacctgagtgaaatgcaggccaaggtttcagtgaaagcagacaccagcaggaaacccttgccagaccagcaggatcacaaggcatctctggactcaatgctgggggacttggaacaggaactacaagatcttgggattgccacagtccccaagggctactgtgcttcctgccagaagccaattgctgggaaggtgatccatgctctggggcaatcctggcacccagagcactttgtctgcactcactgcaaggaggagctcggctccagtcccttctttgagcggagtggcctggcctactgctcaaaagactaccaccgcctgttctctccacgctgtgcctactgtgctgctcccatcacagataaagtgctgacagcaatgaacaagacatggcacccagagcacttcttctgctctcactgtggagaggtatttggtgcagaaggctttcatgagaaggacaagaagccatactgccgaaaggatttcttagccatgttctcacccaaatgtggtggctgcaaccgcccagtgctggaaaactacctttcagccatgaacactgtctggcacccagagtgctttgactgcttcagtagtttttcttctggctccttctttgaactggatggccgtcctttctgtgaactccattaccatcaccgccgagggaccctctgccatgactgtgggcagcccatcactggccgttgcatcagtgccatgggacataaatttcatcctgagcacttcgtgtgtgctttctgcctgacacagctgccgaaaggcatcttcaaggagcagaacaacaagacctactgtgaaaaatgcttcactaagctcttttcacagtagttctcctttgactcacatctgcttcatgttgcctataaaactgaggccaagataggaaagagcatagattctgtccccagccttctgttcagtgggctaatggagtacaaacgggcctttgtagatgttactaggcatataccttcattttgaagatgcttctcattactttttaattatatatttagatttagatcatgctatcaagagcctctgaaggtatatttcttatgtgcacagttctttccactgctggttttctctttctcacctttgacctctgctgatgctccgttcaaatcttcagatgtgggccacagggttttactctctctttgctgtcaggggtcacgcaatagtcttaaacccttagtgtctctgcattttgctttttaagcggaagtgtatttttactgacacatgtgatgaataaagcagcttgtggttttggtgactcactgtcatgttcatgtggtagataaatgt

SEQ ID NO: 747 - protein, 383 aa, Mus musculus
MEELDALLEELERCTFQDSEEYSNPVSCHLDQQSTEESKIPQTPKTLSSQGNTSPLKVQLVYATNIQEPNVYSEVQEPKESVLPPKTSAAAQLDELMAHLSEMQAKVSVKADTSRKPLPDQQDHKASLDSMLGDLEQELQDLGIATVPKGYCASCQKPIAGKVIHALGQSWHPEHFVCTHCKEELGSSPFFERSGLAYCSKDYHRLFSPRCAYCAAPITDKVLTAMNKTWHPEHFFCSHCGEVFGAEGFHEKDKKPYCRKDFLAMFSPKCGGCNRPVLENYLSAMNTVWHPECFDCFSSFSSGSFFELDGRPFCELHYHHRRGTLCHDCGQPITGRCISAMGHKFHPEHFVCAFCLTQLPKGIFKEQNNKTYCEKCFTKLFSQ

SEQ ID NO: 748 - DNA, 71308 bp, Homo sapiens
ttgagatccagagttttatacaatcaaattttcaagcatgcagtatttccaagtatgttttctgtaaactccagttttacgaaatgctctttaaaaagggggtcttataagtcaaataggttaggtaatcgctgcaaaattttggtatttacactgcacattactcaaaaatcaaagtttctgagaagttctgcaataaataacctatctaacattaataactgaagcactgcccacatctacttgattctacagtatttattatcattccattaaacatttaaaacatactttaataaacattaaggtattctggtctccatttttatgttttatcttgagaggcagttttaactattattcctcactaaggacataacagatgggagaaaaaaaaattaggcttcataacatgtctagtcagaggttagaaagtgaaataagttaaaatgaacactgggataactaaaaattacgtgtaggtagactattcttttactttataatcaaagtacaacactggttcaaaacagagaaacaatgaaaacataaagccaagttaaaaaggaactagatctccatcccttaagatttctactaacactcttggaaactccacaatcatgaagataatcctctgccagtggtaaactaagctttcaagtttgaagtaatttttcctttttaacttttgtgtggaatgttccttgtccaaattaactatctgcatattcaggtgtaatctcaaatgtcacctccaccaaaaggtcttcccttatcatttcatctaaacttagctttctcagctccaacttcatcaaacattattacactgttttgacttcttcatttatttgattaccagtagaatccagtgcctagaatagcgccagacacatagtggatgctcaacaattacctgttgaatgaattaacactattttagcatagtagctttccatttgttttatacaccaatcacggttaaaaaagggtagcaaaaacaggaactaatactcatgtttattatttcagtttgaaaaaaatgaatgtagcactttgcaacttaactttttttttaagttgcaactttgcaacttaatttgcagctttgcaaattaatggaaagttgcctactctgtgtgtgcaatattgtttatgtgtatgtcaaaggttcttctcttcaactcaaagaaggcatacaatttctagatggtttgagtaaataagagtaaaaacaatcctgaagatatcttttcagcattaatataacagaaggccagtcttacctctaaaaaataaaacctgtttaaagttttgaaaaacccttaacttctgaaatgaacatgagttatttcagttaaaatttagcagactgaacatgaggactattccagagtaccagaataactgagaagttaaatgaccagaagaaaagtaattaaggtgaattctaaatacgaaacacaacaggaaaaagtgactacccgagcctccatttctttattcattcatcttgtatgaatgttacagttcttatatacctatctactgttcatagagttgaacagctaccttaatgggtaaactaacagagatgaagattggcatttgagaatatctagatccagggcctttaaacagtaaagtgggattgatcttcggatcaaattatccagaatgtagttttaatctctccacagctgcacaaccacaaaacatgccaataagtcaacttctagtttaaaacatttacacacgaggcaggcggatcacttgaggccaggagctcgaatccagcctggctaaaccctgtctttactcaacaaacaaaaaaaagacgtctacccaaaggtcatctacttttctctccaaaaggggctccaaatttccacctttcttcaagttcgcctcaaggcaacccatagtgatttctttggacacgtaaggtaatttcagctctgacaaaagcaggttgctttttgttttaatcagaatgctctagacttgttacctgtctctatattttctccacatcataaaatctccaaattgatctctgaataagaaatgtgagaccttccatttttggcagacataacctattttctaagtaacaacaacaggaacaaaaaacttgctagacaaaataatcatgccaaggtttctaaataaaaaaaaaaaaatgccaggtatgaaaaacctctgcctgctatactatgaaatattagactcacattccaaaattcagagaaataagaaaccttagcattgaaacctaattatttacaaagcagccaccaccaatgcaagttattggttcttaaattacactatcattcttccatatggcacaaaatccaggctttaaacttgccttatacgttctcgaagaattatttatcaagaacagaaaaaccttaagattctcatgtacatgtaatacatacactgatatataaaatgcatatacatatattcttttatagaaatagtagcaggctataagcagaccttaaaagctatggatactaggtggattctaggagtttggaaactggctgtgtcaagcctgggtcaaggtcacacgtaataaaagaaatgtgcctaaaagtatatttgttcagttttaaggaggatgctgtgtgtttgaatttaacatcaaggaacacagccaaaaactagaaaaaaacaaaaatgaaacgaataagcaactggtccaacacgttagggcaattttaataacctaatctgcaaagccagaataaagtattttaaaagttattgaaaaagtgaacattagcttcctgtcataatccaggaaaacagaaaactataatacatacatctggtgtgctaacactcaaacttaaaggaaaatgacctaatattgacctaatttaattattcaccaggctgaattcttagaacactcagcattcttcaccctgtaattttaatctgtatttctactagcataaaaatttttgccttcactttactctgtatactgtgtatcattccagtctgttacctcatttaaaaataaaaggcttaaaaaagttactataaattaccatcaaacaatctgatttgcctttattaggtttctaaataatgccaatatactctattatccaaacgtgctgtcgtctaaatattttctaactccagtaattttttaccaaataaaaattccttttaaatgggaaccaatttgaatgatgaggctttctaacagattaaaagataatcagtgtaatgtacgctagaggtaaggatgaccaagtcttacctttatcagttgttactttttctatgcatctgaaagaaataagaatcaaacattaatgaacaatctagcacattttctgaaaatataaatatctctttcaggttcacctccagagtgataaagaaagcatctagactagtgttgtcctacagaattttcagcagtgatggaaacatatctgcactgtccaatatggcagtcacatgtggctactgagcacttgaaacagttcatgtaattgtgaaactgaatttttaattttgattaatgtaaatttaaatagccacatgtggctacataactgacagcacagagctagaatatcattcaaaacacctatttttaactaagatattgatacaaagaaaatattactaattttgttacattaagtgattatataagaaaatgttcttattttatataaatgtactaactagagatgaaatgatgtttgggatgtgctccaaaatacttctgccaaaacagggaggatggacatagcaagcatggcaaaatctcagctaggtgatcaatactggggtttcattatactattttccctattttgtgtatatttaacaattttcataataaaaactcaatgaagtgttaaaaagaccctaaaattgtttgttaagaccaaatcaaaatctacttgtaaaaagacaataggtggacctcacaagtaaatgtaacttgccctttacaaattaaaaagcaacagtaaagagcttaaaaattgttatagcctgaagatttttttaaaaacccccaaaacaacaaaaatcagacatatccccaggtttttcattcagaaaaatttctctcatacgtaactggtgaggacagtataatgaacttcctatacttactactaaaattcaaaagtcaacaggccctgaacatttatcatatagataccacagagtatctctgaacagtacaaagtttttttgttgttgctcctcccaaaagtaaacctaatatagtaaagactctattatgttacaatatgttataaataaatacccagacaaatacagaagccacagtgtaatacaaaaatctattctacttagaaacaatagttatcactgtttgttccatacttttttaaaaaagactggtattataattttattttaaatcacattaccaatgtcccaattaacacaccataactgctaatcatcccatctttaaataaaaactgcagaaataattgctaaatttttgaaaaattatataacaaacttttccaaaaaccttgaaagttggttcaatgtttctatcatcatactgattaagatcctgatcacaggatttcagtcttgtacaactgaaggcttctccaaagaactgtaagttttttcaattcagaatattaccacctcttcatcctcactatccatgaccttcaaaagggaaacagcaagaaaggtcacctaaaggtttattactgttttaattttagcaagaaaatataccaaaaatggaatttcacatactagaaaataaaactactttccttaatctgaacctgaaggaagacatctaaaaatactcagtattagctaatatggttactcaacagcgaagttagaatttttaaaaagtatttgtccctaaagttttaagttttgaaatgcacaggataaatgaagggctattacatgtaagaatgaaaaaaagccttatacattttaacctagtcttaatttgacaatttcattccctactagcagaacgcatggatgaatcagaaaaaaatcataggcaaaaactagtatactaatgctactagattttacttcaaaaattaaagacagtatataaacgtgcacttgaaataactgtaatttactggctaacatacagcaaatgatcagtcttactcttagtatggatacataaactttcttcaaatttggtttatttttcctactagctttctatgcttcaatttatcatgattctagcatttaactctgtgcttctcttgagcacaatgaaaaatttttatttccccttcatccacaaatatttcctcttcccaataacccctaaatagttcattgtgaaaagaagttgttataaacatcagattataaaaactgtaagctaaatatgtcatctcgcaaattcataaaatatcaattataaatgaagcaattataaatgaagaggttaagtgacttgctcaaggccacttactgcacagtacaaagctggaacataaaactttctgactaaagtccaatgctttatccactctattattttgccttccaatgggaacagaggtttcaaccaatccaaatctatctatttcttgaccttttaaactatggtatactttactatcactttaattaagaaaatcaaatgtaggttaaacagctgattactaagattgtatacagggaaatgctgggatatggaaaaaggactagcgcgaacaagtaagtaatacagaataaaccttcctttttaaaattttcaaaatgtcatttggaaaacagaaatgactcaaagtcaaagataccagaccagggtttggactcaaaacctcttgaaatatcttaaaggattaaattatgtagaaaaaattaagtcttaaaatgtattttatgactgaaaatctgtataccatacacacatttgacatatctccactaattaatgcatctttgccttacaccccaaggtccttgaagatgagggccatgtctcatttttctttctaccacctagttcagcatagtaccaggcccagatactgatgaaacaagtttgccaagctaaaatgctttagcattcctctgatttccagattatggaataaggtaaaaatgtgtaacaaaaactctattatgacgaaaatttgtttaacaacctgatcaaaaacacagtcaagagataattttggggctgaaagaagaatgccattgtcactactgttttctaatgatattggatgggaggcgggtggcgctaagaattcagccttatttcttcctccccacaaggaacattgtgcagaaaaaaggaaggaatttaattaagtcatcttcatccatatacaacagtaacagttatatggaattaaagcgtcactagtactttgttgccaagagttagggcaaaaataaatcatgacagcaggtaaaattactgttttagataaaaattatttattttccttcaaaaattaaacagcaggctgggcgcagtggctcacgcctgtaatcccagcactttgggaggctgaggcgggtggatcacctgaggtcaagagttggagaccaacccggccaatatggtgaaacctcacctctactaaaattacaaaaattagctgggattggtggcgggcgcctgtaatgccagctgcttgggatgacgaggcaggagaattgcttgaagccaggaggcggaggttgcagtgtgcagagatcatcgtggcactgctccagcctgggcaacagagcaaaaactccatctccaaaaaaagaaattaaacagcaggtaccattttagacataattatcttatcttgagatataggtatatttaattttcaaggggtaggtgagaataaaaggaaattttaaaaatattttaagtattaccctctctacgaatagtaatattaaagagtgaaaaaatcatattttgcataatttatatgaaaaacctcactacaaaccactcaaggatctaccatcccaccattactgaaaaacgcaacttgtacttagtatttacaacaggcattgtgtctagcactttacacactgtatttaattctcacaaactcacgttgcagagattatcctctataggtaaggaaactaaggcatgggtaggttaaggaatttgctcacggaattcatatccaaatgaggtcaatgatatacatgtatcttttcaaattcatgagattaaacaatatagaactataaaatttttgtaagatgaaatgcatctacagcaattagaagtctaattgcagctgaatctgtaagtacagatttttgctgtcgacagaactgcagttcttacaacaaattctctaaattatgttaacttagctgacattcaaaaatttgaaagcatatctaataccacaatatgattacctctgaattttatttctctttctgagaggcttctaaggcaagcatgccaagacacaggcttaactcttaattttggaccaagtctgtttcaagttttaaatctattaggtctggtgtaagtcaaaccttgccactatctctactggaagaaagggaacacttaaaactgactccccctcacttcaattttctctgtttttactaatctgttttcactcaaaaatcaaaggtcactaatgatgttttcagtcatgaattgaatagtcaatgtgattaatttctagaatttacaaacttgtgtgcttcagtattcttaacatgagtattattttaacgaacaatttaagacaatgctcctggccacctgttcatgtttcctctattacgtctaggtaataaaggaattcctctcagatgattctaatttcaaggatgaagttcctacatttaaaaacacgaaacacaaagataaaacatatgctacttagtaaaaacaaacattaaagaatgctcatataattttatatgaaagactccatacttaaaatcgtagcagtgggcttttaacctgaccataataagtggcaaatttctcaaaagaatgagaagggttgcgaaaaatttagaaaagtgaaaaaaaaaaaaagctacataaacacactagtacatctggctcttgagctaacgcgaaggcgggggggaatcatttttgaaggctatgatcgggctgtgtattccctaaagggcatgtgatgtaatactggagagccgcctaaaggaaagggatagggtgacaaagggggtgcggatgccagaaagagggatgagcctgcgggtgtcagggaggaggtggatcactagcgagtgcaggggtgtatcaaaagatgatttcggggagtggggaaacggcccgacaagcgaaggtacaggagcgagatgagggtggcgcagagaggaggcacgaaggctcccggggaaacggtgtgacatctggcgtgcggagccggcagggggcagaccaggcaggatgtcacgtggagtaggcgctacgggagccgagagggttgcgtacggacagaggggggtctttcccaccgcctgaaagactgttactcacaggagtcgcggactcttcttgccctgaactggagacggggacttcgcggcctggggctgctgcccggggacgtcgggaggcctggcgctggggctgctcctccgccggcggggatactcggccttcctccggcgggacacagctgcggcggcggcggccgcagcggcccggcctcggtcccgacctcccctcagcacgcggctgctagtggtccctgcaggcgccgccgcgaccgcctcagggggccgttgttggggctcctccggagccgccttggccgcctctcccccttcctggtcctgctgctccgggggtctcggctcttccgtctcccccggcatcggggcttgtccgtcccccaccccctagtcctaggcggcggaggcggaggcggcggcctcggcgctgctccccccgccccctcgcctcccgaagcctgcggctcactctcaccctgcgctcctctttcccccctcccctccgcccggctccgagggcgccccccccaccccctgccactcaaggtccgctaccgctggcggcgcgcgcgcgcgcgccacagacgctcagcgggccaatcggaaaagaggacaagcctcctcaccccgcccctcgcagtcttacacgcagcggcgccccaggttccctcccccaccccttccttcagccaatcaggaaacggctaaaaggggagcgcgcgaggtttccttccccgcgcacccgttctcaccgttaaacggctgtgtctcgcgacaatcccaaagtgacctttttcccccctccagacttcaacgcgcgctaggggcagtgcgaggggcaggtctcgcgagggaggcgggtgagaagaaatcgcacctctttccccgcctcacgcaaaccctagactggctgcgcgcgcacctgcctccctgaggagccactgataccacaagggctctttctattcttctttaggccgcagaagtagcctgggcgttcttccgcctccaccctaccccactttcctgtctttggcctttctgtccccagcgccgccagatcttgcgcggagaagggggtagtattttgagctgtcgcttctcctttaagaaaaaaagccccgtcggttgccggatgaaagtctctgaaaaaatggcggcggcaaaacggaggcggggttgtgggggcaacgagggcccgcctcttggcgcatgcgcaccgttaacttaaccaagggcattctgggagatgaagtcttatttcgcctaggctttaggaaaaatagatgggaaaccagaggtggagaggatgccgggaggttctaactgagtcacgacgggaaaggtagtttactttccgcagtctagagtttacctttttttcgggaggcagtgtttccgggttaggtcgcgacgcgtgccgtacatccgggctcaagcgtcgagccaattgctggtctgatgggagggtttttcctactttttcttactttttatctgggcgttggcgtacctttctcggggtgtctgcgtaactgcccagacttgccttggtttggtcagatgacacctcctctgggactggctagccagcgttcatgtctacattattgatctcgtcttccggtgtgtgagtcactcacctgtgagctcctagaggtcagcgactaaatctggttccatggggtccttgggccctcggagccctagcacaaggcccactactcagttggctcttaatcaaatctgtgaaacgaattataaagttgcttttctactagaccttgttgggacaccaaggagccggcgtcggttgcttaacttggatgcggtgcctgacctagagggaggcgaaagggttgtgagcgtgacatgactggtgacctacaccgagaagctgaagggtctcttaagctctgcggccggaagccatctgcttctgcggtttatacaatagcaactttatcagaggttacttttctgcacgctagcgtatgacattaatttgtcttcctgattcatcaaagggaatttccgttgcagttggtgatgcagtgggcctctcccatttcttttttcttttcatccattacaatcaaggaacgatttgcaagaacatcctttacccctggaaaataaggcatccagggctaaaagtcccaaaagaaagaagctggaaacaagatctggggatccaattttaaatttcacattaatcattcagttaaactgtagacaagtgctgaagtacatttttccttccagtactttgactcagataccacttcatattagacaaatgttttatattctctactgagtattttccattttcatagggctaatgtcattttcagttgtaataatcgattggcatagtgtcaatggaaattttttaagattgagtttgtagtgagcagacttttggaaggaacagtgctgacatccaatggatgctcaaagtaatacagaggaggaatctcctttcaaaaaaaaatgtacagacagtggaatggagaatgaattattccctaaaaaaaaaaagccactgtgggctggatgtggtagctcacccccggaatcccagcgcttttggatgccaaagtgggaggatcccttgagcccagaacttccagaccagcctgggcaacatagggagaccaccctctacataaaaaataaaaataaagcttttaagctaacctggtggcgtgatgggatgcacctctggtcccagctactccagaagctgagaagggcaaatcgcttgagttcaggagttcgagttggaggttacactgaactatgatagtacctttgcacgccagcctgggtgacagagagcttgtcttaaaaaaagtaaagaaggctacggtgttgtagaggaaagatcccagactttgcaattatagtaagtagcaaagctaccaattaattatcttagcaagttgctattacatgaacctatttcaccattggtaaaaagggggaaaaaatctatttcacagggccataattatagttccttacgtattgcttttttatagtaggccttttgtaaatgtttaattcaaggtgaataaatcacagtggtaaaaaaggtgaagagttaacctcagtgttactttccaaagaaattgctataaggcagtgtatctaggcagggattatgcttaattgagatgcacacagtttaacatctggtgtcaaacctggcttccttctttgtgaccaccctatagatgtttgcttttgggaccactgagtaaaccaggccctgagaatccaagcatgaatccacttctgccctacttttaaggatttacgttccatgcaggaaagcagataaccataatttctgaataaataagacaacaaaatgaaatggatgctggtcaactctgatgcaaattttaagaaggagactatgcctctgtgtctcccagcttcacagaaaaaaaaaaaagaaaaaagaaagatgctcagagtggggtacctacacttggaaaaaacgcaagtataagtctgccattcccatgaatccaagatgaatcctggcacagagtaggtcctcaaattttgcaaaattaattttgaatctttatcaccctggccaatgcactgccataatgcaaatcttactatctacctttctatgtcagtcacatttttaaaactgtgtaacctatgaaaaaaaaaaaaaagctcaccaaatcaaaagagaggaagtgctaagcaaatacaggaaccaaaaaggtttatagaggctgccttatgctgtctcatccagttcctttgcggtcctcttcttcagcacatgccaaagctgttcctcacggcctgtgagacaagagcatcttggatgtaggacaatggaagagttaggtgagtgaggagcctgaggagaaactctgagggagtgaagacttggctgccatctccttgtgtggtggggtatacttctggctagactgagggtagtaatggaagattttattttcacttctttcctgtcctcagccctgccaagagtgaagcatgaggaactatgattgttttggggaactatgggttcactgtttgcagtggcaaaatagatggagagtttggtgctaaccgcggaataaactcttggcaaatacttttggactggattgttactgcagttgttgtcttgttatgggcgttttgccctttggaggtcactggagatcaagggtggccacatagcgagacaatgcagagatatgatttgaggaggaaaagaaagagcaaaaagggaattggggtgttatgaggaagaaaagacggactagaagtataagaatgagggatctgtagaggttggaaaaaggccagagtggtttcatttgttccatgttttagtattaaatcaagaaggcatagcactctaactctagtgattttgttgctaagctttttattcagaagaattctgaaggaagagattactagggcctgaaaatatgacacctccttccactctaagacaattaaaaccagcagtggaactattaaccatattaaccagagaaatcctggatttcaaacctttggagtaatgtaaggtttgtcattcttgggactcattccatagcctttgccaacatctgttgccagcatcttaactaacactgagtcactaaactatacccaatttccaaactgtattaattccacagtgtcctggtttggggtgtgtttggggatagggtatgtcaaaagtgcaaaaaacaacaacaaaaaatatcttgcacattgttacattgtcttaaaaaaaatggcgtgtgatttcaaagctggagaaacagaggaaaagtaaagggcaaattaccaggaggcaagagatgttaatgaagagaaaaaggtagtgtttaataaatatcaaactgctttggaggtaaagtctattttgatattgggccagactcttttttggacttggggtagaattctatttcttatcctacgtgagtgctgggagaatgtgaatttctgcttgagttctagtagtgctagggccttttttctttttctctttcttttttttgggggggatggaggggacaccgaaaggctttcatggcaaataattcaaaaggaaactaatacttatttagtaaatcaagcaaaaactagacatttttacatatgttaatcattttagtgtctgcagcaaccctctgaaataggtgttatccacttctttttcagatgagaaaactaagaaaaacaaaataactttttcaatgtcactgtcgggaacacctgacaccaaaactaagcaacaaggtgctctcctattttagaagtttattggttctggtgtctgtccaatgaagtaacccagatttaacagaaacttatattgttttgcatctcctgagcaggctaaatgttaggtaaatcttgtctggaaatacagaaagtaccaagtagcctggaagctaatatttgtgcagattatccagttggctacgtctccacaggctgttgatggctacacttcaacagtttcttcaaattgtcatcagcccagtaactacccttgagacttggtgtggatctttcttcctgctggcagagaaatggcatcgaggacaggttggctcaagtgagcaaatatttcctgtctgcagtggtgcctcagaggctagcagcttgtatacacccagaaggttttacctaaaccctcattacgtaggcattaggcatgatagataaagaggaaccaggagcagattctgcctccgaatgaaatccatgcaaccctcagagactcccaagagacctcactttactcctttcatgttaatattgatattatttcatctccacagtaaaagactacagagaagaattatggagtcttcagtctagtccccacttcccccgcccccactctccaggaatcccatatttgtcatactgaaattagtcatcttcaaattacaaaatctggcaaaaggcataataacctcacagtgttggtgatatgcacactcatatgaaacaggaagagaaaagcctataactcatgacccagaaagaagggttttgataactttggttagctggtgcttctgagggcaacttcctactctttgtggtatggtttcttctctcttataatctttattgtaaatggctttttattttgagctcaggaggatctttggcttctagttagagcaaagcttagaaaatagaaaagaaaggggctctagcataattgaaagatgtagaataaaaattcaaaattctcaaatttggtgtggggtctggctaataaaaatctgaggcaaaaagttttctttctttttctaccttagttttcttttctttttctttcttttcttttctttttttttttttttgagacggagttttgctcttgttgcccaggctggagtgcaatggcacggtctcggctcaccgcaacctctgcttcccaggttcaagcgtttcgcctgcctcagccttcctgagtagctgggattgcagacatgtgccgccatgcctggctaattttgtgtttttagtagagacgggttttctccatgttggtcaggctggtctcgaactcccaacctcaggcgatccgcccgcctcggcctctcaaagtgctgggatttacaggcatgagccaccatgcccggcctatttgtccttctttttaaaaaacttctattataaagaaatttaagtatgcaaaagtagagaaaatagtttaatgaattctgatatacccatcaaccagttgaaacaatcagttcttcatcagtcttacttcatatatatgcccacccattcctttcacccctgtaattatgttaaaacaatttcagatgtcattttatctgtaactattttaacactgacctctaaaataaatatatatttatacatataactgtaatgccattgccataacaacagccttaatattaattccttaatattgtaaaataccattatcacacctaaaaacttaacagaattaattaatattattaaatatcattatcacacctaaaataaacagtacttacttgatattatttaatatccagtcagtgttcaatagtcttgattgtttcatttttacagtagatttaatgatccaaataaagttcatacactgaaatttattataagtctctcaactttttaatgccatagggtcccactcatctcttttttcccattacagttattcatttgcccgagagtttagttcagtttgcttatctctaaaatggtacataaaagtcaacatttttgataaatggatgattatgaaagatctgtatatttcatttgttaaaaaaaaaaggattagatctcttctaacgccattaagaaatattcattcctccaaaatctaaaataaatgaaaaatctgttttttttttaatgacctgtgaagtttattttccttatctgagaactttagatgtaggcaggtccttagaaataatgtaattatgtgtttaaagtttgaaagctaaaatctgtggtaagaagtccgctagagatccactaatgcattattgagccataatttgaaaaatactgttctaatcaaattgccttgttatgtagatgaggaaactgcatcagagaaggatgtgacatgctcaaggtaacccagagaatatatataagacaggagactggaacttctaacttttagttaatgcaggggctagggatcagatagcccagattcaagtcctggttctgcattcatgcgcttaagcaaattatttttgtctctttcttgtgatctacaaaataaggacaataatatcatctgcctcaaagtgttaggatgattaaatgaaatgtgtaaactcctgagcacagtgcctggcatgtgttaatttttattaattattatttatttcattgtaacagatagatactagtatataatacttttccaaaaaaaaaaaaagaaaaaaaactgaaagagtaacaaatcccaactatttaaattgcaacatcttacttgattttgcaatatctcagttttatccccaaccattttttctctccacaccctaaaagacaggatacttataccttgctttgaaaattttgttacgtgctcaggataattgttaagatttaagaaaaaatatcattaggattaagaataagtgttatttccctcgtatgttttgaaaaatggtaatataattgcttctatttttctgatagaaaaaagcatttaggatttatttatttatttatttatttatttatttatttattttttgagacagggtatcactcctttggcccaggctgctggagtgtggtggcgtgatctcgactcatcgcaggctcacctaggctcaggtgatcctcccacctcagcctcccaagtagctgggaccacaggtgtgcatcaccatgctgggctgacttttttgtatttttcatacagactggattttgctatgttgccctggtctggaactcctaggctcaagggatcctcccgcctcagccttccaaagtgctaagattatgggcataagccactatacccagcccagttttatttttttctaattaaggatatttgtggggaatctaccctaaatgaatgatgaaaattaatacctgtggtataaaaaatcaaattatagcatgagactatgaaattgaatgcaaccatagaaaataagaaacaaaccacaatttatggaggtgttaaacatttcttggtaggattcaccacattcttgaagtgaaataaggaataagggaaagtatttgaaaatagccataattgaagaaaaggagatgaatgtgggcacagtgaagatatttaaggagaaaatgactgtagggatttaaatattctctgtcatgattctcttgcttcttatggtgtagatgccttattggaggaactggaacgctccacccttcaggacagtgatgaatattccaacccagctcctcttcccctggatcagcattccagaaaggagactaaccttgatgagacttcggagatcctttctattcaggataacacaagtcccttgccggtaaattttcatttattatagtccttaaacatggatgtttgagtgcatttctgaaaattaacagaatcccacataaaataatatgaaaggagaataatatatccaagaaagagaaaaaataatgcctcaatgttaatctaaagatgtttttggaaagaggaagagaattgagaaaatcatcacagaggaatgagtttttgagaactaaattttttttattttttttattttttttattttttttttattttttgagacagagtcacactctgtctccaaggctggagtgcagtggcacaatctcggctcactgcaaccttcacctcccaggttcaagcgattctcctgcttcagcctcccaaatagctaggattacaggcacgcaccaccatgcccagctaatttttgtatttttagtagagacgggttttgtcatgttggccaggctggtctcaaactcctgacctgaggtgattcacccgccttggcctcccaaattgctgggattacaggcatgagccatcacgcccagccgagaactacattttttctaatgagcacatggtcacaggcagagtattgcattcactggggatattctgatgttactgtgggggcatcagagatgcctgttgcagtttgactggaatggtactcaggccagagatcacctgaggaaggccaggtggcagcatagacaagtcttctcagggtgactttttagggtcactacttcccaggtcttattttctgctgaatagattaggagattcaattattagtttatatagagatgatgaagctctagggaaccaactcaaactaaccaaattgacaagtgattatatatatattttaaaaacctagggcaggtgcagtggctcaggcctgtaatttcagcactttggaaggctgaggcggggggatcacttgaagccaggagtttgagaccagcctgggccatatggtgagacccccatctctacgaaaaattaaaaaatgagcagggtgtggtggtgcgtgcctatggtccccgccactcaggtggctgaagcaggaggattgcttaagcccaggtggtcgaggctgcagtgagctatgattgcgccactccatcccagcctgggcgacagaatgagagcttgtctcaaaaaacaaacaaacaaaaaaaaaacaaaactcagaaatcaaatttacagttaaagctatcaagtaaaacagctatatttactcatatatgcattctcttcctatggataagtctatatggacgtacattataattaaaaggttgcttgatgagaatggaattagtgtaagatgaattaagtagatgctcttcatagctggtaattttgtactatgatattttgattcatcattgttccctgtatgaaatagccagaagcacagacctgaaatttgagctcaggggtagtttacgccctaactgttcttttctccagacacatacacaattttaacgatacgaatttatctctctactagggaactattgtctttgttctcagtgttagattatagctgtaggctcctaagtggtctcctgccctttgccccactgcagtctgttctcaagcagccagggtcacctttaaaaactaaagtcagaccctgtcattcttctactcaaaaccccaaaatgactcccatctcatttggagtaaaagccatagtttcatgttgatctttctggggtgaccatatatcctggtttacctgaaagagtcctgggtttatgcttgtttttctcacatcctattaactttactttttaccccagatcttcaattttatttaaagttttcttatcagtatttgcattaagtaagccactatggcttaacagacctccttccagcttcttccatggtctcatctagcagcgtatgaaacacatattcagtgaacagtgctcttttttttttttttgagatggagtctctttctgtcgtgcaggctggagtgcagtggtgcaatcttggctcactgccacctctgcctcccaggttcaagtgattctcctgcctcagcctcctgagtatctgggactacaggcatgcaccaccatgcgcagctaatttttgtatttttagtagagacaggatttcaccatgttgactaggctggtcttgtactcctgacctcaggtgatttgcctgcctcagcttcccaaagtgctgggattacaagcacgagccactgtccccagccaaattctgacttaattatggttaaatgcaaaagatggctaatgataacttgtcttttttcttgattctgttcagatgaaacctagctagcagcaacctttcaagaattatatgcagggtgctgcctgttaaagctaagagctcaagcacaagtacctcttctgatcttaggtggtagcagaagaatttctgaggcttttccccctgctggccactttgtgaaccaccactcatgccctcatgtggtcgtgtggtgggtggcctgtgagatgcgtggaacctcctcagagtcagtagaaaatgggagaaattgtggcttaatgtcatacaaattatgtttaggaaatagaggctaagtaattttgccatagagtatagtgtaacctaattgttttattaaagcagttttgttattatttgtatatgtgaagctctatttgttttattatatggtaatgccttttgaattttacaataaaccctttcagcagttagctcaaaacaaaacccacatgtttaattgtctcaagaaagctgataatgaatatgcaacgtgcagaaaatatttttcaatatttaccatgtaccatgcaggcaagtagaaagatcactatccctttgaaaaccagaaggtacaaatatggtgaagcagctttggcatctatttccaaagttaataatttaagaagaatatgccttaaaatgacttcaacacggcagctgcaggaggcctatgtacatgtcattgtgaagcacaccttcccattagtatcaaataactcataaattaattttgctcattttcaattccaagttttcttgtacttgtaagtaaactggtaataattaatgagtgattttcctttgcaaaccttcaaataatgttttttataataatttccttagaggtctcaattcaaaaatgtattaattctgaaatgtttcaattttgttttttatctaattcaaacaatcaaaataaaatatgtgaaaatttatttcctagtcaaaaagtgaaacatctgacattgttaatgccactgtaaatttagttgaaaagctcaacattgaaggtaaactgttgtttttgttgtaagaatatgaatacaaatgttaatagagcacagcattgtgttaaaaatgttcttaccaagttaacaagctatgaagcagaaatgtacttggaattggttgtaatgtgcacaaaatttgtgactgcattcaaacaagctgcggtattctgtcagtcaaaacagaaactaaaattgtcaaaatgtataaattataaatatatatatacacacacacacacacacacacagattttataagtaactgatctacaaaacttttctgacagaagctgatattgaacactaccatgcaaggaaacatttcagaatgactatatgtatattcctgtctgtgttgcatgtcatcaattggattttgggaatgcctgagcctttgaaaaaccactttgtaaagcaacccaaatttagattgcattatgttcaagaccagttggaaatttttaatcgattactgaatgaatgtagcatgaaaattcagcttttgaagcttttagcaagttacaattatgtaaaataaggcttgcaaaggaagaagctcaaatttctccctacaaaagcgaagaaggagttgaacaaatcaaaagatgaaagcagatatggtttaattatctattttgacaattgtgcttcagaaaaatcttgactttgatgtattttgacttctaattttatttggataaatttttattctctaccaaaatggagaaaaattgtgaaagtctatgattttgcagtatctagatttggtgaaatgttgaaacaatcacagatatagacaacttgaaagttttatcttgtaagaaattattgagcaaaagtgctttgaatgaaggtagaaagacagcacctatgacgatattggcctgaaatatttacatattttaatctaaaaaatgagaagattcttcatttagcagaacttacaggttcatcagtatctagagaggaaatgtgttctcagttaaaaacatatagtgaagcatcaattaaagttgtccataatttcaaatatattaaccataaaatgaagttttgaaaaagattgcagttttataaaaaaataactgtttaaataaaaaacgaaaaaaaacacatgttcctgaaaaatgtccacatcccaatgctagagacaataatatctaaataaccaattaaggtatgtgaatacatataaagaataattgtctgtaccattaaaaatgttcagataatcaattttttgttgttgttgagacagagtgtcactctgttgcccaggctggagttcagtggcatgatcttggctcgctgcaacctccgcctcctgggttcaagcaattctcctgtctcagcctcccgagtagctgggactacaggcacccaccaccatacctggcaaatttttttgtatttttagtagagacagggtttcaccatgtctggtcacatgacaccaggctggtctcaaattctcctgacctcaaatgatgcacgtgcctcagcctcccaaagtgctgggatgataggcgttagccactgtgcctggccaatatttttttaaagttgcttgaatgttcataactttgtatcactatcactttaagatatttcaggaaatttttattttgaaaataaattttggatagaattatcttataggtccaccaatataataagaccaaattcaggtcaataaacacatttttttttttttgagaccgagtctcgctctgtcacccaggctggagtgcagtggcatgatctcagctcactgcaatctctgcctcccgggttcaagcaattctccaagcctcagcctcctgagtagctgggattacaggcacgcaacaccactcccagctaaatttttatagttttagtagagatggggtttcaccatgttagccgtgatgatctcgatctcctgacctcgtgatccgcctgcctcagccacccaaagtactgggattacgggcgtgagccaccacgcccgtccaataaacacatattttaaaaatgatacaagctcgtgacccgtctgcctcggctgcccaaagtactgggattacgggcatgagccaccatgcctggccaataaacacatattttaaaaatgatacaatatgacttatttttggaacccattttctttctaaaaaataccccattctgaacgtttggtgatgtggccacctcatctgtatgatctggcccctttacttgctgtccctgtgtccttggttcactctgctcaggccacactctccttctcgtggttccacagatgctccaggtggttttcctgctggcctttccacctgaatcatatgaccccagatatttgctttctttccccacctcctatataagtccttgctcaagcgttctcttctcagtgagtccttccctgatcagtatatttataattgctgtctctccccacttcccatcctctatgcagaatattacttttacataccaatttctttattatttgtttcacagcaccagaatgtaagcttcagggcttacagtttttatttgatttttttgctttttgactgctacatcctcagccctggcacatgacaggccctcaatacatatttgttcaattaataaatgaattgccagccaaccatcttttagattcacatgttatttcttttcatatgtcaagtttaataacattatagtctcctcctaggcaccatcctgtttagttaaaggggcttagctctgacccattttatttgatttatggttcttatctaaggaggatcaacttctctatttcggtggtttttaggcaaggaggggctgctagtgtttgttcacatgccaactactctgtttagaatttggcttttctttgtgggatggctggtaattcctctggcttgtgaaagaagagctcatagatatgccacttgtcagtcccctttaaaagctacaaacatctattaactgtgggtatcattaagcctcaacattctgataacaaaaatttattctttgctcttctcttgtcacttatatatcttaggcgcagctcgtgtatactaccaatatccaggagctcaatgtctacaggtatttttttttctattaaatgcttttaaaaattaaagttagtagataattgttatcaatctttgtttgggtgataatttgctttgcaagtgtttattattagaactcgtatatcatcctcctctttccatagtctttgagcataggtagaattctgtgaagctgacttgacaacttctcaaggtgcctggcttctggaagggttgtctaggctagtgggccctgctatgtccattaccacctaaagaagtgtaaatactcccagagttaccacagatgttttgtccacgctattccagatgttatgcttcagtttcctgaaagataaaacacacctgaagaaacttcagcaagattctagcaatgtcagagctaggatgagggttaaactaagacagtgggtctccatggccaactgatgagtatttactttttctttccatatttgctcaaaatttgtatagtgggtagagggatttccttttatgagaagttccatattaaaacagatacacttactaaatcatttctcctggctaaagcagaattggcagtctgaaaaaataacaagattaacttacttattctctccttagttatagcttgcaatttttaacatcagacaactttctggaaaacaaattaaagagcataaaatatagatagtaaagattcatgcttgggaaacagtgctagatcacaccttatttggtttcaggattgcagtcaatagtgcacacatgcaaggcaaaaataaggcaagaactgtgctacaagaagttttcttaaaacttccctcttaaggatgctttttactttggtgaaggtgaggccaatttattgatacatattgccagtttattctagttccaaggatgttgccagatgagaattcctcctagtccctccccagtccctgaagccccaatgaaaaataaaaacaaagcaaaacaataacaaaaagtggctggcacacaataggtcctcagtaaatatttggtttcttaaatctaggaaaccaagactccagtagaaatgcgagtgaatgcatgaacatataacatgaaaactagcccaaccaacagcctgtatatctggcactgtgattattaactgatggtgtaccaatactaacttattgacaccctcttcctcatagtatgggcctctctggcctatttcccatgatttcctccttctcttgctctgtattccaggggagctgaccccttgggttttccaggctccaggatcagttggtcctcactgtcttcaaccaatgggaggcactgtggaaagactgcagggtaaaaagcagtgaaatccagggcatttccccccccaagtcgctctatttccacaggatctctgtcagcagctttatcttctttatgacttcagctggagcacaacaggtctgctgtggtttcaccttctgcctgttgacttgggcccctagctctggtaacttctcctcttttctttttccctttggcttaggggtagtagtgacttctgggttattcagtgtcttctgttttgcttcttagctctcccctcacctgtgtaatcaggtttctggtctaaactctgtgtactcatgtggtttgtgttttcctgactggcctttgatgtacttcctattactgaatgatacttgctgtgtagccaggcctctgtgggagagtgacataaaatccaggtgacctagtaaatatgtaatagatagatgcacatccctgagactagtatcactctgagctggcaaggctagcatataaatagaatattagacacacaaactagattcctgcattctgtttctactatttactctggcttgcttaaatgaactaaatattgcttttaacataccttcaaagtattttcaatactagctctgaatataacaatgcaataacatttctagtatagttatatatcaatagcaacatgagcaataatttagaaatgtatcttttacataaacaaaaataattctggtaataatcgagaggaataagtcataaaaatataacagagaaataagtaggggaaaaaaacccagcacaatgaagccccttgcttaagtctggattcttttagatgcatctcttgtgatatgtgttactgaaatctctgagcagtgaagtaagttgctgctgatgacatagccaagcatctttactatcttcaaaaggtcagggaacaaatcaaaggttcttctcttttcaggaacatttcctgcagtgggcactttaatttgtaatcattaactcttcaaggtctctcatttcttatgtagaattttatactgttgactcaataactgttggagtattataacaatgatctatttccctttctacactgcactaggactctagttaaaaaccagtgggaattctttgaataagcacaaatttgccccaactgtgagattggaaggttttttaggaatatacaagccctgctaagaaactgcatttgttctgcatttgggcatagggcagcagaatgtgttcacagtcctgctgccttttgtattcccaaggcatttgcctgtggcagcagctacgaaaggattatgactgatcgagctgtgagaaaaagctccagtgtaccttctgggaaacatccacaatggattgaatcaattacttgcatacttgaccggttttgctctcagattaaaacaaaaaatcttgcatctagtagagggccatgttgtacctaaaagataaatcttttatcttaagagatatccattttcctcttatattttccttgttgttaagtgatcaaaaataagtggacatgagatatgtcgtatccaaaagatagtcttttcttcttaagagagaaaagtatcaacttttcttctactttttttctggctggtaactacataaagataagtagtaaatgtatgttttcatttttgaaaatatattaagtgaaagacagaacatttacttttatttatgactttgcatctttgtgcagagagagagagagaaaaggcttgagtagtcgtgagacagagggttttggtttggtgggttgttagctaagctctgttgattaatgttgattacaaacatgattccacagtcagttacctttttataccttttggcccggtgatttcccttcttaaaatttaactcttatgtaaatgatcaaacatgggtgcaaatatttgtttggcagtattgattataataatgaaagttagaaaacaatctaggtgtccagcaataaattattagtttgataaattatataatacattatctatttgaaaatatatagcctttaaacattattttggcagataattcaggacacacagcacaaactttgcagtttgcaggcccaagctctttgttacttgccaactgtattatgtacaaaaaagtttttaacttctctaagccccagtttttcatttggaggtgataatacctagctcttaaggttgttattataaaagatttaaagagaacctgtgtaaagctctgtatagagtgtcaggcatagtgcagacagacattcaataaatgctacctattatggttgcagaagatagaaaaatgtttgcataagagtaggaaaaatgtataattttagttttctaaaattacacacaatcatagttaagtgtaatggtatcagccaaaatgtccagagtaaatgcctcctgaaaaggggattatatgtgtttaaaattttttctgtatatttctctgcagttttcaaattttctacacttaacatgtgttaattttatattttagaacaattttaaatagaaagctctacactgtgactatatttatgtactttactgaagattgtttgtagaaccattgtgtgtgtatgtgtgtgtataataactgagatatacaggtgaattgcattactgatgtctcatctgacacctccaccacttcatctgttggccatgtgtgttagctattttcctagtatagatgacctgtgttttgttttgttttaaaaatataacttaagatacaaaactatttcataaactcatgtgcgtaaaaagtcgaagaatttggaaatgtatacatagggtgaaaattgagaccactcctcttagagtctttcctctcaccaactcattaccagctccacaggtaactgctgtcaggttcttctccttacagacttatgtgtgtgcatattcatacttatgtacatgggcttataaatttatataaatggaagtaaatttttttcttttttaaatttgagatagggtctgtctctattgcccaggatggagaacagtggtgttatcttggctcactgcagccttgacctcctgggctcaagttattttctcatctcagcctcccaagtagctgggaccacaggcatgtgccaccacacccagctaatttttaaaattttcatagagatggagtctccctatgtttcccaggctggtcttgaactcctgggctcaagcagtcctcctacctcagcctcctgaagtgctaggattacaggcatgagtgactgcaccaggctggaagtataattttcgtattgttctgggcttttcttttttacactaacaatgtttgttggaagtcttttttagttcacttaaatctatgtctgcttagcagttgcatgttattctatagcatggatgaaccattatttattttactttagctccattggtttatttccaatttgctcatagaaaatgtaccctaataaatgtccttgcacatatatttatatatatatgtccaatttttctgtaggatagattcttagtagcaaaattgctcaatcaagtggtatatgtgtctgaaatgttgatagatactgccttgcaaaagtgtttataaatttatataaccacctatggtatatataaatgtgtatgtgtatatatataaaattcatattttgccaacactgcatattatccctctgttaaaatttcaactaataggtaaatattagtatctcattgctttaaattgcaaatttaaagattaatgaggttgagggtatttttatatagtaataaacatttgagtttctttttctgaaacctgctttttaaaagaatctttagctcaggtttctatttttctaaattatttatacatttctttaaaatcttgaatattatgttttaaatatttatttatatttaagttttgtgaacttagctgtatcaatatttttttcatttttgaaatcacttcagaattttatgtccatcttaggaaaaccttcattaccccaaattgtaaaatatattcttcatttttctattatctttacatttaaaaatattgatatctatctttaatttgtctcaaatttattcatgtatttggtgtgttggggatccatatttattttgtaccaaataggttgttattctttgagtcgaatagtctgttttggatgatttgaaatgccccattgctcatataggaagttcttttaggtgcaggagcctgtttctgggttttctaatctactcctttgacctatttgtttttctttttcttcttcctttcctttcttctctttttttttttttttttttttttgacagggtctcattctgcttctgttgtccaggctggcatgcagtagtgtgatcacaactcactgcagccttggcctcctgggccaaagtgatcctcctgccccagcctcctgagtagctgagacgacagatgtgtgctaccacatctggctgatttttaaatttttgtagagacagggtctccctatgttgcccaggctggtcttaaactcctgggctcaagcagtcctcctgcctcagcttcccaaagggatcacaggtatgaacgatcgcacccagccctatcttctttaccaacatcatacaaatttaattattgttactctataagacaccacatctatcaagacaaatcttccctcctgtttttttttttctttacaacttttaatttttatagagaccaggtctctctcatgtttcccaggttgttcgcaactccaggtcccaagtgattctcttacctggacctcccaaagtgctgggaccacaggtgtgagacaccacacacccctcctattttttttttccaaaattgtcttgagtgttctatcccataaatgttaacatcatcttattaattagcttgaataattatatcagaatttttatttgaattacattgaatttacagtttaggggaaactgacataatatttatcttcatttatataggctttcttttctaaaaataaattttattgtgcatatttaaggtgtacaatattatgttatgggttatgaatagttagtaaaatggttactatagtgaggcaaattaacatatttattatctcacacagttacacatttttgtttgtttgtttttgtggcaagaacagccaaaatttactcttgcaacaggaatcctaaatacgatacaatttcattaccgatagttcttatgttgtacattagatctctaggcttgttcatcttacatatctgctacttcatattctctaacctacatgtccccattttcaccccctttcctgcctctcatcaccagtgtatctacatatttgacctttttaaatgacaaaagaggattccacctataagtgagatcatgcaatatgtttctttcttatttaacttggtataatgtccttccaattcatcaatgctatgacaaatagcagaatctcctttttttaaggctcactaatattctgttgtgtatgtgtgcatatttcacaatttctttattccattggtgtccatccattgatggacacttaagttgtttccacctcttggctattgtgaattgtgaatattgtggcaatgaacatacgagtgcagagatctttacgaagtggtaattccatttattttgtgtatgcccagaagaaggattcctgtgtcatgtggtatttctatttttaattcctttagaaacctgcatattattttctgtaatggctgtaacaatctacattcccaccaacagtgtataaaggttcttttttctccataccctggccaacatttgccatcttttgactttttgagaatagccatctgtttgtgagtggtatctcataatagtttgatttgcatttccctgatgattaatggtgttgaataccttttcatataccttttggccatttttatttcttctttggaaaaatatctattcaggtcctttgctcattgtttaattggatatgtggatcttcctttatgtctgccaatggtttttcttcatagaattcttacacatttcttgttaaatatattatttgatattttacaacttttgttagaattgtgaacaggttctttttttcgcattggattttcaaactgcttattgatgatcaataagaaagagactgtttcatttcattcttgtatctaatcaccaccctgatcttttttattcattccaatggttgttcagtcatttatcttacattttcctgggaaattattataccatctattttaaaagaaagactgaggatgtgctgcctttttttcaaatatataattctcttattttacttttaaatgtgtttgataatgtattctagaataatgttgaagattgccagtgataataggatctatgtccaacttatctcttaattagatatctgcttaataattatgaggcttgctatatatttcttatggaaacattttatcagtttatagactttttcttatttttcttgatattcaacaacaggaatggttgttaaatgtcttccacggctttttcagcacatatcattgtgtttataaagcttttctcctatttgttaatgaattatattaatctttttcctaattttgaatttcaaactatttttggataaccagtataaacaccacctagccatgacttgttaaaattttttatgttttttaaaaaaaacacatttcaactgattttatttaaccttctctcttcacacatgcacatcgttttttctttgattttaaaaagtttctgtgctatttatagaatgaattaggtaatgttccatatttttctatgtatttgggaattttatacaatgatcccccaaaaactgtcagtttttgttttatttcttgttttctgtttcactaatttatgcatttattccttctgttgaattattttagatttttctgagactcttgacttggaagttttatttatttctgatctttctcactttttaatatcacacttaagtctatttatatattttcttctcaataacatttagctttcaactcccaaaggcgtgtgtgtgtgtgtgtgtgtgcatgtgtgtgagtgtgtgtgtgtgtgtgttttcattgctatttctaactggtttgaaaattcagtttaatttttttatcccaagaattatttagaagtgctttgttttttcttaagtggatagtttttatgattaatttgtacttctattcactccaatctaagaatatggtctatatgatgtacttttaaaaatttattgagctttactttgtatcttcatacatagttaattttactaatgtttatgcagctacttgaatagaatctgtattctgtttattgggtccaaagttttatttatttataatttacttacaattatatgaatatgaaatcatcatcatatatattatctaaactttctgcaccagagatttgcaaacttgttctgtaaagaggcagatagtaagtttgttaggcttttgtggactataaagtctttgtagcaactacccaactgttcagaaaagcagctatggacagtagataaatgaatggacatggccagatttgatccaaggaccttagtttgttgatgcctgctctatattctagtttatttttattttttgacaaaaactgacaggagatataatactttttataattagatgaccagggagaaatagagaaaaaaggcagagagaacttgtttagatttttggtctagtacatattaatatatttttaaaatacccccatctctgattttagcttcatatccaggggattcattattacagttgcatttccagtactttatgtgtggtttaacattatttgagttttgatttgttcatatgacttttttgttttccctctatagtgaagcccaagagccaaaggaatcaccaccaccttctaaaacgtcagcagctgctcagttggatgagctcatggctcacctgactgagatgcaggccaaggtgagtgcaggccaaggtgagtgcaggccaaggtgagtgcagtccagatgataaacagggcccatggggtcaccagtttatctttgtggaactcagctctccattctcccacttaggaattttcctaagttgtcattgcttttttcagactaaatttaattccatgaattaacccatctttgtactatgtgttatttggacacaaaaattaatatataatacagactttgatctcaaggagctggagtgtgcttggcaaaatgaggcataagtttcttaacatttatagaataaaagccaggtgttttgcaaacatatgtggagcaaacattacggatatagagagattttggagatttaatcagagttgaaacttgggatggactctgaagaactggcagagtttggacataaagagatgggaagaaaggtggttttagttgcaatgagtcctgagggcagaggtatctaaggcttgatgatgtggaaggatttttcatttgtttgtttgtttgtttgtttgtttttgagatggagtcttgctctgttgcccaggctagagtgtagtagcgctatcttggcttactgcaacctccgcctcccaggttcaagcgatcctcctgcctcagccttccgagtagctgggattacaggtgcccaccactgtgcacggctcatttttgttgtatttttagtagagacggagtttcaccatcttggccaggctggtctcgaactcctgacttcgtgatccacctgcctcggcctcccaaagtgctgggattacaggcgtgagccactgcgcccggccaaaaggactgttaaagagacctgactaagcaggacagaggagaccagtgagcaagctgagacacagcaagggagatcaaagtatggctctgacagtaggaaggatgagaagtcccaagcccatattgagataaaatctgcctctttgttctagcctctagaacacctctaaagtggtgagctcacatagtcgggcatggaatggaaatctcagataaatgggcttaaagatttattaaaggaaatataatccagaatccttaaggtggagaatccaaccattttaaatctggttggaggatttgatatatactcatgagatgactatgaaataatttcaaagcagtatataaaaatgtatatgattggagagggcagggaccttatctttagagctcaccttgggactcccaatgctcagcacagggcctgatacatcgtgagcaacacatatttattagagagatgagtaaataaacatcacaaacaagttttccttaatgactgacatcctttgatgggccagtgtctacaataaagctgggtagattggctcattatgctgtatatctgaaaatactagaaaaaatgtacattagatttaattgtgttgcgtttctagttgatttagcttgtgtattggttgatttaaatttttaatttacaacaccatctttttttttttttttttttttgagacagattcttactcggttacccagcctggagtgcagtggcatgatctcggctcactgcaacctccacctcctgggttcaagcgattctagtgcctcagcctcctgagtagctgtgattacaggcgtgtgccaccatgcccagctaatttttgtatttttagtagagacgaggttttgctatgttgcccagactggtctcaaacttctaagctcaggccacctgtctgcctcggcctctcaaagtactaggattacaggcatgaaccactgtgcccggccccatttatcttttgaataagctgcactttcacattgtacacaaatcaaaagtgcaaaaagcttgcactgaactgtttccttctcagctctgcaccctagccatccagttctgccccaccggagataggcagaatttcctgtctcttctatatctgttcagaagtattctggaagataacagtgaagagatagagatgtaggtgtagatgtagttatattgtatttttacttatttttcataattaatgtcagtcaccctttcagacctttcagacactaaccttctgaacactaacctcttgaatattaactaacatatattagaggaggaaggatgtctgtcagatgatcaaaatgtctcgaagcaaaatgagcattttgattggtgacagtgtgatgttataacaggcagtaaaagtaggataagtagaggtcttaaggcagacagtaacagatcacattcaggagatgaagagcccagctgtccttttacaacatagtattaataaaagatgaaattgggaaagataaaaagggaggacagtggatgggaggctttgaatgtctgtctgatgagtgaagacttgatgtggtggcaatggagagccattgtagttttctgatgagtgaagtattcagtagatagatggtagcagtcgcccagctggaaaggagtagagagagccagaatcaggttatgaggttatgaagggtcagttagccttttttttttttcttttaatttgaggatccttctttgaatggtttataataattttgggcttttgcttaaataattccaatccatcaacaagtcttatctgaccacttctcaccaccttctcctgtaatactgatctaagtcattatctgaaaatctccctgtattcactcttgcttgtcaacacttagttctccactcagctaccacagggatcctccagattccttcactcctgtgcttgaaatcctgcaatggcttccatcaccttggaataaaacccaagcgtttaccatgaggttcctatgtgatctttgcctctctctccatcaccttctcctgccgtgttcaatctcactccctctgctctagccccactgacctctttgacttttcttctaatgtgccaagttgttttattcctcggggccttcccttcccctagaatgcttttcccataaatgtcaatatttctaagtcccaagtatctactcaaatattacttccttagaggggccttctttgattattacctccatctaaatcaattcttcttaccatcttgctgtgtcccttctatctctttctataacttatctctgtctgacattacaacatatatttatttatttaattatttattgtctatcgcccacagaatgcaattccatgaggccagacacttggtctgtcttatctttgctttaatccaagtgcttagagcagtgattggcacaaaccaggtattcaacaattattgccaaataaatgagtaaaagggagatgtgactaatttttgaactggggtcatcctaagatcttcaaagggtatcatcttcatgtactaaatttcctacattaagaaaagatttacaaatataaaattagtcagatttcatttggcctgaggagtttaggatgaaagggagatgaaaagatttttattggtgttgaaattttagatttttccaatgtcttgcaggaaggttggggaaaggccaagagatcagtcagtagaggtgaatttatagagtcattagaagatgccaatgagaataaaaatgaggctgattctgttcttggttcttcccttgggccaggttgcagtgagagcagatgctggcaagaagcacttaccagacaagcaggatcacaaggcctccctggactcaatgcttgggggtctcgagcaggaattgcaggaccttggcattgccacagtgcccaagggccattgtgcatcctgccagaaaccgattgctgggaaggtgagatgggctgaaattttggtcctacagccttctttgtctctctctgtctcatcaaggtttgctctttccccttatattttaagatattttagttagcattaataattactaatcacttacagtgctctggccactgagctaagtgctttacaagtatttcctcatttaatggtcacatcagcccttcaagaagaatgattgctccctttgtaaagatgaggaaactgaggactcagagacattaatggacatatccaaggcataataagaggtagaggtaagatctgaaaccaggagactgtctcctgagtttgagttcttgaccatttttctgtactgcctttactgagatgacctttctcactgctccctttgttcacacattcccagtctaaattgattgattacaattttcagctgaactcagctccaagtcacagctgcaaactcctgttctgcatcgtccttcaccgaagctatgataaaaagctttgagacctgactgcatggggcgtggaataaagtgttcaaactagaggaataaaaactgtcatttggccttttcctcttccaggggtcccttccacactaaggctacagttacaacttctctgtcatcaatgtgctatatgttgtttctgccaccccctgtggcagtgcagtggttgtgaacatttacaggctttcatcacagtgatcagtcccggaagtgggcatccttttattatcaatccataaagcacagaccacagatggccttaggtggaacctaggtctaggcctcagtgttgtataattccagggcgtgttgtctacaaggggtacaatgtgaagagtgctccctagagttgtgcaacctgtaggctgtagagcactcaactggcctcctgtgtcaggctttatttcactccacaggtgatccatgctctagggcaatcatggcatcctgagcattttgtctgtactcattgcaaagaagagattggctccagtcccttctttgagcggagtggcttggcctactgccccaacgactaccaccaacttttttctccacgctgtgcttactgcgctgctcccatcctggatgtaagtaaatccccgctcctctccagctttcagtcactcacttagaaccagagtcatgctttacaacttctgcatcattataatatctgtgtgttccctttccagaaagtgctgacagcaatgaaccagacctggcacccagagcacttcttctgctctcactgcggagaggtgtttggtgcagaaggtatgacccgacttgagaggctgtatcccacaccccagtgggtagttataagaccagcaacacctttcctggtagtcacgggagtcctggttcctatcagtactatcaaagtgcccatttcagtactagataccatccctccctacctttctccaacatttataatttccctttaaattgattttttaaatcacagaaatacaaatgcatagtttaaaaactcaaatattacttcaagggtaatattgaaaaagccttttcttgttgaatattgaaaaagtccctttctcatctccaaatccagttctcctctccaaattattttagctgtttcttctgatatttacttattttttgttgttgttgttgtttgtttttttgagacggagtctcactgtgttgcccaggctggagtgcagtggtgcgatctctggtgcgatctccgcccactgcaacctccacctcctgggttcaagcgattctcctgcctcagcctcccaagtagctgggactacaggcacttgccaccacacccggttaatttttgtatttttagtagggacaatgtttcaccatattggccaggctggtcttgaactcctgacctcgtgatccgcccgccttggcctcccaaagtgctggcattacaggcatgaactactgcgcctggcctgcttatgtgttttaaataataactttatattgttatagattgttttatttttccagttttaaccattatgtattgactgtctaagagggaagatgaggtttagaaatgttattattaccccactcactcctaacatatttcccctcccctgttttttcaatatataattatgtcataattacaggttagatcagtattaagtgtgcatatgttgacaatcatagaatactgctcacaagtaagccatgtagcaaactgactacactagagtctggattttagagtcagacttccaggttcaaatctgggttgtggtatttgttcaagtcatttaacatctctgtaccttactttcctcatcagtaaaatagtcctaatgaaattgcctaccttatagggttgttatgaggatttagagacaatacaagcgtggtatttagaatagtgccaagcacatggaggtatagtagtgttaatattattatcacagtgtccttttggtataaattcatttttttctaaagttaacatttgaatcctttttgaaattggcttagtttttattgtacttatcactaagttatgcaacagaactgtgaaattcttttcaaaatggccaactacatctggcaacaagtcagtttctttcttttcttttttttttttctggagatatccctccaggagactttcctcctcctgattcaacatgaaatgatttcttcctgctgagtagcagtcattctggttcattaacttagaattatatctagtaattactcttggaaattccttttattagtttcctctttggatgctctgtttcctgggtcccatgtctatgttttatacatgttaccacctttattttggtggggaacatcccctagtagctttctgagaaagaatttttgagaacttgaatatctgaaaatatttttattctgtcattgcccttaagttgcctgggcatagaattctaagtggaaactattttccttcataattctgaagacattgcttcactgtcttctagcttccatgattggcaagtttttattaaattttttttatccttgatcctttctacatgacccattcttccccctttgtatgtttgtttcatgtgttttctgaattgtcttgttttttttaatttctcctttttatgtttgttttgaacaaatatggaatcagaaagctgctttactttgtttttctcctgtccttttagaatgaactcagtggggaaggatttctcctctcataaataaaagcttgtgcagtcctctgtcttttctgattactgttaaaaaacagttctaaatataaaatcaatttaagaaacaaaacacaaaaactaagccattaggtaattcagtctgtgtaatagttaaggcttccagcactttaaaagtgacagccactccctctcttttttaggaccttcaagctgcaggaggcgaggacaggggtatggcctttcctctctcctgacctcgctttgttatctaccaccctcacccttattgccagccttgacacctgcctgctctagggttgaaacactagggaggatggagatgagaatagaaggcaggaaggtctaacttgtctaggattgttgttaaattggctttatgctctccaggctcagccagtgtttagctctgacttttttccctgaattcttttcgggattaagacaggtccagcagtgaactcttgattgccctttacgtgtcttgactagctattctctccttgtcatgtttctttgaggatttgttttgtaaagattcttttttcaaggggctttcattgttccctcctagtgaacccttagaaattattaacatcgttccagataatctcttcctctcatattttcatagaaggaccatggataacttactcttttctctgacagccagtggagttataatttttagctgcatgtttctattcagctgccataggctctttcagccagactcatctatggactttttccaggggtaactctgataccactaactgcatctcactaatgccaaggcacacatatccaactctctgagtcgtcccagtgaagtccctcttttaacctgaggttatcaagaactatacctcatctttcttggtggtgatggggcactcatagcacagttttcttcaaaggaatccttctctcagttttcctttttctttacctgttttctcctgaacaagagtgaggaattccagaattgtacaagtaatctttgactacctgtttggagggatgttttgcagttcaatttggaatttgatatatattacatcttggtgccttacatttgtttacactggtctttcccaatactgctgatccatggttgtctgttactatttaagaatgagacactaaaatgctaattgcaaactccatggatatagacagaaattgttgactggtagacttgactatatggtactcaggtaagatactctggccattttgttgagtgactcctgaatatgacaatcttaggtcttttctgttgagtcaattatgctaaagagatgttctctttgccagaattctgagattgaaaaaggggatgggggaatgggcttttcaccattcagcatgtcaacttttacttaattcccatttttcagtagagagcttgactcgtttcctcatggtgtccaacatctctgatcactgagactctcttgttcaatatttacagaaataatcattgcatcttacggtaagataaggcatctaactttctaatggttctttagactttcaaccagtcctgtttctagccttgaagagtatctcatgcattcagttcctgagcccctctgatgttatcatattcaagatggcttgatttttattggcctctcccatctgtggagacgtaagttccagttttcttatttatgttaagccaggtaccactcttaaaatctactttaaattcttgaaaatttagttaatatctcatctggtggcatatcctttacttttttctctttccttatggctctttataatttacataatttcttaactgtcatgttaatgatgtttcaggagggagtaaagaaaatcccatgtgtttaggcccttttactaatatggagactttcctaaatatcaggcatattattatgtatatggttaaaaataatttatatgatgccatcacagtctgtgagagcaagtttattcaacattttacctagttatagatgagtctcaggtaggtaaagtgattttcttaaagtcacacagttagaaagttgaagaggcaagatttcaacttgggtatcatttctgcaagttccatgttttttataaaacatcacaactgccttttgactgaaattcaattcctcttcggctgttggatctctttacttttgtggtaccaacacgatatgctttatttgacaatagacccagatacagtggtgctgacagaatccactagcaaagtgctctgtagtaatttgcttgttcactggagcttgctcaatgctttttcacaaatcattaggtatttcatttctagatggtattttacctaagcagcatttttcattgacacttaatccaaatcatcttaaattgtgtcacaataaatttatattgtactggtagccataaaagtctgagaattagttgagtacaacagtcaacaagtgaatactgcctatggatcattatgatggagaagttgcctgaaagcagaacaacaggacataggcacatttcaggtagagacataagttagatacacacacaaaaaaatacccaatccataggatgaccagaaagcaccattaaggtagctagttctcattttcttgactcaggccccttctaaacagacagggctgatggggtcatttatggctttatataaacaggaaacaacacttaaaacatatttatacatagagccacatgacaaaaagtgacatttattgatcagaagctccacttgggttgtattttcctttttatgcctggctttctgtaaaaaggtctcctgccatatgatcagttcattaattaggtgtcatcctgcctcaccccaagttagatagtcacaaagagtttctataatgacagtttaacctctgagcctcctgggaaattaaattcatctgcattttttcatcagttcaaagaattcctctttaaggctcaagtcattggtccttggcatcctcccacagggatgagctcttcaatgtctacctgtgtttctttttaattgttcattatccaggtcatgcaggtgctccctaatttcccctgtggctaagagcctcaccagagtataaacactctccctctttttgtggcacttttaattgtcagtatttctcattcttcctctagaggtaattggtcccaaagagatcctccaagaaagcaagagctgaaactttcttaatttattagattatgaaatgcaggggtatcacagcaagtttgggtgattgcttttgatttctttcctgagatttacccaagttgaaacagaggctgttactcccctgctatcccactctcgaaaccagctgtccagcagatgcctagatgagggtcatttctcagatagttggcatgtcttacagttttctcaagtaatgcctacctataggcaagctcagttttgtgtcatttgctttatgcagcatcagcatcacctggggacttgttagaaatgcaaaatcttgggccccatcccagacccattgaatcaaaaactcagggtggaagacccagcaatctgcattttatcaagttcccagatgaataatgcacactaaagtttgagaaacactattatgctacacaaaattgagacaggtggttgcaggtatttgtttttcttaaatagtaggacttacggtattcagtttcccttgaatagaccctagacatcatttgacagagtaaataaaaagtaaagtgagctcttctgtgtctcaggggtttagaggaagaacacaggacagcatataaaattactagtttagattcagatctgtaggcctcaaaattctgctaaattgtctgctttttaaagaaagcaaagttgaacaaagcaaggcatgtgaaaaagtgatgaggtaatggaaaaactgcagctatatggtttgggtcccaacacctagctgcttctattgtcatgttgtgatctggctgctattatcaaagctgatttctagaaatagtgttttctagatagtctgctttacagaacactgtgcatgctttgcttacatgctgtcttagtggggaagaggtagaactctcatatttacaaaattattgggctatttgtgctcagctgatactgtcagttcccacagagatgtcaaagtcaggatgcatttaagttagaggtataacattgaagttaggctttgaagttaggcctagatttcaatctcagctcctctactgactagtcaggtgtaaattctctaagctgtctttttgcatttgttaaatgaggctaaagcctacttcagaagtttgctctgaaaaaatctcattttaatttagtactgtagacagagccttcagtggaaccagtacaatgcagatgatccataaatgggattgctgataatatagtcttcattttaggtgtctctctaagtaaatactaaggagggattcttacgtaaaagttaatctatttatgcatattctagtcaatgctgaagtgagactctaaattgcaatatactcgggagcagatgatctcaattttgctattgtaatatttttcttatgtcagctcattcaatagatatttattgagcaactactatatatgtgtcaagcattattcaaagtactagggatatagtgacaaaaaggaaagttcttgccctcatgattaatgtattctggtggaggagacaaacagtaatcaaactagccaactaactacgacctactctgcatggcgagagagagagtgattaggtagtatttgagacacagtggttgagtcacttgttctcttaagcagacccctgaggtaagcaaaggactaagccatttgggtatctcagggaagtgagtttcaaaacagagcaaatatatcacttgaataagtgcttaaggattaattagttaattttgttgtaagtgtaaagacaataaaaagaccttgcagaaacgtttgtttttaacttattaccctattaacctaaagcaatacagaaaacttttcctaccaatgtttttctacatttattcatgtatgtgtgcacacataagttattgtgtgcctaaaattctttttttatacttaagcatttctccatgttgtttcatcataatttcataatagttttataataattttaacattatcaattattccattagggatttatgtaaataaacaaaaaataaaatgctatatgcctaaagattttcactgaagcattattatagttccaaacattggaaacaactaaatgtattaacaatagtatcatatttagattacttctggtgtttagtagtactataataaatatcattaaacataatgttttcttcttctgaattatttgtattaattaattcctaggacttagatgtctacatcttttttaaaaaaaaccttgatgtagattatcaagtgactctccaaaagaataatacagttaatattattaccaggaatatatgaatatatggatcattccatatatcttccagtattgagtatatttatttaacactgtttttactacttagctaaaattagaaattcaactactaattagcaaaaattacaacttcattgttttcttttgagtttcctgacttataatgtccaacatattattattttttttcttttctatttttattattattatactttaagttttagggtacatgtgcacaatgtgcaggttagttacatatgtatacatgtgccatgctggtgtgctgcacccattaactcgtcatttagcattaggtatatctcctaatgctatccctccccactccccccaccccacaacagtcctcagagtgtgacgttccccttcctgtgtccatgtgttctcattgttcaattcccatctatgagtgagaacatgcggtgtttggttttttgtccttgagatagtttactgagaatgatgatttccaatttcatccatgtccctacaaaggacatgaactcaccattttttatggctgcacagtatttcatggtgtatttgtgccacattttcttaatccagtctatcattgttggacatttgggttggttccaagtctttgctattgtgaataatgccagaataaacatacgtgtgcatgtgtctttatagcagcatgatttatagtcctttgggtatatacctagtaatgggatggctgggtcaaatggtatttctagttctagatccctgaggaatcgccacactgacttccacaatggttgaactagtttacagtcccaccaacagtgtaaaagtgttcctatttctccacatcctctccagcacctgttgtttcctgactttttaatgattgccattctaactggtgtgagatggtatctcattgtggttttgatttgcatttctctgatggccagtgatgatgagcatttttccatgtgtcttttgcctgcataaatgtcttcttttgagaagtgtctgttcatatcctttgcccactttttggtggggttgtttgtttttttgttgtaaatttgtttgagttcattgtagattctggatattagccctttgtcacatgagtaggttgtgaaaattttctcccattttgtaagttgcctgttcactctgatggtagtttcttttgctgtgcagaagctccttagtttaattagatcccatttgtctattttggcttttgttgccattgctttttttgttttagacatgaagtccttgcccatgcctgtgtcctgaatggtaatgcctaggttttcttctagggtttttatggttttaggtctaacatgtaagtctttaatccatcttgaattaatttttgtataaggtgtaaggaagggatccagtttcagctttttacatatgactagccagttttcccagcaccatttattaaatggggaatccttccccattgcttgtttttgtcaggtttgtcaaagatcagatagttgaaaagtatttattttgcggctattcgttgatttgtgaggtgcacttgttttaaaaggttttaaaaagcaatcaccgtgagtttctcattctcagtgtagctccattacctggacatgggatcagtaagactcaagccaagaattttctaatatgtgtcttaacagtgaaaatttcatgtattaaagagaaagttcttatacctcaacaaattgctttttaaatgtttttattatagtacagtctaaacataaatgtgcttccttacctagcttcagtaagtataagtgttttgccaaatggattcctctattaaccttcacccatccatccacattttttcttgctggaatattaagaagcaagtttagaagtcatgtaatctcatcattaaatacttcggcatgcatcacttttagctgagaaggtctttttaaaaactacctttatgcttaacaaattaagaatttcttattatcatttacaattcctattcagatttctaagaaaatatcacaggcttggtttgcttgaatcaggatctcagcaaggtcagtgcattgcattttgctgttttgtctctcaaatttaaaaaattctattattagtcctctctttgctgcttttttatactatttatttgttaatgaatccagaacctatatcccataaaatatcccatattctttatttgactggctgctttctcatgatactgttttttgctttactcctgcccccatttcctatattttccttaaactattagtttagacctagagatgactaggtttaggttcagttttcgggggtctggatgacaagaataggtttcaggtggtgggtgcagtatacttcttgttgaatcacatcaagaggtgtataatgactggttgaccacttttattgatactaacattgaccactaaatttaagcagtgtcatcccgatccctctattttaaagttccccattaatgacaattacctaaatccaatggaataggtagtaaaatgctgagttttctattattccttccatatttattagctgagttctacaaaaactttctatcatcagttattgggttatcttggaatatatctcatacaggaaaggtgagataagtgtttgacactttctattaataagagtaatgaattaattataagggtaatgaatgggttcattaacaatatccagtggagactaataaatttttatttttaaaaaatcattatgaactcatggagttatatatacttggtataatttgatctattgaattagtattttttaatgctcaaatttttttatctgaggtcagaggtagccccttcaatttggttactgtatctttctgatatgatcccagtaatcttcctatttccttggcacagcaagatatatcaggcctaacttgtcaactctgccacatacttggaatcatccatttctccaaaaagactgcttcattgaggatatttaaaaattagcagtgttcattatttctgggatgtcatttcttctaggtttttcagtggacagagcttcagatctactttttaaggtttttaaattttatagagacaggatctcatgctgtctcccaggctagagttcagaggtgctatcatagcttgctacagccttgaactcctggactcaagcgattctcccacatcagccttctgagtagctggcactacagatgtgtaccaccaggtctggctaattttttaaaattttttgtagagagtgggtctcactacattgcccagggcttgtctcgaactccaggcttcaaccagtcctcccgcctcagcctctcaaagttctgggattacaggcaggagccactgcgccctgatagaatctgtcattgttgttgttgttttttttaaagaaaagtaagtcatgagttcatactaatatatctgatatagtataatgatacagttttttgtttgatttgtttgattatttgtgtcttttttaatgctggaaatcttgctttccaaaggcattaatataattatttgctttattatgtaatctacctgtaataagttcaaaaaatatataaatattgtaaatgaacaaattatttttattgtgtatatatattgtattattttattgtatattttaaggtacacaacatgatattttgatatacacagtgaaatatttattacagttaggcaaattaacatatccgtcctcactcacagtaacccttttcatgtgtatatggtaagagcatcagaatctactcacagcaaatttccagtatatataaaaacagtttaagacacttctcaaaagaagacatttatgcagccaaaaaacacatgaaaaaatgctcaccatcactggccatcagagaaatgcaaatcaaaaccacaatgagataccatctcacaccagttagaatggcaatcattaaaaagtcaggaaacaacaggtgctggagaggatgtggagaaataggaacacttttacactgttggtgggactgtaaactagttcaaccattgtggaagtcagtgtggcgattcctcagggatctagaactagaaataccatttggcccagccaccccattactgggtatatacccaaaggactataaatcatgctgctataaagacacatgcacacgtatgtttatggcggcactattcacaatagcaaagacttggaaccaacccaaatgtccatcagtgatagactggattaagaaaatgtggcacatatacaccatggaatactgtgcagccataaaaaatgatgagttcatgtcctttgtagggacatggatgaaattggaaatcatcattctcagtaaactatcgcaaggacaaaaaaccaaacgccacatgttctcactcataggtgggaattgaacagtgagaacacatggacacaggaagaggaacatcacactctggggactgttgtggggtggggggaggggggagggatagctttaggagatatacctaatgctaaatgacgagttaatgggtgcagcacaccagcatggcacatgtatacatatgtaactaacgtgcacattgtgcacatgtaccctaaaacttaaagtataataataataaaataaaataaaatatttctttgtagcttgttttgtctttagattgcatcattaggactgtacactctgaacactatcatttaaagttacttgaatgaactatttcgtttttattattattatactttaagttctggtgtacatgtgcagaatgtgcaggtttgttacataggtatacacgtgccatggtggtttgctgcacccatcaacccatcatctacattaggtatttctcctaatgctatccctcccctagtcccctgcctccatcaggccccagtgtgtgatgttcccctccctgtggccatgtgttctcattgttcaactcccacttatgagtgagaacatgcggtgtttggttttctgttcctgtgttagtttgctgagaatgatggtttccagcttcatccatgtccctgcaaaggacatgaactcattcttttttatggctgtattttattccatggtgtatatgtgccacattttctttatccagactatcattgatgggcatttgggttggttccaagtctttgcttttgtgaatagtactgcaataagcatatgtgtgcatgtgtctttatggtagaatgatttataatgctttgggtatatacccagtaatgggattgctgagtcaaatggtattcctggttctagatccttgaggaatcaccacatagtcttccacaatggttgaactaatttacactcccaccaacagtgtaaaagcattcctatttctccatatcctctccagcatctgttgtttcctgactttttaatgatcgcctttctaactggcgtgagatggtatctcattatggttttgatttgcatttctctaatgaccagtgatgatgagcttttttttttcatatgtttattggctacataaatgtcttcttttgagaagtgtgtgttcatatccttcagtcactttttgatggggttgtttttttttcttgtaaatttgtttaagttctttgtagattctagatattagccctttgtcagatggatagattgcaaaaattttctccaattttgtagattgcctgttcactctgatgatagtttattttgctgtgcagaagctctttaatttaattagatcccatttgtctattttggcttttgtagccattgcttttggtgttttagtcatgaagtctttgtctatgcctgtgtcctgaatggtattgcctaggttttcttctaggaattttatggttttaggtcttacgtttaaatctttaatccatgttgagttaatttttgtataaggtgtaaggaaggggtccagtttcagttttctgcatatggctagccagttttcccaacaccatttattaaatagggaatcctttccctgttgcttgtttttgtcaagtttgtcaaagatcagatggttgtagatgtgtggtgttatttctgaggcctttgttctgtccattgatctatatatctgttttggtaccagtaccatgctgtttttgttactgtagccttgtagtatagtttgaagtcaggtagcatgatgcctccagctttgttctttttgcttaggattgtcttggctatgcaggctctattttggttccatatgaaatttaaagtagttttttctaattctatgaagaaagtcaatggtagcttgatggggatagcattgaatgcataaattactttgggcagtatggccattttcacgatattggttcttcctatccagaagcatggaatatttttccatttgattgtgtcctgttttatttccttgaacagtggtttgtagttctccttgaataggtccttcacatcccttgtaagttgtattccaaggtatttaattctgtatagcaattgtgaatgagtttcactcatgatttcgctgtctattattggcgtataggaatgcttgtgatttttgcgcattgattttgtgtcctgagactttgctgaagttgcttatcagctttaggagattttgggctgagatgatggggttttctaaatatacaatcatgtcatctgcaaacagagacaatttgacttcctcttttcctatgtgagtaccctttatttctttctgttgcctgattgccctagcgagaacttccaacactatgttgaatatgagtggtgagagacggcatccctgtcttgtgccagttttcaaagggaatgcttccaggttttgcccattcaatatgatattggctgtgggtttgtcatagatagctcttattattttgagatacattccatcaatacctagtttattaagagattttatcatgaaggggtgttaaattttatcaaaggccttttctgtatctattgagataatcatggtttttgtcattgtttctgtttatgagatggattatgtttattgatttgtgtatgttgaaccagccttgcgtcccaggtatgaagctgacttgatcgtggcggataagctttttgttatgctgctggattcagtttgccaatattttatcgaggattttcacattgatgttcatcagggatattggcctgaagttttctttttttgttgtgtctctgccgtgttttggtattagcatgatgctggcctcataaaaatgagttagggaggattccccctttttctattgtttggaataatttcagaggcaatggtatcagctcctttttgtacctctggtagaattctgctgtgaatccacctggtcccggacttttttttggtcggtaggctattaattactgcctcaatttcagaacttgttgttggtctatccagggatctgacttcttcctggtctagacttgggagagtgtagtgtccaggaatttatccatttcttctagattttctagtttatttgtatagaggtgtttacagtattctctgattgtagtttgtatttctgtgggatcagtagtgataacccctttatcatttttttgtgtctatttgattcttctctctttttttctttattagtgtggctagtagtctatctattttgttgatcatttcaaaaaaccacctccgggattcattgattgtttgaagggtttttcattctctatctccttcagttctgctctgatcttagttatttcttgtctcctgatagctttttaatttgtttgctcttgcttctctagttcttttaatgtgattttagggtgtcgattttagatctttcctgctttctcttgtgggcatttagtgctataaatttccctctacacactgctttaaatgtgtcccagagattctggtactttgtgtctttgttttcattggcttcaaataacttctttctttctgccttaatttttttatttacccagtagtcgttcaggagcaggttttcagtttccatgtagttgtgcggttttgagagagtttcttactcctgagttctaatttgattgcactgtggtctgagagactgtttgctatgatttctgttcttttgcatttgctgaggcgtgttttacttacaattacatagtcgattttagaataaatatgatgtggtgctgacaagaatgtatattctgttgatttcgggtggagagttgtatagatgtctatcaggtctgcttggccaagagctgagttcaagtcctgaatatccttgttaattttctgtctcattgatctgtctaatattgacagtggggtgttaaagtctcccactattattgtgtggaagtctaagagtctttgtaggtctctaagaacttgctttatgaatctgggtgctcctgtattgggtgcatatataattaggatagttagttcttcctgttgcattaatccctttaccattatgtaatgcccatctttgtctcttttgatctttgttggtttaaagtcttttttatcagagactagaattgcaacccctgcttttttttttctttccgtttacttggtaaatattccttcatccctttattttgagcctatgtgtgtctttgcatgtgagatgggtctcctgaatacagcacaccaatgagtcttgcctctttatccaatttgccagtctgtgtgtcttaattgggacatttagtccatttacatttaaggttaatcttgttatgtgtgaatttgatctggtaattatgatgctagctggttattttgaagaactgttatgaacagtttcttcatagcatctatggtctttacaatttggtatgtttttgcagtgactggtaccagttattcctttctgtgtttagtgcttccttcaggagctcttgtaaggcaggcctggtggtagtaaagtctctcagcatttgcttgtctgtaaataattttatttctcttttgtttacgaagcttagtttggctggatatgaaattctgggttgaaaatgcttttaagaatgttgaatattggcccccactctcttctggcttgtacagtttctgccaagagatccgctgttagtctgatgggcttccctttgtgggttacccaacctttctctttggctgcacttaacattttttccttcattttgtgtccgaaattggtgggttcttggtctcactgacttcaagaatgaagccgcggacccttgcggtgagtgttacagttcttaaagatggtgtgtccggagtttgttccttctgatgttcagacatgttcggagtttcttctttctgatgggtttgtggtttcgctggcttcaggagtgaagctgcagaccttcacggtgagtgttacagctcttaaggcggtgcgtctggagttgctcattcctcccatctggagttgttcattcctcctggtggattcgtggtctcgctggcctcaggagtgaagctgcagaccttcgcggtgagtgttacagctcataaaggcagtgtggacccaaggagtgagcagcagcaagatttattgcaaagagtgaaagaacaaaacttctacagtgtggaaggggacccaagtgggttgccactgctggctcgggcagcctgcttttattcccttatctggccccacccacatcttgctaattggtgcattttacagagagctgattggtccattttacagagagctgtttggtctgtcttgacagggtgctgactggtgcatttacaatccctgagctagacacagagtgctgattggtgcatttacaatcctctagctagacacaaaagttctccaagtccccactagattagctagacacagagcactgattggtgcatttacaaacctttagctagacacagagtgctgatgggtgcatttacaatccctgagccagacacagagtgctgattggtgcatttacaatcctctagctagacataaaagttatccaagtccccacctgactcaggagcccagctggcttcgcctagtggatcccatgccagggctgcgggcggagctgccctccagtctcgtgccgtgcgcccacactcctcagcccttgggcggtcgatgggactgggcgcctcggagcagggggcagcacctgtcggggaggcttgggctgcatgggagcccactgtgggggtctcgggcatggcgggctgcagatcccaagccctgcgccacagggaggcagctgaggcctggcaagaattcgagcatgacacaggtgggccagcagtgctaggggacccagtgcaccctccgcagctgctgtctcagttgctaatcctctcactgcctggggctggcggtgctggccggccactctgagtgcggggcctgctgatcccgtgctacccgaaactcccgctggcccacgagcaccgcatgcagccccagttcctgcccgtgcctctccgtccacacctccccgcaggcagagggagctggctccagcctcagccagcccagagtggggctcccacagtgcagcggcaggctgaagggctcctcaagcgtggccagagtggatgccgaggccaaggacgtgccaagagcgagcaagggttgcaagcacattgtcacctcaatttcaaccttggtgaatctgatgattatgtgtcttggggttgctcttcttgaggagtatctttgtggtgttctctgtatttcctgaatttgaatgttggcctgtcttgctaggttgaggaagttctcctggataatatcctgaagagtgtttttcagcttggttccattctccccataactttcaggtacaccagtcaaacgtagatttgtttttttcacatagtcccatatttcttggaggctttattcattccttttcattcttttttctctaatcttgtcctcttgctttatttcattaagttgaccttcaatctcttatatcctttcttctgcttgatcaattcagctattgatacttgtgtatgcttcacaaagttcttgtgctatatttttcagctccatcaggtcatgtatgttcttctctaaactggttattctagttagcaatttgtctaacctgttttcaaggttcttagcttccttgcattgggttagaacatgctcctttataaagctcggaggagtttgttattacccaccttctgaagcctacttctatcagttcgtcagactcattcttcatccagttttgttcccttggtgttgaggagttgtgatcctttggagaagaggcattctggtttttgggattttcaccctttttgcattggtttctccccatcttcttgagtgtttctacgtttggtctttgaagttggtgaccttcagatggagtgtctgagtggatgtcctttttgttgatgttgatgctattcctttctgtttgttagttttccttctaacagtcaggctcctctgctacaagtccacgggagtttgctggaggtcgactccagaccctgtttgcctgggtattagcagcagaggctgcagaacagcaaagattgctgcctgttccttcctttggaagcttcatcccagcagggcacccaccagatgccagccagagctctcctgtatgaggtgtcagttagcccctattgggaggtgtctcccaatcaggagacacgggggccacagacccactcaaggaggcagtctgacccttagcagagctcgaaccctgtgctgggagatccactgctctcttcagagctgtcaggcagggatgtttaagtctactgaagctgtgcccacagccaccccttcccctgggtgctctgtcccagggagatgggggttttatctataagcccctgactggagctgctgcctttttcttttcagagatggcctgcccagaaaagaggaatctagagaggcagtctagccacagcagccttgctgagctgcggttggctccacccagtttgatcttctgagtggctttgtttacactgtgaaggtaaaaccacctgctcaagcctcagcaatggtggatgcttctccctccaccaaattctagtatcccaggtcgagctcagactgctgtgctggcagtaagaatttcaagccagtggatcttagcttgctgggctccatgggggtgggacctaccgagccaggccacttggctccctggcttaagccccctttccaggggagtgaacagttctgtctcgctggcattccaggtgcatctaggttatgaaaaacaaaaaacaaaaaaacttctaaagctagctcagtgtttgcccatacagccgcccagttttgtgcttgaaacccagggccctggtggcgtaggcacaagagggaatctccaggtctgcggtttgtgaagactatgggaaaagcacagtatctgggccggagtgcactgttcctcacggcacagtttctaatggcttctctttgttaggagagggagttccctgaccccttgtgctttctgggtgaggcaacaccccaccctttttcggcttgccctcaatgggctgcacccactgtccgatcagtctcaatgagatgaaccggttacctcagttggaaatgcagaaatcacctgccttctgcatcgatctcactggaagctgcagacctgagctgttcctattcggtcatcctgccagcaatctccaaattatttattttattgctcatgtcatcagtttgatatacagttaattttcttcaatttgattcaattttttagggattcatgtttttccattttaatttttttacttttttttttttttttgagacagagtctcactatctcccaggctggagtgcagtggtgcgatctcggctcactgcaagctctgcctcccgggtttacgccattctcctgcctcagcctcccaagtagctgggactacaggcgctcgccaccacacctggctaattttttgtatttttagtagagacggggtttcaccgtgttagccaggatggtctcgatctcctgacctcgtgatccacccgcctcggcctcccaaagtgctgggattacaggtgcaagccaccgtgcccggccaattttttcactttttaattatgtacaacaatagttgaaaccatacatatactcaggagtggaatataattagcaaatattttcttcagattgttatttgtctttgtttatggtgattttttgacatgtgtaagtcattcagatatatttttatgtagctaaatttattaatatttaacttgcttttggaatttgggctttatttatgacagtttttctgtttccagattaaagaggaatacatcattaatgacaagatatgaaatgcaaatgcacacattaaaaaaaccctaagtatcattagcctttcgggaaatacaaatcaaaactaccatgagataacattgtatagatagataacatccatttgattgattaaaaaggaaatatatggatatatcaagtgatgtaaagactgaggaataattgggattttcatacactgctggtaaacaataaaaataatatacccacacaaaaaataaaaaaaggaggaatacatctatttttaattcaaatatatggtatgagtcattgtgtttagatcttgcatccatctggaaattattatttagtagtattttattttaaaatatcagatgctttttttcttcccagatgctgttttagatattagagatataatggtgacaagatcaacaatatctagtttctctcagagctaatgttcctgtaaggggagacagcccacaaagatgattttaaataaaggtaaatgccataaagacggtgaaagaagatgatgtgacaaggagggactgaagagatgcctctctgataagatgatatttgagtgattcttgcatcacatgaagaggacaactatatcaggctctgggacagaactatccaagccaagggaatacttagtacaaaggcactgaggagcaatagcccctaacacttattaaatgtttactatgaaccagacacaatgccaaaacacttcctctgcattatctcatttatttcttacaactaccctttgaattaggtaacagtaatcatcctattttgaatatgaggacacagattgaaagggcctcctctcagtctccagtgtagctttcagggctcaacctgcaacagtgaattcctgattttatctctccaggctttcatgagaaggacaagaagccatattgccgaaaggatttcttagccatgttctcacccaagtgtggtggctgcaatcgcccagtgttggaaaactacctttcagccatggacactgtctggcacccagagtgctttgtttgtggggtctgtataatcacttttctttcggacttagggaaagtcaagggttctcctctctgagaggaagagctgcagttagtgaaagggttcacagtcctgaatgaggaatggatgtgcgcatcctaaaggagaaacgagatacagatccatttgcttgtctgttttgcaagcgggaaatctagtctccatttgtcaagaacctgagggaaattcctgtagctggcaggtaactgtcaggaatttcaaggctgaaaattttactttgctgacattttacctcttgacatttgcattctttttctctctcttctctctaccccaggactgcttcaccagtttttctactggctccttctttgaactggatggacgtccattctgtgagctccattaccatcaccgccggggaacgctctgccatgggtgtgggcagcccatcactggccgttgtatcagtgccatggggtacaagttccatcctgagcactttgtgtgtgctttctgcctgacacagttgtcgaagggcattttcagggagcagaatgacaagacctattgtcaaccttgcttcaataagctcttcccactgtaatgccaactgatccatagcctcttcagattccttataaaatttaaaccaagagaggagaggaaagggtaaattttctgttactgaccttctgcttaatagtcttatagaaaaaggaaaggtgatgagcaaataaaggaacttctagactttacatgactaggctgataatcttattttttaggcttctatacagttaattctataaattctctttctccctctcttctccaatcaagcacttggagttagatctaggtccttctatctcgtccctctacagatgtattttccacttgcataattcatgccaacactggttttcttaggtttctccattttcacctctagtgatggccctactcatatcttctctaatttggtcctgatacttgtttcttttcacgttttcccatttccctgtggctcactgtcttacaatcactgctgtggaatcatgataccacttttagctctttgcatcttccttcagtgtatttttgtttttcaagaggaagtagattttaactggacaactttgagtactgacatcattgataaataaactggcttgtggtttcaataactcattgtcatatttgtttgggagataaactttctgcttcccgtgttatatactaggcactatgtacaattaagattatatcatacctcgtttccttccatccaatgcacactttaaaatttttaatcagaagaaattaaaaggagggtctccttttcactaatttttcttttttttctttttagtttggtcccataaccattttattttctagacttagatgattgaatcatttttaaaaatgacaaagcttcttaaaattgtttttattactttgtttacaggaggagaaaccctggctctccattagaaaccttacaaattcatttctttttccttttttttttttctgagatggagtttcgctcttgttgcccaggttggagtggaatggcgcgatctcggctgaccgcaacctccacctcctgggttcaagcaattctcctgcctcagcctcctgagtagctggaattacaggcatgcgccaccacaccaggctaatttttctatttttagtagagatggggtttctccacgttggtcaggctggtctcaaactcccgacctcaggtgatccacccacctcgacctcccaaagtgttgggattacaggcgtgagccactgcgcccagccacaaattcatttctaaagtaaaaaatgaaacacaatttcacatttgcctcctgaagacaaatgagatggctgttcttagagcatctctgaagaaagatgctataaataaagctcaaatgattattatctagaattaggaaagccaagactcaaagaaaaattcctcttaatcatttgttcatctcaaaatattataagtaaatgtttagaaaagcttgtcaggttatcagagaatctgattttcttatgtcctgtcagtttactgtcctacagtttactttttataaaagtaagcttcacaaggactaatctttctgcaaaagggatattgagaagatcagtacaatatctttcttcccgtggtcttaaaaataattgtgtgattatttgttataacaaaaaccagactcttagaatccttgattctgagataagttactggcgaaaactccttcactggaggtatttttaaaaataggacaaaatttgatgtctttagattgatagaggaatagtactacttgggagagctgaaatggattaaatgtttcttgccaaactttattatatctatgtcctttgttggaatggataataagggggttgtgagagttacaaggaattggcaacagttaattctataaaataggaactccaaatgcatgtaagatatgtgggaggccacacagatacggaaccatctggcctctatcctgtttggctgtctgagagcgccagactatgcagaacacacattcaacttttaaacatcctctttgcaatgtcttcactcaacgatgtcacacgcaggtgttaatatggcaatgttcttggttgccttggcaatttgacaaaataaacttggagttttagcccttaaaaagaaatgtacaggtgctaaaacttttttaaaaaggattagctattttgagattcaatagaatttaactatttttaaatgtcaaagaaaatccagagttcactaagatgtaattaagaagtgaaaacactttcttcccacattgaacggaagtggttttatttgctcaaaaagagatactgacttcaggaccagtgttttagcaataaggaaactactcacaagtaaaaagttctgctttttaaaaaccctggaaatgccattactaaaattgatcacgtacttatttacttttggttttgagtaacttctaggatgtttaaaaaataaaacccaccctcacaggacagggattttccaccagtgaatataaacatatagaaaggaatatgctctagagttggcactgtattctcaaaggggagtccctcaattagtttggtcagtttttctttgaagtaaatttagtctcttccaaggtaatactttgataaagacaacaattatttttccatccaagttctatcacacactcttcttggagttgtaggatggctgccagcgcatgcttcttgtttcataaccagtagggggagcaagagtgcttttatcgagcatttgcaagcaaaagttctgggattcatcctcactggtctagcctaggtcacataccagtaatttttgctgggggaatggattctgcagcttggcttaaaccaaactgaattatttccaaagttacaagcaggactaagtttcccgaaagcacaagggctttgtggaggagatgtgaatactttaaaagctggatattggtaagaagcgggaagaggacaatgaatcttgaattcgtgtgttcaaaagtgaaaatattggagtttctgagtttcaaggtaatgtagaaggtaagcaagcaggcattgtcagtatcctgagggatcatgtccaagaactttacagaacccaaaggcagaggagagagccaggaatgctggtgtcctgaggaacatgcggcagtggcactgctcttcctgggcccctaggggcgcaccactgagaagcatcaaaagcaccttcagtttggcagtctggaaaaggagatcttgcagctgaaatcaaggtgagaaagagtagcagcttcctttagaggcgagtgtcttaggcataagcacgtcctcaataaggcagtggtggcagccactgaaatatgacactgaaaaagagattgcctgtccccaaaatattgtggaggttgtgttactaggtaccatcagtgcagcacattaagtgctgggaacacagagctcagtggggaaatggaaatctcttgggatccacaggataaaaaagaaagaaatctcaggtaaaagctggtgcttgggttgtacttgttgcaaatttataactttgccagaaggcagtgttgtctcaaatttataagaaaggagacagtttatgtaggacattcccctaccttagatatagtcagcgtatagtgcctaaattgattttccgtggggagaagtctcctaactgtgtttaggttcatagaccatggattacggacaattgcataaacttcctggcaccctgttgagagccatccatcttcccttcctattttggatatcattaaatcacaataaatactgtattatgggaataacatttttcctgggataagtacctccattctagcgagagatatctcagatcacaggtgttactggaaaaactcctaaagctgaaaatgaacagaccaaggaatcaaagaaggctttactttctctaaactttaacttagagaatttgattttggattttaatgtttttggactttgatatgctatgttgaataatattattggatataattgaggatgggacgtgaaatgaaaggggagtgaatttctgagctgtttttccccacagtctagtttctccacaaagaactgcatctcccattcttggtccatgtgtttaggcaaggctgactttaacctcagcctcagaaataggtacagtcccaggtctgaccaataaaagtactttgttcttctgaaggaaggtgattggatcagggatagacatgtgacctcagcaaagccaatgacctttactagatttattcagaaagaacattcccattcgttggaattctagttgtgcggataataaaaacccattgctgctgataaatatttttatcatcacttgggggaggctgtctgagaaagaggccagcacagtggaacgtagaaccaagtaatggagaggctgtgttttctttttttgagccactcagttctaccatagcagcatcttaaccatagactaggaaattatgtgagcaaataaattctcttttttgtttacattgaacaaataaactcagtgttggtacagaacgtatattgtatatcgtcatgaaaaactaatacacaaaaatagtgtttgatcacttcttgatgctttttacaccagagcacagtgaaactctgtagtttaaggttaagtcatcctgtggatagctcgcatatttagagtacaagcttcttgctcctgtccaattttgcagtatctgtcactattacaaaggggaagaaaaaggttgtgagggtgttgtcatcctctaagatttaaaattgttttggaaatgatggtattcatgctactttgtttaattataatccagagagaactattacgtatttgatattactgcaatactctttatagtgaaaactagttttaaaacatcctgataccccactagcaaacaaaaaaggaagaaaaattagacgattataagagaaatcaatttacatttatcctgtgtcttagtctgcgcagttgccaaaacaaaataccataaatggggtgtcttaagccacagaaatttattttctcatagatctggagatgagaagtctcagattaaggtctgcaggtttgaattctgttgagggctcttttcttggcttgcatatagctgccttcttgctttgtcctcacagggtgaaaagagggagagagagagagaccacaagagatctggtgtctcttcttgtaaggaaaccaatcttatcagatcagggcccaacccttatgatttcgtttaatcttaattacttctttacttaaaatacagccacattgggggttaggccttcaacatattttggaacgacacattcagtccattacatcctgaaaggtgctacttaaagaaaattgggtttatatgaagttaaggaggaaaaagaagacatttatagtgattctgagaggggaccttagggacacttttcaatgctttggaagtttgaagtggttattttcattatgttcaataacacttagaaaataggactttctgtctctaggtgctcttgcattttcagacatgagttagaaaatattggaggctcaaaaataaaatgaagaacttggagattttcctaagataatctgaaaattttgaaatggaggaaaagtaggacggaagaaagttacaggatatataagataatttttgagttgggcaaggtgaaattttcagagctttcagtaaaggaggcaagatgggccgtataacacactatctgaggaaaagaaagacagagtggggggaattgtcactcagttcccttacacaaactacctggtgaagctactacttaccctagattgtctcacaatttggggtttttctagaagtggatgctgagactaggacttgtgtatagtagtctatttaggaggcaatctctagatgtacagctagaagagccaaaagtgagatattttctatattctacagggattacgcctgtaatcccagcacttagggaggccgaggtgggcagatcacgaggtcaggagatcgagaccatcttgaccaacacagtgaaaccccgtctctactaaaatacaaaaaattagccgggtgtggtggtgtgcagcctgtagtcccagctactcaggaggctgaggcagaggaatcgcttgaacccgggaggaggaggttgcagtgagccaagatagcgccactgcactccagcctgggcatcagagtgagactccgtctaaaaaaaaaaaaaacccaaaaaaacaaacaaacaaaaaagaaaaggcaaggaagccaaatcagtgtgcattaatgagcagattactgtcttgggaagttggaactcaatactcagaggacctctgggattcattgtagagtacaagaggtggtccaccaacccttacaccccactttgtcttccttgtactcaagctgcatgtactctgaggccaaagaaagccctttttctaaatcacaggcactttgagtaggagcagcagtgtgtacctagcagtaagtgccaacagataggggtggggaactaatgccatttgttgggtaaagttatcgaggggtaaggttaaaaggaagaaaatcataccaaaggacttcacattaccggtaatcacaagaccgaatttgtggtaagccatgcatttgcaaagttttataatattcccagctctatgaagcttaatgtatttcatctaaggtagtattagtagaggggatgacagaagggagaaagtgggcaaggattattatttccatttacctgtggaagaagcagttgattacatgaataggtcaaggtgacttgatttagaaacagaactaaagtttgttaattccttgtctgggatgctttcttttaggctgtatatcaacaatgtaaagtgcccatgaggtgaattttcaagggacaagcaagggcactagggcatcaaagtgatctgctctaggctacactgttttggttatagtggcaagaatagcagccatggcttcaggcaaaccaaaatttaaaagttgagtttaccacttgcaaactgtaagtgaatttaccgcttgtaaaccttggttaaaccacttatcttctacaaatttaggtttcatgatatgttaaacatgggtaataatatccacgtgggtttgttgtggggattaactgagataatacgtgagaaagggctttgtaaactgccaagtaccatacataaaaggcattaacaaaatagtccaagagatatgtgaggaagtcaacacagcatccattcctagcatttccatggagaccatgaaaccatagcaggcttttagttgtttttgtatgattttagaaatcttttttaaggctcaggatgaaagctgatggaattgaaaatgctgggagattaagagaagagcttgagtttgagctcataatcttcctttacagcaacatattgacaaaataatactcaggagtgaacgatctccatggcacagaaatctatgcagttagctacttcccatagatggaaaacagctcacccaggtcaaggaggcatagccatgagaaaagagctcaggagccttccagggccaagattttccactgcctgccatagatctaactataatccaagggaaattcctaggaaaatcttttttaacgctattacttaaaataattcagcttgggaaagatacaattccatatgccttctgatcaacagctaggtaatggatggtactctgttagccaataccagactcactgacaggaatattgtgatcttttggtatatggatcatttgagactgatgtaattgagttgcagttaaaaggtggggaagactttatgttgtgggtcttgacttcaggtttgagtttccatcccagctctaccacttactagttctgttccttcatgaatatcctttggtttttgagcatttattcactcactcagggaaaagaaagttgagttagaagtgtagttccaaggatgatcaaagttgagaagtaatttttggatgtaactggacagagaccacagagatggagatattgttgatttaagagatgtgaggtgacataactaaaccagattctaaaggatacagatgatatggaggcaggagcccagatgagagttatacttaggaacaagagtgttccatcttctatgtgtttacgtatgcaagtgttttgtaacagcagacagatgcagtttccttttcaaaagtgggagcaagatatatttcaagacaccagtttaaactgttttcattagcaaatagccccagggtttatcaatttaaaaattttccatatttgttcataatgacaagcagacagtgctactttaaactatcacatctagtgatctggaagctagtttgttgagttaaggacaaatacatttccctgaggtgggctcctaaattgatatacctgtgccttctccaatttattaaatagagaatcagatgggatttgcataattcagtaggtacttactgtcaaaaggcactgttctaggttccagaagaaacctaagatgagtaaggcatagtttgccttcaaaaagtttacagcccagcaaggacccacacattcagtctctaatacgagtttgtccatacaggatggtttctggacaggattgtgtaataggtaggaatataggagtgggagaagctaaagtattgtgttctaggaaaagaaacaaaaggagacataatatacaggagaaaataacacaaagcaatttgaaaaaaaaaatgctataaataggacacacataattgtttaaaacctcggagaaaaacttcactttggagatggcattaatttgaacctaaaagtaaaagtgattaaaaaaaataaaactagggcattccaaactgagggaacagcacgaaatatgtcaaagggggacagcatacatggtgtggtgagtgaaggaaggacccagttcactgagcgtccacagtgtgccaaacactgcggcatgggcccttggggtctatgtggatagaaagtaggatgcctggtggctatcaagagaaataaaaactggaaaaactgttcagggttagagtgctttgaatgtcaggcttgggaagcgggacatcatcttgtaggcaacagtcatcaacagtgttgaatgcagtggattgtggagagaatgggaggtagcagaaggtgtgaccacgcacgagctggggttccaagttttctgtgtttgctccattgtcccattggactttacctacaaaatgcaaattcaaagataacattttaaataatttgaagatgacaatcacaagatgttagtctcaaagggtgggacttttctgagcacagggtctgttttgcacatctgtgaagctagcctcggagcaacctttaagaatattgtttcagctagacaagagaaataagtgttgagatttatggcacttcagggtgactatagaaaataataatatgtcaaaataacttacagagtaaatttcaaatgtatcaccacaaaataatgtcaagcctgggtgcagtggctcatgcctgtaatcccagcactttgggaggccaaggtgggcagatcacgaggtcaggagattgagaccatcctggctaacatggtgaaaccctgtctctactaaaaatacaaaaaattagctgggcgtggcggcaggcgcctgtagtcccagctactcaggaggctaaggcaggagaatgtcgtgaacccgggaggtggagcttgcagtgagccaagatcacgccactgcactccagcctaggtgacagagtgagactccgtctcaaaaaaaaaaagaaaaaaggtcaagaggtgatgtctatattagcttgatttaattgctccacattgtatatccatatcaaaacatcacatcatactccataaatgtaatacaactgtgatttgtcaattaaaaataatataaataaacaaaagaaaaaagaatattatttcaacatagtggagtagaaacagttgaagctacaatgcagtggattaggagagaatggaagatgctgtggaccacttttgatcattttgatggtagaaggaaggatgctggtatagcacaagaatatattaggatgggagacagattcttgaacatttttggggaagagatggtaactttagaatgtctatggacaaatggggtaggaatgagtaagggagggtggagggacaggagtaattgccatagtatggtctcaccaaagtaagtagagatggatcaatggcatagatgaaggggccagcctgctacagaagagggggaaattctgaggtaggaaggcagagaaggataggatggatttagatggagagattgtagtaaagttaatattagatggccttgatttggtaaaggagatgaaggaaaacacatccacagagagtgcatttacctgagtggggctgcagagtctgcagacactcagaaaattctgagaaattgatggatagaaataagtctgcaagtcatgaagcattgaaattaggccaattaataaccctaccatgaagtctgaatgttcaatagaaaggaagagttgcatatctctcactttaaatcaaaagctagaaatgattaaacttagtgaggaa

SEQ ID NO: 749 - DNA, 1893 bp, Homo sapiens
agtgctaagcaaatacaggaaccaaaaaggtttatagaggctgccttatgctgtctcatccagttcctttgcggtcctcttcttcagcacatgccaaagctgttcctcacggcctgtgagacaagagcatcttggatgtaggacaatggaagagttagatgccttattggaggaactggaacgctccacccttcaggacagtgatgaatattccaacccagctcctcttcccctggatcagcattccagaaaggagactaaccttgatgagacttcggagatcctttctattcaggataacacaagtcccttgccggcgcagctcgtgtatactaccaatatccaggagctcaatgtctacagtgaagcccaagagccaaaggaatcaccaccaccttctaaaacgtcagcagctgctcagttggatgagctcatggctcacctgactgagatgcaggccaaggttgcagtgagagcagatgctggcaagaagcacttaccagacaagcaggatcacaaggcctccctggactcaatgcttgggggtctcgagcaggaattgcaggaccttggcattgccacagtgcccaagggccattgtgcatcctgccagaaaccgattgctgggaaggtgatccatgctctagggcaatcatggcatcctgagcattttgtctgtactcattgcaaagaagagattggctccagtcccttctttgagcggagtggcttggcctactgccccaacgactaccaccaacttttttctccacgctgtgcttactgcgctgctcccatcctggataaagtgctgacagcaatgaaccagacctggcacccagagcacttcttctgctctcactgcggagaggtgtttggtgcagaaggctttcatgagaaggacaagaagccatattgccgaaaggatttcttagccatgttctcacccaagtgtggtggctgcaatcgcccagtgttggaaaactacctttcagccatggacactgtctggcacccagagtgctttgtttgtggggactgcttcaccagtttttctactggctccttctttgaactggatggacgtccattctgtgagctccattaccatcaccgccggggaacgctctgccatgggtgtgggcagcccatcactggccgttgtatcagtgccatggggtacaagttccatcctgagcactttgtgtgtgctttctgcctgacacagttgtcgaagggcattttcagggagcagaatgacaagacctattgtcaaccttgcttcaataagctcttcccactgtaatgccaactgatccatagcctcttcagattccttataaaatttaaaccaagagaggagaggaaagggtaaattttctgttactgaccttctgcttaatagtcttatagaaaaaggaaaggtgatgagcaaataaaggaacttctagactttacatgactaggctgataatcttattttttaggcttctatacagttaattctataaattctctttctccctctcttctccaatcaagcacttggagttagatctaggtccttctatctcgtccctctacagatgtattttccacttgcataattcatgccaacactggttttcttaggtttctccattttcacctctagtgatggccctactcatatcttctctaatttggtcctgatacttgtttcttttcacgttttcccatttccctgtggctcactgtcttacaatcactgctgtggaatcatgataccacttttagctctttgcatcttccttcagtgtatttttgtttttcaagaggaagtagattttaactggacaactttgagtactgacatcattgataaataaactggcttgtggtttcaataactca

SEQ ID NO: 750 - protein, 386 aa, Homo sapiens
MEELDALLEELERSTLQDSDEYSNPAPLPLDQHSRKETNLDETSEILSIQDNTSPLPAQLVYTTNIQELNVYSEAQEPKESPPPSKTSAAAQLDELMAHLTEMQAKVAVRADAGKKHLPDKQDHKASLDSMLGGLEQELQDLGIATVPKGHCASCQKPIAGKVIHALGQSWHPEHFVCTHCKEEIGSSPFFERSGLAYCPNDYHQLFSPRCAYCAAPILDKVLTAMNQTWHPEHFFCSHCGEVFGAEGFHEKDKKPYCRKDFLAMFSPKCGGCNRPVLENYLSAMDTVWHPECFVCGDCFTSFSTGSFFELDGRPFCELHYHHRRGTLCHGCGQPITGRCISAMGYKFHPEHFVCAFCLTQLSKGIFREQNDKTYCQPCFNKLFPL

SEQ ID NO: 751 - DNA, 1929 bp, Homo sapiens
gagggtttttcctactttttcttactttttatctgggcgttggcgtacctttctcggggtgtctgcgtaactgcccagacttgccttggtttggtcagatgacacctcctctgggactggctagccagcgttcatgtctacattattgatctcgtcttccggtgtgtgagtcactcacctgtgagctcctagagatgccttattggaggaactggaacgctccacccttcaggacagtgatgaatattccaacccagctcctcttcccctggatcagcattccagaaaggagactaaccttgatgagacttcggagatcctttctattcaggataacacaagtcccttgccggcgcagctcgtgtatactaccaatatccaggagctcaatgtctacagtgaagcccaagagccaaaggaatcaccaccaccttctaaaacgtcagcagctgctcagttggatgagctcatggctcacctgactgagatgcaggccaaggttgcagtgagagcagatgctggcaagaagcacttaccagacaagcaggatcacaaggcctccctggactcaatgcttgggggtctcgagcaggaattgcaggaccttggcattgccacagtgcccaagggccattgtgcatcctgccagaaaccgattgctgggaaggtgatccatgctctagggcaatcatggcatcctgagcattttgtctgtactcattgcaaagaagagattggctccagtcccttctttgagcggagtggcttggcctactgccccaacgactaccaccaacttttttctccacgctgtgcttactgcgctgctcccatcctggataaagtgctgacagcaatgaaccagacctggcacccagagcacttcttctgctctcactgcggagaggtgtttggtgcagaaggctttcatgagaaggacaagaagccatattgccgaaaggatttcttagccatgttctcacccaagtgtggtggctgcaatcgcccagtgttggaaaactacctttcagccatggacactgtctggcacccagagtgctttgtttgtggggactgcttcaccagtttttctactggctccttctttgaactggatggacgtccattctgtgagctccattaccatcaccgccggggaacgctctgccatgggtgtgggcagcccatcactggccgttgtatcagtgccatggggtacaagttccatcctgagcactttgtgtgtgctttctgcctgacacagttgtcgaagggcattttcagggagcagaatgacaagacctattgtcaaccttgcttcaataagctcttcccactgtaatgccaactgatccatagcctcttcagattccttataaaatttaaaccaagagaggagaggaaagggtaaattttctgttactgaccttctgcttaatagtcttatagaaaaaggaaaggtgatgagcaaataaaggaacttctagactttacatgactaggctgataatcttattttttaggcttctatacagttaattctataaattctctttctccctctcttctccaatcaagcacttggagttagatctaggtccttctatctcgtccctctacagatgtattttccacttgcataattcatgccaacactggttttcttaggtttctccattttcacctctagtgatggccctactcatatcttctctaatttggtcctgatacttgtttcttttcacgttttcccatttccctgtggctcactgtcttacaatcactgctgtggaatcatgataccacttttagctctttgcatcttccttcagtgtatttttgtttttcaagaggaagtagattttaactggacaactttgagtactgacatcattgataaataaactggcttgtggtttcaataactca

SEQ ID NO: 752 - protein, 290 aa, Homo sapiens
MAHLTEMQAKVAVRADAGKKHLPDKQDHKASLDSMLGGLEQELQDLGIATVPKGHCASCQKPIAGKVIHALGQSWHPEHFVCTHCKEEIGSSPFFERSGLAYCPNDYHQLFSPRCAYCAAPILDKVLTAMNQTWHPEHFFCSHCGEVFGAEGFHEKDKKPYCRKDFLAMFSPKCGGCNRPVLENYLSAMDTVWHPECFVCGDCFTSFSTGSFFELDGRPFCELHYHHRRGTLCHGCGQPITGRCISAMGYKFHPEHFVCAFCLTQLSKGIFREQNDKTYCQPCFNKLFPL

SEQ ID NO: 753 - DNA, 24926 bp, Mus musculus
  misc_feature (1)...(24926): n = A, C, G or T/U
ccttaggcaagaggtttggttctgctggtacatcagtgatgggtcatacctaggacactttccctttaattcctcattgaatcacagactgggtggtgggtgattcagtaaatcagaatttaaagagtaaaaagcaaaacaccaccaccaatcaaaaaacccctagtttatgtgtggtttgcctgcctatatgcctgtgcaccatgttcaggtagtgtcctcagaagctggaagacaatgctgggtccctggaactggggtttgtgaaccactgtgtgggtgctggaaatcaaactcaggcccgctgcaaaagcagccagtgcttctaacctctgaccccatcactccagtccccttaagcttcctttttaagaatcaactgattttttttttaaatcaatgtcagtactatatgagctgataagggctaatcttttcttgaatttcctataaaggccaataatgaggctcatattctttgcacagaacagccagcctggtctacagagcaaggtccaggacagccagggctacacagagaagccctgtctcgaaaaacagacaaatgaataaataaaaatagagacttgggctggagagatggctcagcggttaagagcgctgactgctcttccagaggtcctgagttcaattcccagcaaccacatggtggctcacaaccatctgtaatggggatctgatgccctcttctggtgtgtctgaagacagctacagtgaacttacatataataaataaacaaatctttaaaaaaataaattagtagagacagcttagcagttaggagcactggatgcttttccagaagtcccagcatccacatagtggtccccaaccacctgtaaatccagttccagggcacatgatgcccgcttttggcctccacgggcggtgcacgtacatggtacgcagatatacatgccttcaaaacacccctacacatagataaatcttaaaaatatatatgatattatctattgtgcatagtgctgtgggcctttaatcatagcactttggaggctgagacaaatggatctctgtgatttggcttgaagtcaagctagccagggctacatagtgagattctgtctcaaaaacaaaacaaaatagcctggagagactgcttgtttctcttgcagaggacctgggttcagttcccagcaccctcagggcagcccacagctatctataactccagttccagaggatccaatgcctcttctggcccagaagacttggaaaagcctggggatggctggcccttcactgctgtgggtgtcactgtcagtggcagacattataaagttcccgtgacaaccatttattgagtgcttactatatgccagaaatttacatgttaacaatgtatttaaccttcacatgttggggttggcctgatgatatgtgttcaaatgctaaattctgtacccaagatctggttgccccaagatgagcaaattcacacacacgcgcgcgcgcgcacacacacacaccagcttttattatgcaaaccttgctcctaaagttaattgatcaataaaaggccaaagcctgtaactgggcagtagagcgacaaagacaggacttgaagatggagtgagggatctcaggaaagagcaggggagagaggaagagagagaagcccccatgagtggagacagaccatgagggtgtgaccaggagaaacagcaagaaacaagggacatatggctgggatgtcagaaaagctccaaacctgcccagtctaggcttacagcttgtaaataaaataccaggattgtgtgtcttttatatgagcaagctagaatataagaatattatttacattcacaacaacatcaaatcaggaaaaaggcgctaatctaactgcattgctacgtttaaggaaatgggagcctaaagaatctaagaaagctgtgggtgtagctcagtcagtgtggagtgtgggaatgtgggtttgatcatcagcatcacagaacaccatcaaaactcacaagagttggcaagacggattgctgggtaaaggctctttgctacaaaagcccagtggccttagattcatcccctacccatctaaagattcaaaaatatctattaatctcctaccgtattgtgtacaactggattcacatttcaaaaggcaaaaacagggggcttcgtaaggccacttcctgtttcatcctctcgtgtgttcccaccgttgtccgtgtctttcctctatcatttcctgttcctttctgagacctatgatttcagctaggaattttgcttttaagtccaacctatgtgtgagtaatagtttcctgactctcctaataatcccagaatctgttaatgagccagtttgaaataatttcacatgctgggtccatttcacagctgggggaaatgcaatctctgaaagtcaaacattgcttaacagctatgcagtccctccagatccaacaggtaaagagtgggtgagctccctgctgcaagcggttgcctcccggctttctagatggctcccagggctcttccaggtccctacccttcacagcccctcagtgttccccacctccttgaattgatctctgtctctctgtctgtttctctgtctctctctctctcacacacacactacacacagagtcccttgatttctttatggtttttcaacattggttgtctttctcttttctcagaatagaatccttagagccaaggatggggccacttgttccccatagtctcccaaatgacttcatgaaatcttaaaaagaaaagaaaagaaaagaaaagaaaagaaaagaaaagaaaagaaaagaaaaaggaccacaatctaatctaggctgtttttttttttttcttttttcctttagacattttgttccttggcaatctagtccatctttctgagggctgggggtggggatccaatggggcaggttggtgcgctgattaaaagaaggcatgattcagacagcaagagtcctgcttcgtcatttctgctaccttctcaagggctgtcacctagaagtctggcagtacacccttagacttagattatctgttaagatatcacttgtgctggctcaaacaataggttacatacgcaaggcttccagatggcattctttcctcattaagagaactactaatgtgaaatactgcttttagtgaggtaattttcatactctacaactcaccccttatcttttcccttgggctggggagatagctcagtggttaaggcacttgctgagcaagtacctgtgttcgggttctcggagcccgggtaaatgctgggtgcttttaaaaacatggcagcttatttgtaattctaggagagacgggaaggccttgccatattgatgagatctgggttcgattgggaggttctgcatatacatatacatacacacatatatttggctttttcagagatggattctctgtgcagctctacctgtcttgtacctccctatgtagaccaggctggcctcaaacgcatagatccacctacctctgcctcctgagtttaatctctgcctgggcgtgccccactacacctggctaactaatattatattgtgcagatataccacattttcacttatccacatttggattgttcactttgggtattgtacttccattgtttagaataaactgctaaaaacaagcttctgtgtgaacatacattatcatgtcttgagtctaaacctaagggtggaactatagtagcccagtggagccaaccttctggtattatgggaacaggaactgtgtgtgtaaccatgctgaaaacgagactgttcccattttagtccccaagatataaggattccaaacgctacgtccccatcaacccttgtttttacagacttctcatagctgtcgcaaagtgatgtctcactgtggttttgatttgcacttatttccctgatgactaatggtgttggacatcgctttcatttgtgtgcttactagctacctctatctaaatttctggggaagtgccttctcagatcctgtacccatttaaaaaaaaaaaaaacttggtgtgcttattattcagttcatcaccttttacactgttcaaataccataaactatatagtctgtgggcagtaaaacccacccgcggcaaagtgctgtgcagtgtgtgtggtaggttagaaaatgtggaaagggaacatgggtgaatctgccacagtgcgagcccatcccctctgtactttcaggctttgataccatccacgttatggactaggtatctgtatttaatatattagtttaaaaaaaaaccctaaaactctacttagcttttgtcaaatattacataagataaaaataattttatatgaggcttaataaattgttcagtccaacagttgaagggaatgcacctttcattgtaaatgcagacagaaccaagttgtgacagcaaaatcatctgatgtgttcaagcacagctaattggaaagtttaactctatgaagacttaattgttgaaaacaagttgcaggagtttacctaagttctctgttgataagtgagaggccagaattaccttttcctcctgcaaaattcgttctcttgcaaaataacaatgacgaaaataaatggcaccaaatttttggcgagtcttgtttaattcggcatataattaaaatctcatgtagccttattggctttagtatccagcagagagaaaatattgaaactccaagagattttgaattaaatagctacagcagttttgttttattagttctgactgtgtgaaaaaaaaatcataaggacaactttggaaaaactgacttcttttagagccccaaatgacttttaaaacaataaaacaaactataaagcctacacaagtgatattaaaattatgaagttcaagaaaatgtgacattcacaaatgtggttgtaattttttttttttttaacgacagcaaagtggacatggatctattgggttttgaaaaggctgtgttatatagtttagcagaattaagtgcttcaatttgctggtgaggattatgtagctgagttggaatgtcggaaccaatacctctaaggtctccacccactttccagggtctgtggctgcagcagagaaaggacagatacacctcaacaggcgatgacttagagtcttgcgttagcggttatttccctggcatcttactatttacttttggaaggttcacagatttccatctttgtggctggtaggtgcatcaagcacggaataaaggaagaccctaaacccatatgttcctgaggaggagaataaaggggtttgggtgaggacactaagtgacagtaatcattcggtgattcccaaagtgggggagaagagttcaaaagatcaaacagaaggttggggaaatagttcacgaggaagaacagtttcctgcgagctcaacgaggtcccaagttttttgggtattcaaataccgttttttgaagacgcatttgaacttcaaatagtaacggtcccgacttacttggtccccagagtctttctggaacctaaaccacacttgagttctccatcaaggcaggtaatgagactggtcagcagcggggtcacctgtggagacctggattgggtaagaaccctccaccacagtctccaaagacaaggcactaatgaaattgtatagagacctactgaataattaacaacaataacaacaacaaaaccttttaaagttgagtggtaccaggtgtggtggctcatgcttgtaatcctaattatctgagacactgaggcaggaggctctcggttcaagtttaccctggataacttagcaagaccctgcctcaaaacaaaaaaagggggggtggagggaaggggggggggaagttgtggctcagttgataggttttttgttggtggtgttgggttctgcctaacatgcatgaagccctgggtttgactcttagtgcgacagaaaccaggaggagcatgtgcctgcaaccccaccacattgggaagtgtaggcagaaggctggacgttcaagatcatccttggctacgtattgagttggaggccagcctgggctactacatacgaccctgtctccaaagcagaattaaactgaggaaggcaaagtatagagcatttgcctagcatgtgtgaggctctggcttcaacccccagtaataaacacccaactaacaaaagagtccgtgtgagtgaatcctccatgtggggttatgtccacggaggccagaagacagtgtcagattactggagttacaggcggttgtgagcttccaaatatgggtgccaggaactgaactcggatcctctgcaaagagagcagcatgcactcttaaacaacgagctgtctctccagccccatgtttattttttaatcatttatgtgtgtgtgtgccagcttgaatttatgaacacgatgtgtatgcagtgctctcagaggccagcagagagcatctgggatagagcccggtaacccttactactaagccatttctccagtcactattatgcttgttctgcatgtgcacaggtgtctcagtgccacagccagtgcttgtgtggtcagagagacaccccatgtctcattcggcttggagtcaagggcctttatctgttgagccatctctgacccagagctttaattattttaatatacaaaactagacttccagtttttatactgaaaagtttgaaagctaccgtgcagttaaagctacagcacagccgggtagtggtggcgcaagcctttaatcccagcactcaggaggcagaggcagggggatttctgagttcgagcaccaccccccccaaaaaaagaaaagaaaagcagctacagcacaacagaaacctgtccgttcttcacctaaactcaccaattaatattctgtaatgtttggcttattcctttccttatgtacacatatgcatatatttacagttgtgtacatgtaagtaactacacccgtgtatagtgaactactggaaggttgcaggtatcatggctcacattcttaaaatcttagtaataactttcctattatatttaactcataagaccaaaatcacacctaacattgtagcagtgaaatattgccagctatgtacaattcatatttattcctattttttaccccaaatccaaagaaatgtgttaattctgtaagagcttgccagaatcctcatcttcaacgtttcactcaatacctgtgtgtctaatgagtcgtccctgaaccaaccaataacaatttctacattaaaaagtatctcatgggctggtgagatggctcagccggtaagagcactgactgctcttcctaaggtctctagttcaaatcccagcaaccacatggcggcttgcaaccatctgtaatgagatctgatgccctcttctggtgtctttagacagctacagtgtatttatttattaataaataaaactttgggcctgagcaagcagggactgagtgagcagagttgaccagagggagcagagatcctaaaaatccccaacaaccacatgaaggctcatctgtacagctacagtgtactcacatacataaaataaatcaatctttaaaaagtatctcgccgggcgtggtggcgcacgcctttaatcccagcacttgggaggcagaggcaggtggatttctgagttcgaggccagcctggtctacaaagtgagttccaggacagctagggctatacagagaaaccctgtctcgaaaaaccaaaaaaaaaaaaagtatctcattgtgtttgatgtgtgttttgggcactccagcagccatggtgctacagggcaagtctctccacctctttctcccctccccctctctcatgtggggtcggaagcttgaacttgagtccttgtttccagcattaagggagacaatctcccataggctgcgccacctcactggtcccaaatgttttatatttgttctggcattctcccagttttcccacccaccacttctttatttcacttgagttcaatggacttagaaatagcatagtttactacgtattttttcaacttcgctattgtgtgtaatgcgacacagcaagcagacagagggcagaggacaactgtggaatcggttcttccttccaccatgtcttccctggatcgaagctcaggttgccaggctagcacctcctcgatgatgtatttttcaaggcttaaataacccggagtttgcccaccggaagccccttcaagcagtctgttgtctggccaagatgtctttgcgctcaccagaaagaaacctcccaaggttcagttctccaggtattcagaagtctactctctttccagccctgcccgaagttagttaaacttgttctcctttttatggttcacataacagggtgaacacacggagatatagccttaccagcccccaaggttttaattctaatagcggcgcttcacactcactggtttgtttgtgctaattaacggcttttgtctgtcattattctgaaagatgtccgtgactccatccccaagcagttaggaacctttatgtcaagtcccaaacgggacaggtgagaaaagcccagggcaataaactgacagactcaactcaagtgctcttctgacttggagtcactcacaccctaggctccttgacacctacctatctttcaaacattatttcctttgggaagacttttcctttttcaaagtgactctctcctttacccgaaaggaggggctggagctccttaaggtttcgacccttacacacgatttctccctagtagatgtgactgtgttcgtttcctgcttccaccagggcagagactgcctctctcgtttgctaatgacacacagtagttgctcaagaaaataaggtgtgaagtgaaactcggacccaggtcctctggctatttcgccttcagtcccactgcagctgaagattaattccaaaggataaaactaaatatctcagttgaaaaaaaaaagccagggagtttttctattaatagaagtccttagcagaaactgcccaactcaaggtgtggtcaccccaggagggcgtcaatcaagaaaatgcccctttgccccagaggcgagtgaagccgcacagagctgaggccacactgagcagcgcaccacggctttgaatagaaaacacgtgtaaaacctcagaggccggctaagcgcagctgtgtccttcagggcctggggacagaggtccaggagcacctcccacccccattggatcgaagaacactgcatagcctctgtcctgcgccatacgattaaggttctatcttgataccggtctggagcagattccgttagcatccagggaggtggccgagctagggggtcctcaaataggtctggaacacctgcagcctcgctgtcagtacccgtctgggactaggacgcagccaacggcttgggtcttctccttggagcgccgagctgcggaggtcccccgttctagacagtgccaccgttaccccaagaagcgcagccttctggccgcccgaaggtgccatcctgccggcggcctcctggcccgcagagtcccatcgcttctccaggttccagaggctgcccgagtttcagcagtggcgccatcccgtcaggatccgcgccccgcggcgcacgtcttgtgacctcctcttcgacggtcgcagtcgctcgctaggtgcctggaacctctggggggcgcctgcggcgcaggaacaccctggcggagggtccccggagccccacagcccgtgcgtctcgggggcgggagctgggccggtgggggcggatcggcgcgggggttagtggggggcggaggcgaatctgaagccagcgccattggccgcagggcctggcggcaggaaggggaccgagcgcggccccaccccgcggctgcccgagcctatcgcctggagcgcagagcgcaaataaatgtagcgcggcgccgccggccggcagctctctgcgaggggctgcggagcggccatgcagttcccgcacccggggcccgcggctgcgcccgccgtgggagtcccgctgtatgcgcccacgccgctgctgcagcccgctcacccgacgcccttctacatcgacgacatcttgggtcgcgggcccgccgcccccacgcccactcccacgctgccgtcccccaactcctccttcaccagcctcgtgtcctcctaccggaccccggtgtacgagcccacgccggtccaccccgccttctcgcaccacccggccgccgcgctggccgccgcctacggccccagtggcttcggaggccctctgtacccgttcccgcggacggtgaacgactacacgcacgccctactccgccacgaccccctgggtaaggcggccggggccgagtgagggcgtccgtgaggaaggcgctcccggcgggtggcagcgcgcgggaggcggcaggggcggacggacgggaagcgcagtggaaaagttgcggcgagctctcggagcgagcggctcgcgggtgcatgcggggccccggtactgggaagctcggcgactcagattgcttttcctgcaccttgcagacgtcggggcaagcgtagtcgggagagacctggggctcccggggaggtggaggagggcggccctggccacgcgtgtcgccccggggtgggtgggggactcccttagcgagcggcccggagaagaggacgtcggggcgccctgagcctggcccctgcagggcagggagagctgcctgcccgggcggttcctgggctgggcttggttcaacaagcttgtgcagtgaaggagcctgaccctttccgttcatacaggaaatcttgagttctcgataggagtaaatctggtttctgaagctgttaagtgttttcctggctgcatgaagcagacccttcccccggagtagtgcacgctgctgattattttatcgacatcctcaatacagacaaattcaggaaacactcgacgtctgatagccaggatccgtttttctgatattgttcatttcctctgtgtgggatgtgactttatggcagctaaaataaccagttgcttcctctctgcctctcccgccaccccccacccccatctttggaggctgttttgcaccaagtctgaagcctgacgcaagcaaaatctcgggggaaaaaaaaacaatgccaactttcaaaatgtttaggtgtaggtctgtggacatagggacggacggacggacagacgcaccaccatcaatttggagaaggaaagtgcagaccccgaacaaatactaaggggtacacgttggcaatttgggattttcgaggcttgtcctcacaacattcctaagaataaatacgcgatggtgaccgggttcagggcctcagcctctgaaccagtggggtctagagtgaataagagggggctccagagtttaaagtcaacagtttggcagcttaactggggacctgggagacaattaacattttaatgaattggcattttaatgccagaattattaagagccgcctccagcgctcctctcttctcaccgctacagggatttggggtgtgagtgttataattttgtacataaaatttgtatttaaatttttcagcgtgcagaacatgagtgtgaccggccgcaactctgtaccctctggggcaggagggtacaacgttttcacatagctcgccctggtttccttgggtttctgctaggcctgagcagaaggaagcaaatttttttttttttttttttttttttttgagacagaccaacaggaaacacattgacggaaatgttgccatagcccacggggtggctttaactggccgcccccgcaggccgagtgtgaaatcagaggaggcccgggcgctctccagccactttggaggccccactcgaggcctaacacccgcgccctgtgagcgcttctgtgcgcccagcaggccttgggaagtgctctcataaagagcgcaccctgagtcttttgcaaaagttagtgcatacagaagagtcggttcggttaaataagataaggtttaaggccagcaggggttcttgggggttgaaaagatttgtttgcatttagccacaggtgtgctgggcgggtagtgccgtgtcttgagtatccagagctggtctgggtggtagaacggctaatctgactttgtgtgcattggtgaggagtgtggaaacatccattaacctgagcatgtatgtgataggaacatggttgcgttctggatcgtgtcacttgggaccaggtagatctgggaactgttcagagggtgccggggccttggttaaccacagctcttctggcccacaggcaagcccttgctctggagccccttcctccagcgacctctgcacaaaaggaaaggcggtcaagtgaggttctccaacgaccagaccgtcgagctggagaagaagttcgagactcagaaatacctctccccacccgagagaaagcgtctggccaagatgttgcagctcagtgagagacaggtcagcttcccctcacacccaaacacaccatcaggcttccatggagctagcggaaaaaagccactactgtaagccactaccgcgcactgccggcgcattctgaccccggcccagctgcagggccccatagccccagtcccttctccccaggtcccccgggatttgggactttcttgcgaacctgttttcttttctgtaggtcaaaacctggtttcagaatcgccgagctaaatggagaagactgaaacaggtatcgacatggctctgtttctatggaaataaatgtttgtatcatgttatctaaatgcggagccctgttatgggttgtatgcaaaagtcatttgagagactatttaacctcttcaccttgattaaaaaagcaaatactcctgccgaaattcaggatgagttgctcaggtgtcactaatgctaaaagccacctaatgcagttcctatatccattatgccagggcttcacacactggccagtaaacccgcctggctaattgttttataaaccccatatgttgtttatctcattaacgcaggaaagataaagtaattgacagtaaatgacttaagtagttatctttgggagaaaattgtttcttttatttacacacctataataaaaccaggcaggactcaagggtaaatataaagacacaaacacctttaagtcctatttgcactttttaagaaaaaagacttaaatatcaaagagttctaaaagttattacccatcctctgccagctgtttaaaatgaatatgaaacccacaaagaaatgtccacacctgtttggaaagtaacttaaactcccgatagtctttcaatgaccttgttaagaaatacgtgagagaggggaagggccaagtcaccctccagagcagccctactgacttagagctaaagatttgcttttgctgtcccaacctggatgtttccagagtcatcggacaactgctgaatggttcatttggcagagcttcaaataacagttaaaatggtttgaaacaaaacagtttagtaatgaggaaagcttaatgtagattttaaattgtattgctcatgctttttttatatctgtatatattttaaatgctgtcccaaagaacattttgaaagaacaaaacaacttcctggggcgtcatcgttcttaaatatttgaggattccctctctctagccatgtacatccttagcagacttggtgactggagagtgacagtgtttctagaaaatatttacattcatattcgacgtctacatacttaaaaatccactggctggacttggcttggaactagtttcccaaggacttttaaaatagtgctttctatgtaatatggaaaaaaatattttttcccagaattttttgcctagattttaagcaaattgcaaactctttttatcaatattaattttggttctgtgatttttttttttgccatgattttgtaatttggtacctatttatgtatgtgtgttctcgtaaatttacttgagaaaactaatggaaaaggattcaattgaatcattttgcagcctcttaatttagttcatgttgttgttctcctcttcttcctcctcctcctctcctcttcctcctcctcccccttgtccttttttttttttttggttttttgagacagggtttctctgtgtagccctggctgtcttggaactcactttgtagaccaggctggcctcgaactcagaaatccacctgcctctgcctcccaagtgctgggattaaaggcgtgcgccaccatgcccggcttcgtccttctcttttttagggggttaggttttcgtgtaacaaacccagccattttaatgattgttcttttaaaatgctagaagaccctgtttggggtgacatctaaaagcatgagagctgcgctgtctgaattgaactgagggtttttgtcttgttttgtttttttctctcctaaacttctgcaaatcttgaacccactggtctgtgttaagtatataatctctctctggtgtgacttcttccctcttctttcaaatggggaaacgaatcacaagtgtatcttcttaggaaaaagattttaacgaagaaaacagttggtaaactagactttgtaggcgtggtaaaggctgaaaaaaaccaaaaccaaaaccaactttgattgttatgtctctgctctcaccaactgcatcttcatcccatcgccaggagaatcctcaaagcaacaaaaaggatgcgttggacagtttggacacttcctgtgagcagggtcaagacttgcccagtgaacagaataaaggtgcctctttggatcgttcgcagtgttcaccctccccagcctctcaggaagaccccgactcggagatctcagaggattccgaccaggaggtggacatcgagggggataaaggctactttaatgctggatgacagtcatcggccatgtttagagaccggactttagaataatgttttgctacagaccaactggaaaattcggggggagagagagagagagagagagagagagagagagagagagagagagagagatagagagagagagatatcaattcttgtagagttttgaaaatgtttggtgcactggctaattaacaaacatgcattgcgttgagaccttaactttggtttaacatacggtatctataccagtttttaagttgttttgataaagtgactaaatgtgacctcattttttaaaaagtgaatttatttctatttatgagaggtaatttgaacttttgtctaaagcttaaattatgactttaaaggttttaagttttaggaggctgatcttgactgactttcctaagtctgtagctattccctcgactttagaggtgcacttaggtgggggcaacatttggggaatccatggaacactttgaaagggtatacccaacttttacatggcatcttacattgctgccttaactccaaagccatttcagagcacttggctcccggtgtctgttcttacaagcaagatagttgataagattctaaaaatcttgttttgctcagccagtgcctctgaccctggtgttaagggatgacgcagtccctacaggcagggaaactgactcatttgagactgatctcacacgaactagaaatagcaggacaattcaatgtaagtagattgtagatagtgtgttttatagaaactgtgtctataacatgtatatagcattacttcttgtaaaaactctgccaaaatgatgtttgtttgtttggttggttttttgtaatttaatgaattaactttcatatacattcatcatcagatgaacgaccctgtttgaattctcattctttggttaaaatacctaaacatgacacctaaagagccttggtgtgtgcacacgtgtgtttgccatagtgaatatgagagatggggtgcccaccttctagaatatacatttgtgctttctttgctggggctgtggggggcggggggggggaaaagaggaccgagcagggtggattggagctgccactgagtgcagtgccatcgattggtgtgtgcggccaccgtccttgaccagcgtgagtcaacagtgtatcacactctgcgggagcctggctgcttgtactctttgggacaaggcagggattggagtggcagagaaggggggcagttgaggcggggggggggcggatgttgtcaggttccagctgctaatttagaagatctgggaacattaaagctcgtggccagagagaatttgagagcagctggatgccctgaggtcctggcagtatggcagcctgtgtgtggggcctgcgcttctcctcataccctgatgtaggtttcccttccttaactcctactagagttgggttgcagacagcaagcagaagcaggaagcattgggagcgtcaggaatttgatggctgagaaaggtgggggttggggtagcgtccagaaagggtgcttgtgagaaaggggaggaagaatgttgataaagtttggatgtgggtcagggctctgacaagaggtattaatctgcatccaactacctgtctggcagagcccaggtctgacagcagccctcccacagagacctgttgagcggcccagaacattcttttagccttggcctgcatgacgctctttagttatacagtaaagaacatgtggtggaatctgcccaaagaacgctggacacacatggacattcactaggtgaggacaggtcctccttagaaggcccggaattgcaggtgagctaggtttccagaatatactaagtgctggtccttaggcagaggggccagggtagacctggaggtttaaagatctgctttagaattttagttcttggtctcagaacaagagaatggtctacttgacctacatgaccctttccaggtcccccatctccagctcagttcatgttatatgctgtctcctcttcttacatcttggtgttagagcccaaaggatcctttcatccagtgggagagttttgcttccaatcagctgagggcgtggttaaaaatgtggacagaacagggatggatattcaagaggactgcttaggtttcgggggaagtgcccttaactagggatggaagctacccaaattcccaccctagccatagtgtcctgtgaaaatggtttctctttaaaatccagtcatttgtgatcctatgcatctgtgactagaggtaatatatacctctcacaggacagaatatgggacattagccaccctggatgtcaccgcatgatatggataagagcttgttatcatggggccagaaaaatcacataccattctaacctgcctagaggctctagacctgcctcacaggttgcaaaggccacagtcagtctggtctgaaagtctgtatgtatcccaaggtttagagaatgagacatttatatggagtttaaaaaatgatcctggaatctctgtgtgtccctactggagatgacctctgggtgatgtcctactgtgcagaaaccgtatcatgactattaggcacaggagtgttgattgatattagaaaagctaaggggtgaaactttgtcttaaggtagacggattgctggaaccatgctgccttcctgtcggaggctagcccaggttcccttcaaggttgctttgaatctcaacggcaggtccttaagaatggagagtgtgtcggttgggggaggtcctctcagaaccccaggttagcattgacttctacaaagttacagattgccaggggctatttacaaattctccctacaatccagacatttttcatttgtttgccctttggctatttcatgttgaaggggcaggtatgacctttacagcacagatcctgtcttgtttttaactctttttatcaggagattcaacctgaaaaacggttatcatttagcagaaaggcaaacagaaaagcacactttggtaagcaaaacgttaatgattggaagaattgtcctaatttcatcatgacagtgtgtgattaatcccctgggtcatgtacttatacttgaagttattcagttcgttgctctttgatatccagaatcctacctaacttaatagggtattgattttgttggatggtgtactttgactccttacacaacatcacttttgaggatgactagcctgttgcgtactatcttatttagagaactattgcgtaagatttctcttttctttttatggtttttctcagggtgaaagctgataagacatcttgtgggaaaagaggaaaccatcactgatagtgaaagtacctattcgctttcaacatttctgaggagccctttcgtttgtggtttcatccctgagacgatgcagcttggttaaaaatgtggacagagcagggatattcaagaggactgcttaggttcgggggaagtgcccttaactagggatggaagctacccaaattcccaccctagccatagtgtcctgtgaaaatggtttctctttaaaatccagtcatttgtgatcctatgcatctgtgactagaggtaatatatacctctcacaggacagaatatgggacattagccaccctggatgttaccacatgataaggataagagcttgttatcatggggccagaataatcacataccattctaacatacctttcatcttcttggttttgttttgaaacccaagttggattctgtacgggactagtccaagtttgttcctggattgtttgtttgtttattggtgttgttaatctaaatatgaagcgcttggcaggttccttatcagaacttcaaggtccacagaactgcagcttccaatctgcctgtactaactagcttagagatgggcaagtggaagtctcatacccctccctagctgcctgaattcttgcctccagccctttgggtagcactcatgagtggaggcatctgtaccttggagcctactgaacgccattgccagaatgtccaggattctcagctgcagcctggaatcttctgaagcaggacacacacaaatctctccaggctgagctggctgtgggaaggagaagttggagctggtgcttcctgtctgcagaggatcatgactttggagcgtccgtcagccactgtgaggttttcaaggctgcagatggttttcctgtatagctcttatctttctttttcttttctaggagaaggaggaggccatggataatttagggtgattttttttttccagattaaaacctgtcagggctgatttccatcatggaaagtttatattcacttgtggattttctaacccttctttaggattcctttttaatgtgaaagagtagattgctgccacaaaaataaaaacaaacaaataaacaaacaaacaaaaaaaaacccttaatatatgcagatgaacaaacccagaagaattcgcacagtatccagggtcccctcccttgcttcttaagtacttgtatgcagagaggcctgttgggtttgtctcaatctttttgtttgtttgttttttgagacagggtttctctgtttagtcctggctgttcctggaacttattctgtagaccaggctgacctcaaactcagatccacctgcctctgcctctgcctctacctcctctgccgcctctgcctctgcctctgcctctgcctctgcctctgcctctgcctctgcctctgcctctgcctccctctgcctctgcctctgcctctgcctctgcctctgcctctgcctctgcctctgcctctgcctctacctctgcctctgcctctgcctctgcctctgcctctctgcctcgcctctgcctctgcctctgcctctgcctctgcctctgcctctgcctctgcctctgcctctgcctctgcctctgcctctgcctctgcctcctgcctctgcctctgcctctgcctctgcctctgcctcccaagtgctgtgatgctgtgattagaggcatgagctaccactgcccaattgtctcaagtgttatgttttccttttatagcttacccatgtccttccatctttcctcatgctttctcttttgtccttatgtgttctcccgtgcccagcatggtttttttggtttgtttttgtttgtttgtttgttttggtttttcgagacagggtttctctgtgtagccctggctgtcctggaactcactctgtagaccaggctggcctcaaactcagaaatctgcctgcttctgcctcccaagtgctgggattacaggcatgtgccaccactgcccggcttcccagcatgctttatactcatgtagtttaacttcctgttaagaacagaaaattaacaatctccactcttcagaggtcagtgtctccttgaaacttgtaggaatgttcagtttttggctaaggggagaagcctgtgatggaaggcaggagacacagcgtccaaccatgtagctacagggcttcagtggattgagggaccaagataaagagtactgggacataagcagaaggtcaatgacagcaggacggacagggtgtaagacactaggcaactcagtgagactttgcttcaacaatgaatatatatatatgtgtgtgtgtgtgtgtgtgtgtgtgtgtgtgtgtgtgtgtgtctgcatgtatctatgtatgtgtgtttttatgtctgtatgagtgtctatgtatgtgtgtgtgtctatgtgtctgtgtctgtgtctgtgtctatgtatgtgtgtctgtatgtctctgtgtgtgtctatgtgtctatgtgtgtgtgtctgtaaccctggctggctacagagatgaagctggacttgaactgacattcctgtgctgggagtataagtgcgagccaccatgcctggctcaggatatattctttttaactgagttatttgttctctgtctctttgctgatattcactgagagccctggtttttatctgttttattcagtgatgtaccattctagcctgaaacatagtactggaagctgtgggttcagcaaatagatgaacatatattaggtatgcactttatactaagtattacataagggattattattattattgttattgatggggtttctctgtatagctctggctctcctggaactcactatgtagaccaggctggcctcaaactcacagatatccatctgcctctgcctctcaagtgctaggatgaaaggcactggccaccaaagacctggcttaaatattgtgtaacaaacatctcttcatgttctatcccaggaaaccctgaggtcatttctgttatcagcctcactgttttctaggtaaagaaactgtcacagagaagtgaatctactgggctcatttattcagacactgcagtggaaacctcacctaatctgctgagccttagaaaagggtctgttcttttnnnnnnnnnnnnnnnnnnnnnnnnnnnnnnnnnnnnnnnnnnnnnnnnnnnnnnnnnnnnnnnnnnnnnnnnnnnnnnnnnnnnnnnnnnnnnnnnnnnnnnnnnnnnnnnnnnnnnnnnnnnnnnnnnnnnnnnnnnnnnnnnnnnnnnnnnnnnnnnnnnnnnnnnnnnnnnnnnnnnnnnnnnnnnnnnnnnnnnnnnnnnnnnnnnnnnnnnnnnnnnnnnnnnnnnnnnnnnnnnnnnnnnnnnnnnnnnnnnnnnnnnnnnnnnnnnnnnnnnnnnnnnnnnnnnnnnnnnnnnnnnnnnnnnnnnnnnnnnnnnnnnnnnnnnnnnnnnnnnnnnnnnnnnnnnnnnnnnnnnnnnnnnnnnnnnnnnnnnnnnnnnnnnnnnnnnnnnnnnnnnnnnnnnnnnnnnnnctgcctctgcctcccgagtgctgggattaaaggtgtgcgccactacgcccagccatatgaaccaccctcttagctctatttgtttataggacaataggacaattgtatcaggatgggatttgttgttgctgtgcatttgtttattcgtttgccttaatgcatgtctataattaaaatgtggagatgggaaatgcttgtggatgtagcattttcgtctacctggtaactaagtccaaaggagcactatttccttgttttctggcaggaaatgagcctaataaaatactcaatctcacttcaattttgttttagaatgaacgttctaagttagtatacaagggaatgggttttatcatggggtcttcacgtctgtgggtcctagtttgctttcattaattctctccccacttgattcccctgtgcaccctcctggctctggccagcccccttccttccttaagtctgtcaccctttttatcacatgtacccccttactctctctattccccaccttgtaagaccccttcctcttccaaggagaggtccttgactacccacttctaattttgtcacacaccctttccccatctctggaacagggcctttgtttcatagctccagctgttctagaaccctgtgtagtccaggctgacctcaaactcacagagatccacctgcctcggcttccttagtcctcctgcacacttttaggactagattccctgcattttgctcattttgtgtaatataatgatttccggttgtatccatcttcttgcaaattcatgttttttttttctttctttacagctgtgtggaagtccattgatacacatgatatatctttcaaagcgttcaaaacttgtctgcctctggtccgtgtttgttcatgttcccaaatgtctagtgcatttattttgggtcatctaccgatgtctgtgttttgaagagctctaaacactgcagggcagtggcttctgagtcaccagcatccagcactgcatttggcttaattaaatattggatttggcttaatgaaagcttttaatgaatatcatatgtatgacacaatgaaactgaaagctgtgtcttcccgaaaaaccagagagattttcctccctgctcaagccctgcatcgtcattcctcccatttcccattccttggccacaggaaacacacctccagatggatcaaggaacacagcagttactcagagagtcacaggcatttgaatgggtggggagaggacacagcagccggtagaagttgaaataaacacccaaagagccttccccatttttacggcatatattttaagaggaagtgcttctgtggtttttattggctgtctttcctttccaacttggccatttcattcaaggtctgattcatgcctctcaatttcaatcaagagttttattgaaaatgtatcagttcatgaagaaggaaaaaagacacagtttggggcagactattgctataatcttaccagcatccccactgggtgagtggaagcaggagacccagatgtttttcaccaatttccgaaagtatttcacaaattgcaaggaatagagaccatgcttgtgcaaggttttcattttccttagattcgagtggagtccttatgtcacactttccattaattgtaaattagaccaagctaattcaattaatgtttttaaaaaaatgtcccctgagtataggttcagctgtccggaggaggtggtttcttagacacctgtctcccataatgactctatgttacttacgtaggtggaagtgaatggggcggctatgatgctgtgtggtggtgtttagttagttaaatgaaggtagacttgttagcttcaccaagcaattacttgatttttattaaggtctttaaaaacactgggacacccttttgcccgaagcagctgtctgtgtttagctattatttcaggcattaggaaatacacagtgttttccatgaccggggaatttaagcctacaatttcttgatatatattattcattattaaccagtcctgtctgaactcggagtactaaaatacattgttatctgttgggagccgcccccacattcgccgttacaagatggcgctgacatcctgtgttctaagtggtaaacaaataatctgcgcatgtgccaagggtatcttatgactacttgtgctctgccttccccgtgacgtcaactcggccgatgggctgcagccaatcagggagtgacacgtccgaggcgaaggagaatgctccttaagagggacggggtttcgttttctctctctcttgcttctcgctctcttgcttcttgctctcttgcttcctgcaccctggctcctgaagatgtaagaaataaagctttgccgcagaagattctggtctgtggtgttcttcctggccggtcgtgagaacgcgtctaataacaattggtgccgaattccgggacgagaaaaaactcgggactggcgcaaggaagatccctcattccagaaccagaactgcgggtcgcggtaataaaggttcccgtaaagcagactgttaagaaggattcaactgtatgaattcagaacttttcagctggggaacgagagtaccagtgagtacagctttacgaggtaagtctgatcttgaactttctaacgaaattcaagacagtctatcagaagtaaagtggaaaatgtttggccttgaattttttctaatgttagaagcccttttgttccttttcacatgttatcaagtggttaagatagggcggattctagaggaaattcaggacaagctatcagaagtaaagcggggagagagagtaggaacaaagaggaaatatggtacacaaaataagtatacaggcctttccaagggtcttgaacccgaggaaaagttaaggttaggtaggaatacctggagagagattagaagaaaaagaggaaaaagggaaaagaagaaagatcaattagcggaggtctctaggaaaaggagcctgtgctcatcgctggatgggctcgggaagccagctcttagtagctctgaagcaggtgaagaatcctcctctgaggaaacagactgggaggaagaagcagcccattaccagccagctaattggtcaagaaaaaagccaaaagcggctggcgaaggccagtttg

SEQ ID NO: 754 - DNA, 816 bp, Mus musculus
atgcagttcccgcacccggggcccgcggctgcgcccgccgtgggagtcccgctgtatgcgcccacgccgctgctgcagcccgctcacccgacgcccttctacatcgacgacatcttgggtcgcgggcccgccgcccccacgcccactcccacgctgccgtcccccaactcctccttcaccagcctcgtgtcctcctaccggaccccggtgtacgagcccacgccggtccaccccgccttctcgcaccacccggccgccgcgctggccgccgcctacggccccagtggcttcggaggccctctgtacccgttcccgcggacggtgaacgactacacgcacgccctactccgccacgaccccctgggcaagcccttgctctggagccccttcctccagcgacctctgcacaaaaggaaaggcggtcaagtgaggttctccaacgaccagaccgtcgagctggagaagaagttcgagactcagaaatacctctccccacccgagagaaagcgtctggccaagatgttgcagctcagtgagagacaggtcaaaacctggtttcagaatcgccgagctaaatggagaagactgaaacaggagaatcctcaaagcaacaaaaaggatgcgttggacagtttggacacttcctgtgagcagggtcaagacttgcccagtgaacagaataaaggtgcctctttggatcgttcgcagtgttcaccctccccagcctctcaggaagaccccgactcggagatctcagaggattccgaccaggaggtggacatcgagggggataaaggctactttaatgctggatga

SEQ ID NO: 755 - protein, 267 aa, Mus musculus
MQFPHPGPAAAPAVGVPLYAPTPLLQPAHPTPFYIDDILGRGPAAPTPTPTLPSPNSSFTSLVSSYRTPVYEPTPVHPAFSHHPAAAAAYGPSGFGGPLYPFPRTVNDYTHALLRHDPLGKPLLWSPFLQRPLHKRKGGQVRFSNDQTVELEKKFETQKYLSPPERKRLAKMLQLSQVKTWFQNRRAKWRRLKQENPQSNKKDALDSLDTSCEQGQDLPSEQNKGASLDRSQCSPSPASQEDPDSEISEDSDQEVDIEGDKGYFNAG

SEQ ID NO: 756 - DNA, 25725 bp, Homo sapiens
ggccaatgtggtgaaaccccatctctactaaaaatacaaaaattagccgggcatggtggtgggcacctgtaatcccagctactctggaggctgaggcaggagaatcactcgaacccgggaggcggaggttgcagtgagctgagatcacgccactgcactccagcctgggtgacagagagagattctgtctcaaaaaataaaacaggctgggcgcggtggctcatgcctgtaatcccagcactttgggaggccgaggcgggcggattacgaggtcaagagatcgagaccatcctggctaatacagtgaaactccgtctctactaaaaatacaaaaaattagccgggcatggtggcgggtgcctgtagtcctagctactcgggaggctgaggcaggagaatggcgtgaacccgggaggtggagcttgcagtgagccgagatcgtgccactgcactccagcatgggcaacagagcgagactccgtctcaaaaaaaaaaaccaaaaaaccaaacctacacagttgtattgaggtgtaattcacatatcataaaatttacccatttaaagttttttttggccgggtgtggtggctcacacctgtactcccagcactttgggaggccgaggtgggtggattacctgaggttaggagttcgagaccagcctgggcaagatggtgaaaccccgtctctactaaaaatataaaaattagttgggtgtggtagcacacgccagtaatcccagctacttgggaggctgaggcaggagaatcacttgaatctgggaggtagaggtttcagtgagccaagatcgcaccactgcattccagcctgggtaatagagtgaactccgccttgtctcaaaaaaaaaaaaaagtttttttaaagctattcacaaagttgcgtaacaaccaccacaataactgttagaacattttcatcactccagaaagaaaccctgtacccaccagcagtcacccttcatttatccccaagttccccagccttggcaactactattccacttttcatttctacagatttgcctattctggacatttcatatacagcaggggtgtccaatcttttggcttccctgggccacactggaagaagaactgtcttgggccacactaaaatacactaacactaaagattgctaatgagctaaaaaaaaaaaaaatcacaaaaaatctcataatgttttaagaaagtttacgaatctgtgatggactacattcaaagccatcctgggccacatgagacccatggccatgggctggacaagcttgaaagatacatacaatctgtgggcttttgcgtctgacttcttttgaagataaatgttttcaaagttcatccatgtatcagatgtatctttttattaccaaataatattccattgtatggatataccacttttaacataccccttcatcatctgagggacatttgggttgtttccactttttggctatcataaataattctgctgtgaacatttgtgaacaagtttttgtgtggacatatgttttcattttgtgggaatatacccaagggtagaatcattgggtcatgtggtaactttgtttaaacttttcaggcattgccagactgcttttcaaagctgccgcttcattttacattgcgattagcaaagcatgggggggttctaaatctccacatcctcaccaacacttgtgtttttaaaattattatagctatcctagtgggtgtgaagtggtatctcattgtggttttgatttgcatttccctgatgactaatgatgttgaacatcttctcatgtgcttattggctatttgtataacttctttggagaaatatctattcagacctttagctcatttaaagaattgggtgctctttttattattgaattcatcatcactttttaaattgagcagttacctaaagctctacctaaagctccatggtcagtaaaattcacccacatgacagtggtatgtgaggcaccttgtagtatgtaaaatgtggaaaaaggccaggtgtggtggctcatgtgggtaattccagcactttgggaggctgaggccagtggatcacctgaggccaggtgttcaagactagcctggccaacatggtgaaaccccgtctctactaaaaatacaaaaattagccaggtgtggtggcaggtacctgtaatcccagctacttgggaggctgaggcaggagaattgcttgaatgcaggaggtggaggtttcagtgagctgagatcacgccattgcactccagcaagactccatctcaaaaaaaaaaaaaaaaaatttggaaaaagaacgtcactgaagcaatgtcatgatgcctactgcttatgtatttctgggctctgattccatttatgatggggatgaggcatctctatttgatcagattagtattttgtaagttagtaaaccactaaagcactaattagattttctcaaatatttgaaaaatatatgatttgatatgaaatttaataaatgatttagtcatcccaacagttgaagacaataaaacttagtgtaagtataaatagaaccaagttgttataataaaatccattgatgctttcaagctatagctaacttgaatttttacctctacatacatttattaaaagtaagttgcaaaaagtttacctaaattccttctagataaattacaaatgagaactaccttctcttcttacaaatttggtcttttgcacaacagcaatggctaaaataaatggggccaaatttttggagaaagtcttgtttaattcagaatataattaaaatctcatggagctttattggttttagtatccagcagagaaaaaatattgaaactccgagagattttgaattaaatagctacaacagttttgttttattagttctgactgtgcgaaaaaaaatcataaggacaactttggaaaaatctagttcttttagggccccaaatgacttttaaaacaataaaacaaactataaaacgtacacaagtgatattaaaaattatgtagttcaataaatgtgacattcacaaatgtggttgtaatttttttttttaactttagctaagtgaacatggatctgacgattggatgtagaaaaggtagtgttatatagcttaacagaattaagtgcttcagtttgccagtgaggattatgtagctgagttggaatgttttaccaatgccttttaagatctccatctacttcccaggatctgtggctaaatcaaagaaagagaggatgcttcttttattagtgattatttaataactctatgctagtgattatttccctagcattttaatatatatatttaaaatatttgtagatttagatcttttggctggtggctgaatcatgcacagaataaaccagtaccataaactaatactgtttctgaagatgggtaataaaggctggctagtgatttactgtgaaagcactaaatgaattggagtcatcatctgttactcgcagagtagaaggggcaggaaaaaggtgcacaatgaaaacaaaggggaaacattttgtgagaaaaataattagcacagttttctgcttagtttactgaggtcccaatctttcaagacccaaacataacttgtgaaggtaggtttgaacttcatataataactgttctttctttgtccccagagcttgtctctgtccttggaacacagaagagcacattgaattcatcaggccatgggatgagaatgatgacggtggagatggcacaacactggagctgacccacagagggatcaatgattcccaaataacccttcactgatagtttccaggggcaaggcactacctgaaattgtatgcaatcttcagaaatcattcaaaacattatgcctttaaaaaaaatggatggtaggccgggcgcggtggctcatgcctgtaatcccagcactttgggaggccaagatgggcagatcacaaggtcaggagatcgagaccatcctggctaatatggtgaaaccactgtctactaaaaatacaaaaaaattagccgggtgtggtggcaggcgcctgtagtcccaactactcgggaggctgaggcaggagaatggcgtgaatccaggaggaggagcttgcaatgagccaagatcatgccactgcactccagcctgggcgacagagcaagaatccgtctcacacacacacacaaaaaaagtatggtaaaaaggaatttgagattaaaaaaagaaacagtgttttcattttttctcatttttatattgaaaactttcaaatctacaggaattatggtaatttaattgctatgtgtaattataaaaaagctaaaattagagtacaacaaatacttgtatactctgaaattatagtacaacaaacacctgtatactcttcacctaaattcaccaattaataattttcgatacaggcatacctcattttattgtgcttcacttcattgtgctttgcagatattgcagtttttacaaattgaaggtttgtgacgcccctgcatcaagcaagtctattggcaccattttcccaagaacatgtgcccacttcatgtctttgtgtcacatttgggtaattctcataatatttattgttatatctgtaatgatgatctgtgatcagtggtctttgatgttactattgtaatcgttttggggcaccacaaactgcacccatataagacagctaacttaataaatgtcgtgtgttctgactgtcctactcacaggctgttccccagtctctttccttctctccttgggcctccttattccttgagagacaacaatattgaaattgggcaaattaataaccctacaacagcccctaagtgttcaaggaaaagcaagaattgcatgtctctttcaatcaaaagccagaaatgattaagctcagcaaggaggccatgtagaaagttaagatccactaaaagttagacagcgctgtgaacacaaaggaagagttcttgaaggaaatttaaggtggtactccaatgaacaaatgaatgctaaaaagtgaaacagccttattgatgatctggagaaagtgcaagtggtctggatagaagatctaaccagccacaacattcccttacacgaaagcctaatccagagcaaggccccaactctcttcaattctatgaaggctgagaaaggtgaggaagctgcagaagaaacggtggatgttagatgaggttggttcacgaggtttaaggaaggaggccatcaccataagtgcaaagtgaagcagaaaatgttaatagaaaaggtgcagcaagttacccagaagatctagctaagatcattgatgaacgtagctacactaaactgattctacacgtagaccaaaaagccttctattggaagaagatgccatctaggactttcatagctagtgagaagtcaatgctggcttcagagtttcaaaggacagtctgactctcttgttaggtgctaatgcagctgacatttaagtttaaagcaatgcttattggccattctgaaaatcctagggcccttaagaactatgctacatctactctgcctgtgccctataaataaaataacaaagcctggatggcagcacatcattttactgtgtggtttactgaacactttaagcctactgttgagatctactgcccaggaaaaaaatatgcctttcaaattattactgatcattgacaatgcacctggtcacccaagagctatgatggagatatacaaagagatgaatgttgttttcatgcttgctaacacaacatccattctgcagcccatgaatcaaagagtgattttgattttcaaatcttattatttaagaaatatattttgtaaggctatagctgccatagatagtgattcctctgtgggcaaagtcaagtaaaacccttccagaaaggattcaccattccagaggccatgattcatgggaggaggtaaaaatatcattaacagaagtttggaagaagttgattccagccctcacagatgactttgaggggttcaagatttcagtggagaaagtaattgcatatgtgctggaaacagcaagagaaatagaagtggagcctgaagatgtgactgaattgctgcaatctcatgatacaacttgaatggatgaggagttacttcttatggatgagcaaagaaagtggttttttgagatggaatctacttctggtgaatatgctgtgaacattattgaaatgacaacaaaggatttagaatattacatagctggatgcaatggctcatgcctgtaatcccaacatttagggaggcagaggcaggagcatagcttgagcccggtagatcgagacatgcctgggcaatgaatggagcgagactccattctctacaaaaaggaaaaaagaaaaaaaaaaaaggacaaaaaagagagactattacacaaccatacttgatagagcagcacagggtttgagaaaatgaactccaattttgaaagttctactgtggataaaaatgctatcaaacatcaccacatgctacagagaaatcttttatgaacggaggggtcaacagatgtggcaaacttcatggttgtctttaaggaattgccacagccaccccaaccttctgtgcctcccaccctgatcagttagcactcatccacatcaaggcaacacccctcaaaagcaaaaagattatgacttgctgaaggctcagatgattgtcagcaattttttttttttgagatggagtctcactctattgcccaggctggtagtgtagtggcatgatctcagctcactgcaacctctgcctcccgggttcaagcactttccagctaatttttgtatttttagtagatacagggttttaccatattggcaggccggtcttcaactcatgacctcaagtgatccgccagccttggcctcccaaagtgctaggattacaggcatgagctaccactccctgccaatcgttagcaattttttagtaacaaagtatttttaaattaaggtatgtacgttgctttttaagacataatgccattgcacactgaatgtagtaaagtgtaaagataacctcctttacatgcactgggaaaccaaataattcatgtgacttgctttattgctatgtttatttattgaagtggtctagaactgaacctgtgatatatccctctttatatatacatatatgaacatatacatagatatgtgtgtataaatatacatgtagatgtgtatgcacatatatgtatatactgaagtatttaaaagtaagctgcacatatgacccatcactcctaaagactttagcttgcaactcccaagatcgcattttccaaagtaacctgcaataccaatcacatctaaaagattaataatgtcaactaacatatacttcatagtttgtccccattatccccccccccaataaaaagcaatgtcttttatagttttttttttttgagacagagtctggctctgtcacccaggctagagtgcagtggggcgatctcggctcactgcaagctccgcctcccgggttcacgccattctcctgcctcagcctcctgagtagctgagactacaggcgcccaccaccacgcctggctaattttttgtatttttagtagagacggggtttcaccgtgttagccaggatggtctcgatctcctgacctcgtgatccgtccgcctctgcctccgaaagtgctgggattacaggcgtaagccaccgcgcccggctcctttatagttttttaaaatccagaatccagttaattgggatgatatgaggccttgtgaaaatcctcatcctcaacatttcacgtgttagttgatgatgattcttcttgaatgaattattacgtttttcgattgtaccaatttttctacatctgttagctgacattcttccagctttcacatccactgcacctttctctctctgagtaccactatggactcacgaattgttatattcaaagtggtataatccctaatgtatttttaaagcttaaatcaccccaaattttgccgatggaaaccactccaaggtggtccctattttcttttcacggtttctgacacaagatgtctttgagcttaccttgtacttttcttgccctagatctagaatcagccacttcttcaaggacttacttatacgacgaataggtcatacatccatctagtgcaagtctccagatattcacagctatacatgccccctccaatcccacccctttcttcatagtcagccaatgttcgttatccttccagagatagtttatatcatggagtaatataaaaatttatgatttatatgtactgtataatagagcaattatattcttacctacccccaacatgctttaactcgaatgatagtgtagtacacttctgagtttgtctgggcttgtagctcttgtctgtcattagattctgaaagatacctattaacaataccctaaaaagatcaggagcctttaggccaagtctcaaacgtttcagatgagaaaaactcagggatggtgacttgacggaagttgcattaactaacaacgctcacatgctattctccggacttggaatgtccaagcaccctgggcttgctgacacccactcacttttcaaacatcaattcttgggaagcttttcccttccttaatgtcccccagataggtgatgtccccttgttacaggttttagaccattatgtacatctccttcctagcacatacatatattaaaatttgtttcctgtctccatgaggagagggactacatctgtccttttcactgctggcacacagtagttgctcaacaaaaatgtgcgaagtgaaactcgaacaggcggtcaggctcacagtccacgcctcttcctactgtggtcccgctgtgtttggacaaatagttccaaattataaactttaaaacctgagaagtctcaatagaaaaagcagggaagtctttccatttccatgattaatggaggaccttagcagaaacggctcaccgcgaggtgtgacgaccgcaggagggcgtcaatcaagaaaatgcccccttgccccggaggcgagtggagccgcacagagccgaggccatacgggccagcagtacggactgcttcaatagaaaacacgtgcaaaaccagagagccagactgcgcacagctgcgaccctcaagagccagcagaaaagacacggagcggcccccactggattgaagactgcacagcctctgcccggcgctgtaggacccgggcctccccttgattgctgctcgcagcggcttctgccagcatcctcgcggaagtggcttgagtccgaggcctccaaatgaaaccaggtggagcggccaagagtccgcagcacctgaactccagccatccgaatcccgccgggccgcagctaagggccgccgagcagccctaggaacccagggcactgtcccgctctgagctcgggaaacggccggtgtgacagccagcgccactgttaatccagggagcgcacccaccgaggaggcgtcttaggccagcggcctctgctcccgccgagtcccgctgctccccgcctggaaacagctgctgccaccccgggcccaggcctggacggcgcccccgaatttcggcagaggtgcctcggggccgcggacagggccgctggagcccgcactccagaaggcggtcttcctcgcgcctcccccgacggacgcggcccagggcttccctcgagggcgtcctcggccggggtgcctggagtccccaggggcgacagccgcggcggggcaccagggcgccagttccccggagcctggtagcaagcgcgtcccgggggcggggagcttggccggcggggcgggccggggtgggggcgggcggctgctcttggggccccgcgccattggccgcagggcccggcggcaggaaggggccagcgagcgcggccccaccccgcggccggcggagcctatcgccgggagcgcggagcgcggataaatgtagcgccgcggcgcgggccagcagctctgcgaggggccggagcgcggcggagccatgcagtacccgcaccccgggccggcggcgggcgccgtgggggtgccgctgtacgcgcccacgccgctgctgcaacccgcacacccgacgcccttttacatcgaggacatcctgggccgcgggcccgccgcgcccacgcccgcccccacgctgccgtcccccaactcctccttcaccagcctcgtgtccccctaccggaccccggtgtacgagcccacgccgatccatccagccttctcgcaccactccgccgccgcgctggccgctgcctacggacccggcggcttcgggggccctctgtaccccttcccgcggacggtgaacgactacacgcacgccctgctccgccacgaccccctgggtaaggcggccgggcgagggtgggggcgaggaagcgccacccggcaggtggcagcgcccgggaggccgagggggcgaagggggcaggcggtagacggctgtggcaaaagcgatggaaaagcagctgtcgggcacgcgcggggacgggaggcgcgcggccggggctgaccgcaccgtgactcagattggttttcctgcaccttgcaggcgtcggggcgcgcgggccggcggtagacctcgcggcgagggcagccgtggaccgcgcgtgttacccggggtggggctcccttagcgggagggacggggaaaggggcgtcgaggcgcccctggccggcccccgtggggcagggatcgcagccgggcccgggtggctacggggctggacctggttcaacaggcttgtgcagtgaaagagcctgaccctttccgttcatacaggaaatcttgagttctcgataggagtaaatctggtttcagaagctgttaagtgttttcctggctgcatgaagcagacccttcccccggagtagtgcacgctgctgattattttatcgacatcctcaatacagacaaattcaggaaacactcgacttctgatagccgggatccgtttttctgatattgttcatttcctctgtgtgggatgtgactttatggcagctaaaataaccagttgcttcctattttttttcgaggctgttttgcaccagtctgaagcctgacgcaagcaaaatctcgaaaaaacaatgctagctttcaaagcgttgaggtgcaggcctgcagacggacggacggaccgaccgacactactttgggagtaggaagcagcagctcctggtcgccagttaggaagggaagcagggacacatagggcatatattccagaacttcggggcttgtcccctcaatgtgcggcctaacaaataagccgcccgtggtccgcgctgtgggtgacccttggcgccttcgaggtctggagccctagggtaaataaggaaacggggcgcctctagagttttaaatgaactctgttattggaagcttcagtagggaccctgaaaacaattaacgtcttaattagcattttaatgtctccattattacggcgcgggctctagctcagccctttaccttaccttctcaccgttaacaggggagggggattgtatttttagttcatctttttatgtttttgagttgttatcctgtctgtctgattccagcctcgagggtttgatgatgcggcccgagcctggctgtggtcgcctgtcggggctggagcgggaccctcagccgggccgggcctgggggctaacgttttcacagtgcgccctgagtttccttgggttactgctgggaccgcgcaggaggaagcaaagagtttttcgagctagaccaacaggaaacacattgacggaaatgttgccatagcccatggggtggctttaactggccgcccccgcgggctgggtgtgaaatcagaggaggccgcggctcccccggccaggattggaggctcctcgcgcaacctaatgcgggtgtccgggcccgagcgcttcccgcgcagccaggccttgtcggtgcagcagccccgctcctccccaacacgcacacacccggtgttcgcaagtgcggctcaccaagggagatccaagggggcaaaaagttatgtataaatccgagagccactggggaaagagggtcgtggtattgtaagcccagccggtagtgcccattctttttggggttaaaggtatgtctggatttagttctaggtgtgacggctgtgtgtctgtctgtgtgtgtacaaggctgtgtgcatctgcggtgtcagtgtgtgactttgggtatgtttgtgtgtcggtgggaacgtgttaggtccacgtgccggtgggtgtatgtgaatgtgtctggttgggtggcctcctggcctacctttgtcatccctggggcccgacagctctggggtctggccaggccgctccagggcagtgggtgagcgccgctcttcccgctcgcaggcaaacctctactctggagccccttcttgcagaggcctctgcataaaaggaaaggcggccaggtgagattctccaacgaccagaccatcgagctggagaagaaattcgagacgcagaaatatctctctccgcccgagaggaagcgtctggccaagatgctgcagctcagcgagagacaggtgagctcgcggggggcctggggccgcctccggggaagggaaggcttctggggtaggggtcgccgggccaccgagagagaggcgaggagccaccctgccctctggcacgtcccgacgcgggctcgttgcaagttttctttctctctttcctgtaggtcaaaacctggtttcagaatcgacgcgctaaatggaggagactaaaacaggtatggacatggttctgtttctatggaaataaatatttttatcacgttatctcagtgcaaggctgttatgggttgtatgcaaaagtcatttaagagactatttaacctcttcaccttgattaaaaagacaaatagtcctgctgaaattcaggatgagttgctcaggtggcagtaatgctaaaagcacctaatggggttcctatatcaattatgcttgggttttcacacactggctagtaaaactcccagctaattgttttataaatcccatatgttgtttatctaattaacgcaggaaagataaagtaattgacagtaaatgacttaagcagttatctttgggagaaaattgtttcttttatttacacagccataataaaaccaggcagaactcaagggtaaatataaagaaacaaacacctttaagtcttgtttgcactgttttttagaagaattaaatgtcagggagtttaaaaattattttctatctaatgccagctcttaaaatgaaatataaaacttgtaagaaaatattcaagcctgtttggaaagtagcttaaactttctgacagtctttcttccagtgaccttgtttcgcaatatgtgataaaaagtaaaggctaatttagtttttaaaagaaggtctattgacttaaagctaaacattcatttttgatgtcctaatctggatatactctccaaagttatctgataattgctgaattgttcacttgtcattgtatatacggtttataataaatactttgaaacaatgagtggagaaatttaaagcaaagtggattttaaaatttattgatcattactttttcattaaaaagaaagtgtcccaaagaatattttgaaatagaaaataaaattcccataacttcattactgtaatgtgatttaaatatttgcagatccactctcaatttctgaccgtgtgcatctatttgttgagactataaggcttgcaactatataacaaatagatgttgtaatatttctatgtagtatttatatgcattttagacaagtataggattaaaaattcactagcttatatacttaatagttcttggtcaaaggcttgactctagtttaccagagaccttaaaaatagtggtttctatgtaatatggggatatttcccagaaatttgccccagattttaagtaaattgtagctaattgtctaccttctcagttggcagcattcttccagatccacattttttttctttgccatgattttgtaacttgttaaacatttacacatgtagatgtttataaatttactccagaaaatgaatgaaaaaagatccagtctaataattgaaactttattcttaattcaccagttagcattcttatttttaaaatgtctgaaagactgttaattggcaaggtttaaatatttaaagaatgaagttaaggtgtatctgtagtgatctgattttctttcccccttaaacttttgagaatattgaaaccatgggtctgggctggtgttaagtaaccagaatttgtgttcaattggtataatgtatctgcccttatgttcatgactggttctcatcttttaagcatataatctttgatatgacagaaacttttcttccaaagtgagcaaaaagcacaagtatgtatctcctgaataagattataaactgaaaacactcagtaaactaaaaattaaaagatggaataggatgaagagacattttgatttattcctctcacctatccatattttatgatccttccaatctccattttcatttcctttattcaggagaaccctcaaagcaataaaaaagaagaactggaaagtttggacagttcctgtgatcagaggcaagatttgcccagtgaacagaataaaggtgcttctttggatagctctcaatgttcgccctcccctgcctcccaggaagaccttgaatcagagatttcagaggattctgatcaggaagtggacattgagggcgataaaagctattttaatgctggatgatgaccactggcattggcatgttcagaaaactggatttaggaataatgttttgctacagaaaatcttcatagaagaactggaaggctatataagaaagggaatcaattctctggtattctggaaacctaaaaatatttggtgcactgctcaattaacaaacctacatggagaccttaattttgacttaacaaatagtttatgtactgctcttaggttgttttgataaagtgacattatagtgattaaattcttccccctttaaaaaaacagttagtggttttcactatttataaaaaattaattttgaactttttgttaaatttttaagttatagctttaaaggttttaataggaccttcttgaacgacttttctgtaatctgtttatctcccacttaatggaaaggcaaaggggtaccccaaatccagaggtgcctacatttcaggcagccttggagtattttaaaaggaaaacattctttacttttatatgacattcttatactgctgtctcaaatccaaaaacatttcagagctcttgtctcagagatgtgtgttctttttgtcagagatatggttgatgagaatcttaaatgcttgttttgcactatcacttagtacctgtttgaccaaggtgttaaggggatagtacctcccaattcaagcagagaaactgacctgactaaagttaatcgcagatgaactagaagtcacaggttaattaaatgtaagtagattgtagatactgttttatatcaaacaatgtttataatgtgtatatagaattgttcactgtaaaaaaaatggccaaaatgtgttttttttttaataagtaacttgactataaaataaagccgtccgtgggacgactgacctcgttgcaagtctaattctttgattttaaaaagtctgcacaccttttcttgacctcctgggtgcttggcgcggtgctgggctctggggacaggaagtgactggggctggatcttgctggggctctcgttccgagtcccaggaccgcgggtgggtgcctggaacgtgggttggggcctctcccgggccgtttgccttggggctctgctcctgccggcggattctgagcctgatgggttcgagtcccgggcacgccaggcgacgggaagagccgaggcccaggcccgctgcgccgtgaagcgcggggccgtccggaccccatcgattctcctcggcagccgggctggccctcgccgtccttgaccggctgagtcaacaccgcgtcatccctcggcggccggggctcgggaacccgctccgcgcggcggggcccggggtggggaagtccgagtggggggatggggggccctggccgaggggagcggggaggtggtttgcgctgagaactgttctcgaacccggggaacttcagaacctccttcagggcttgtggaaacccagccctgttcctggagttctgatctgttaggactggactgggctgggaccgggaatttgtatttccaacaagagctgaggtgacgccaaagctgcgggcccggacaccacccctggggaaccactgatgtgagcgcacggggtgcggaagaagcaggtgggaccggcactcctcctcccacctgctttcccgggtaactttggccagcaagaggctggggcggagggctgagaggagggaaaggcgagggggaacagaggaacgaggggcttatccaggctagtgggagtgaggtttgatggctgagcagagggcgcagggtggaggaaggggcaccatgaaatggagggagaatggggtgctgaggttaggtgggtgtgggggcccaggtttctgattgttcagggtattgctagtctgtgccagctgcttgcctagctgagccatcaggtctctgacattccaggaaaaccatgacagagatctgttggggagaggcctggaaatctctctctagccttggcctccatggaggaggcctctagttgtagagttgggtacttctggctaaggacctgtgaaggaatgacccgacccctggcctggcttctagggctgtggcgcccccagatatggacactcagatgaagacagtgaaaaagtcattgctgttagggagttgtcacatccggcttccttagattctaagaaggcccctggaattgcaggggaattaagatttctgagaaaagcagtactagtccttaagcagagaggtgtggatagacttggaagtttgaagatttgggttggtgttttagttcttggcctcaaatcatttgtagaacgaagatggtctagttgaaccatatgaaccccttccagctctcaaattcccaactcagttcatgccgtccttattgttctccctactccccatgtctcctcagccttggcacccaaagtggccacccagtgggagagtttcccttcccatcagctgtaggctccagaccctgcctaaaagattacatcaaggtttcaaaggtcataatccatctcgtctgaaaatgggactgtccatatcagatttttggagaatgggaggcttatggatgtaatattgaattaaagtaatcctgaaacctgtgtgtgtgtttcgcttctggagataaaccctagttaatgtttattcttgagagtaactgtatcatgactattcagcagagaaatacagactaatgtattgattcacactagaaaacttgaggggtaaaatctagttttaaagttgacaattccctgaaaccaggctgctttccaatttcaagcttatcctaactctcaccaagttgctcccattctgaatctaaacatgtccttaagaatcaagagcatgttaactggaggaggtgcagtattctcaggacacaggtaggcattcacttttctgaagtaccccattgcaaattgccaatgaagatttagaaattcctcctacgatccgggcatttttcatttgtttgtcttttggctatttcatgttgaagcagcacgtatgacctttacagcacaactcctgtcttgtttttaactctttttatcaggagattcaacttgaaaacggttatcatttagcagaaagacaaacagaaaagcacatttttgtaagcaaaacgttaatgatttgaagaattgccctaatttcaccatgacagtgtgtgattaatcccctgggtcgtgtacttatactttaagttattcagttcattggtctttgatattcagaaccctttctaacttaatatgatattgattttgttggatgatgtactttgactctttaaacaacatcacttttagagatgactagcctactgtgtagtattttatttagagaactattgcataacatttctttttcttactttttatggttttctcagggtgaaagctgataagacatcttgtgggaaaagaggaaaccatctctgatagtgaaagtaccttttctctttcaacttttctgacaagcttttgtgtgtgtgtgtggttttcattactgtgaatattcatcttagttaatgggggcaggacagggattcaagaaaacttatttggacttggggaaaacgcattttgctggggacagaagagacttactaaaattcccactccagatatattggcatgtggaagctgatgaacccaaaagctcctgattttgattttttttcaagatctaataatcaatgatcctttaaatctgtgattggagatacttatgtgactacttacaatatggggcagaatgtgaataccaaacaatcacccaggatgcttctaaatgattgggagttcaagccaggcactttgggagaccaaggtgggcagatcacctgaggtcaggagtttgggacaagcctggccaacatggtgaaaccctgtctctactaaaactacaaaattagctgggcgtggtggcacgtacccgtaatcccagctactcagtaggctgaggcaggagaatcgcttgaacccaggaggcggaggttgcagtgagcggagatcatggcactgcactccagcctgggcgacagcgtgagactgtgtctcaaaaaaagaaaaaaaggctgggcgtggtggctcatgcctgtaatcccagcactttgggaggccgagccgggcggatcacgaggtcagaagatcaagaccaccctggctaacaaggtgaaaccccgtctctactaaaaatacaaaaaattagctgggcatggtggcgggcgcctgtagtcccagctactcgggaggctgaggcagaatggtgtgaacctgggaggcagagcttgcagtgagccaagattgcaccactgcactccagctgggcgacagagcgaggctccatctcaaaaaaaaaaaaaaaaaaaaaaaagagaaaaagaaaaagaaaaaataaatgattaggagttcagtattttgtggtcaaagtaatcaggttgtactgacatttatttttcagtccatagaggttttaggaagtcccagttgggctctgtatatgtctaatctaattttgtcccttgatatgtattttttggtattgttgataactccaaataagaagcactttggagactcctcccactcacccaaagatctgagaccccaggtctacagaggagcagctaccccttcacatgtggctgtaggaaaaccagaatcaccccgttgtggatacaagcatggctagcagcaggggagatggaactctctacccctctcttgctggctggggccccgggggacacccgcatcctcagcctccggtccctcagttcctagagcggagcgtggctcccccgagaggaggcggcgtccctggcacgccgtgggccccgagtgtcagtcagaaaagctagacaccccgagtgattcccttcttttgagacagctcttgggttcgcagttgcaggcgggaaacctcttcagtcggatgtacacaaatctctctggataacacagagggctgctgcgaggggaccttggagctggcagagacatttcctgtctgcggaggatcttgactttggagcatccggccgtcgccgcgagcggccgaacactttcctgcgtcgctgctttaaaaaaaaaaaaaaaaaaaagtcactgccaatatcaggcgactttccacatgaaagccaatgaggccgcttcccacttaaaaaacgtttgtttaaaacgtattttctaagcattccttagactcccttttattttggagggggaatttggtatctttgaaaaaccttaagtattcaaaaatctcattctctctgaagacaacttcttagatgaacaagtacgggaaacagttaacagcagagggtccctcccctgctgctcgcagacgctcgcagtaagatatgctcataatcttgtttatgtttttctttcatggtttatgcccttccatccttcttctgctccccacttttccttccttattcattccctttctcttttttcccctttcccttttaggattcctcatcttcattcagtttacttccccatttagaatagaaaatgactaatctctactctttagatgtcactattggggccaagattttctttaaatttatagaaatgttcaacttttagctgaggtgagaatcctgtttgagggaaatgttgctggagtcctaatgcgttgctcccatcccgccagggatagttttttttttttttaagccaagataagcaataataataacatagtccaggtacagtggctcatgcctgtaatcgcagcactttgggaagccgaggcaggcagatggtttgaggtcaggagttcaagaccagcctggccaaaatggtgaaaccccgcctctgctaaaacaaatacaaaaactggcagagtgtggtggcaggcgcctgtaatcccagctactcgggaggctgaggcaggagaatcacttgagccactgcactccagcctgggcgacaaagtgggactccgtctcaaaaaaaataaaaaataaaaaataaaaaaataaaataacataaatagaagagtaataatccctgtgtctctagggtccaggcgctcagtagcactggagtgtaatggagctgacagagagagatgctgcaataagggatggacagcagatgctgtggcagagtctgccagggactcccaaccagagaaaaggaaaaggaagcctgttccacggagaaggatgatcctgtacacaggtctggaggtgaaagagggcagggagtatgcatgactggactccagagattttggatttcagaattttcagtgagggattgtggacctgtgttctctctacccaccacacaggtctctttgtttttgcattggcactttcctctctctggaactctctttcccccaaatatagcctcatggcttgctccctcctctccttcagacatggccttcccttgccacctttttacaatgccaacctcctcttcctatccccaacaacaatttaattttctctatttcacttaatgcaattggatataatatttttactgccttatttattatgtgtctctccttattgacatatgaacatcatgagggtagggatttttgtctgttatgttcactgttatgtatcttcagcctgacctattaggtgcttgttaaacatatgttaaattagtgaattactgagcacgtactatgtgctgctaaatattatgtaagtctttcacctgctttatatctttatatcatttaatcatcaaggaccctatgaggtagaggctgttatcaaccccattttctagataaggaaactgtcaccgagaaattaagcccaaaacctcaattactataccgatcaatgttgtaatgagaacttcctcactgaatctgttgcattcttgaaaaggtatcaaatcaagtctaactctagctataagaagagaattgaggttttttgctcatcttacctaatcttttgccttgattcaaatctagcattacatctggaagggactatgatacagtataagggataagcaatttctgtgtatgtaacatattattctattacattaggaaactaataagctgagtgaagtaccatttccctctcagttttctggggaaatgagcattataagatacactttctatctttcaaagcgttaaaaaaaacaagttggccaggtgtggtggctcatgtctgtaatcccagcactttgggaggccgaggcaggcagatcatgagatcaagagatcgagaccatcctggccaacatggtgaaatctcatctccactaaaaatacaaaaattagccgagcatggtgttgtactcctgtaatcccagctactcgggaggctgaggcaggagaatcgcttgaacctgggaggcggaggttgcagtaagctgagatggcgccactgcactccagcctggtgacagagtgagactccatctcaaaaaagaaaaaaaaaaaaaaaaaaaaaaaaaatatatatatatatatatatatatacatgaaagtttgcttctcatctggcccattgaggcatgttccacaagggactctgaacatagcagtgtgatagcttactatttgtgtccccagcatccagcagtatgtttggcctacagtaaacttttaataaatatcgttctacagaatgaaagtgaaagccatgtgccctccctgaaggagaggagagccatttccctccctccccaagccccgcaccctcattatacttcctattccttggccaccagaaacatagcttgcctggatggctttggcagcacagcagaaagcatagtgggcaggggctgtaagtgctacagagacacttgacaggtgccaacttgggccacgggtgaggcgaggacatatttaggtctgtttaagcctaaaaaagctctaaaagaaaatgttctcttccatctttttaccagcataaatttgaagaggaagtgcttctgtggttttattggccatttttccctttcagacttggcaatttcattcaatttccagttcacacttctcaatttcaatcaagagttttatttaaaatatatccagtttactgaaaaaaaaaatgacactatttgggatgggctgtgatcactactatttttatcagcatcatctattcagaaaatggaagcaggaaatccaaattttttaaatgatttctgaaagtattttatgaattgcaaagaagtgtagaaggaagagaaagtgtttactttacatgctctttcaaagtttcaactttccttagctgcttatggaaactgcattactacagactttccattaattgtagattagaccagactaattcaataaatgtttaaaaaatggaccctgagtgcaggttcagacgtccagaggaaatgacttgatggtacggaggtggaagggagtgagaagttatgatgatgtatggtgctgttgatcagttaattgaaggtaaaatttttagcttcaccaagcaattacctgatctcattaaggtctttaaaatcacctaagtaccatttgcctgaggcagctgccccttgtttagatgttatttcaggcattaagaaaaacacaatgttaatggtgaccagggaatttatgcatgcagtttctagtatatattattctgaatcttagccattattcagtattatccaccttgtataaacatggggcactaaaatatatttacattttgtatatatttacatttcatatttgttttacttttcaaatgtattttaaagcatcatgtttacaagatagttttttttacaaataaaatttgttaagagatatggattgtcaatttttttcaagaaactacttattaaagtataatatatatattttaaaagctcacaaatcataggcgtacagcttacaacatgactacactatgtaactggaatccatatcttgaaatagaacattaccagatcccaaggagctctctttatgccccctctagttcactatccccaaccccactccaagggactccactaacctgattccaaatggcatagattcatttgccaatttttgaactttatgaaagtaaaatcccacagtattttctcttttatctcccattcctcctccattcctttagttttcaggttttgttttgttttgttttgtttttggagacggagtcttgctctgtcacccaggctggagtgcagtggcgtgatctgggctcactgcaacctccgcctcccaggttcaagcagttctcttgtctcagcctcccgagtagctgggattacaggcgtctgccaccacacctggcaaatttttgtatttttagtagagatggagtttcaccatgttgggcaggctggtctcgaagtcctgacctcaagtggtctacctgcctcagcctcccaaagtgctgggattacaggagtaagccaccgtgcccggctgcccattcctttagttttttttgctggtaaattcatccacgttatggtgtgatgttgtttgtttatcctcagtgctgcaaagtggtccattgtatgaattttcatgttagtttaaataatgcatctaaatataaaaactgtgccataaaatttacatttgaaaatgacactgctcacattttactggactccaagactcctaggtggagagaaagaaagacagcagaaagagcaggagcatcaggctgtcaagaaacaaatcactgcaacctttcacatatcagaagggctgggaatatcagtaaccaatatctcacttatttttcccactcaggtgggttaaatgaaaaaaatcaccgaggccgggtgcggttgcttatgcctgtgatcccagcactttgggaggctgaagcagttggatcacttgaggtcaggagttcgagaccagcctggccaacatggtgacacccatctctactaaaactaccaaacaacaacaacaataacaacaacaacaaaacccctaaaaattagctaggcatggtggcaggtacctgtaatcccagctactcgggaggctgaggcaggagaattgcttgaacctggagggcagaggttgcagtgaactgagatcatgccactgcactccagcctgggcaacaaagcaagaatccatctccaaaaagaaaaaaacaatttctaaagacaacttcaattctggacataggtctccctgtagttacagtattttatttcagtagttttaggaatttagtttgcattctattccactttcattttcctgttactttgatgtttaaaattataaagctgctatgggatgatgtgctggattttatgtctagatttgctgttaagtagcaatgtgactctggagatatcaattacctctctgtttcctcatcataaaatgaggctcttggaccaggtgatttttttttttttttatttttttttatttgagatggagtctcactctgtcacccagtctggagtgtagtggcgcgatctcggctcactgcaacctccacctcccgggttcaagagattctcctgcctcagcctccggagtagctgggattacaggcacgcaccaccgcacctggctaatatttgtattttttagcagagatgaggtttcaccatgttggccaggctggtctcaaactcctgacctcagatgatccacctgccttggcctcccaagtgctgggattacaggcgtgagccaccgcgcccagcctaggtcatttttaatgttgcacttaacactaagacgctatgtttttctgttctatatctttctaagcaacatattcacccctaaacttcagtggctatgtgttttaggtgttgagaggaatgaagaatcttttatttcaccggtcttctggtgttcactccctgagcaggacttgtcttatacttaagctcagttc

SEQ ID NO: 757 - DNA, 1220 bp, Homo sapiens
taaatgtagcgccgcggcgcgggccagcagctctgcgaggggccggagcgcggcggagccatgcagtacccgcaccccgggccggcggcgggcgccgtgggggtgccgctgtacgcgcccacgccgctgctgcaacccgcacacccgacgcccttttacatcgaggacatcctgggccgcgggcccgccgcgcccacgcccgcccccacgctgccgtcccccaactcctccttcaccagcctcgtgtccccctaccggaccccggtgtacgagcccacgccgatccatccagccttctcgcaccactccgccgccgcgctggccgctgcctacggacccggcggcttcgggggccctctgtaccccttcccgcggacggtgaacgactacacgcacgccctgctccgccacgaccccctgggcaaacctctactctggagccccttcttgcagaggcctctgcataaaaggaaaggcggccaggtgagattctccaacgaccagaccatcgagctggagaagaaattcgagacgcagaaatatctctctccgcccgagaggaagcgtctggccaagatgctgcagctcagcgagagacaggtcaaaacctggtttcagaatcgacgcgctaaatggaggagactaaaacaggagaaccctcaaagcaataaaaaagaagaactggaaagtttggacagttcctgtgatcagaggcaagatttgcccagtgaacagaataaaggtgcttctttggatagctctcaatgttcgccctcccctgcctcccaggaagaccttgaatcagagatttcagaggattctgatcaggaagtggacattgagggcgataaaagctattttaatgctggatgatgaccactggcattggcatgttcagaaaactggatttaggaataatgttttgctacagaaaatcttcatagaagaactggaaggctatataagaaagggaatcaattctctggtattctggaaacctaaaaatatttggtgcactgctcaattaacaaacctacatggagaccttaattttgacttaacaaatagtttatgtactgctcttaggttgttttgataaagtgacattatagtgattaaattcttccccctttaaaaaaacagttagtggttttcactatttataaaaagaccttcttgaacgacttttctgtaatctgtttatctcccacttaatggaa

SEQ ID NO: 758 - protein, 266 aa, Homo sapiens
MQYPHPGPAAGAVGVPLYAPTPLLQPAHPTPFYIEDILGRGPAAPTPAPTLPSPNSSFTSLVSPYRTPVYEPTPIHPAFSHHSAAAAAYGPGGFGGPLYPFPRTVNDYTHALLRHDPLGKPLLWSPFLQRPLHKRKGGQVRFSNDQTIELEKKFETQKYLSPPERKRLAKMLQLSQVKTWFQNRRAKWRRLKQENPQSNKKEELESLDSSCDQRQDLPSEQNKGASLDSSQCSPSPASQEDLESEISEDSDQEVDIEGDKSYFNAG

SEQ ID NO: 759 - DNA, 1756 bp, Homo sapiens
taaatgtagcgccgcggcgcgggccagcagctctgcgaggggccggagcgcggcggagccatgcagtacccgcaccccgggccggcggcgggcgccgtgggggtgccgctgtacgcgcccacgccgctgctgcaacccgcacacccgacgcccttttacatcgaggacatcctgggccgcgggcccgccgcgcccacgcccgcccccacgctgccgtcccccaactcctccttcaccagcctcgtgtccccctaccggaccccggtgtacgagcccacgccgatccatccagccttctcgcaccactccgccgccgcgctggccgctgcctacggacccggcggcttcgggggccctctgtaccccttcccgcggacggtgaacgactacacgcacgccctgctccgccacgaccccctgggcaaacctctactctggagccccttcttgcagaggcctctgcataaaaggaaaggcggccaggtgagattctccaacgaccagaccatcgagctggagaagaaattcgagacgcagaaatatctctctccgcccgagaggaagcgtctggccaagatgctgcagctcagcgagagacaggtcaaaacctggtttcagaatcgacgcgctaaatggaggagactaaaacaggagaaccctcaaagcaataaaaaagaagaactggaaagtttggacagttcctgtgatcagaggcaagatttgcccagtgaacagaataaaggtgcttctttggatagctctcaatgttcgccctcccctgcctcccaggaagaccttgaatcagagatttcagaggattctgatcaggaagtggacattgagggcgataaaagctattttaatgctggatgatgaccactggcattggcatgttcagaaaactggatttaggaataatgttttgctacagaaaatcttcatagaagaactggaaggctatataagaaagggaatcaattctctggtattctggaaacctaaaaatatttggtgcactgctcaattaacaaacctacatggagaccttaattttgacttaacaaatagtttatgtactgctcttaggttgttttgataaagtgacattatagtgattaaattcttccccctttaaaaaaacagttagtggttttcactatttataaaaaattaattttgaactttttgttaaatttttaagttatagctttaaaggttttaataggaccttcttgaacgacttttctgtaatctgtttatctcccacttaatggaaaggcaaaggggtaccccaaatccagaggtgcctacatttcaggcagccttggagtattttaaaaggaaaacattctttacttttatatgacattcttatactgctgtctcaaatccaaaaacatttcagagctcttgtctcagagatgtgtgttctttttgtcagagatatggttgatgagaatcttaaatgcttgttttgcactatcacttagtacctgtttgaccaaggtgttaaggggatagtacctcccaattcaagcagagaaactgacctgactaaagttaatcgcagatgaactagaagtcacaggttaattaaatgtaagtagattgtagatactgttttatatcaaacaatgtttataatgtgtatatagaattgttcactgtaaaaaaaatggccaaaatgtgttttttttttaataagtaacttgactataaaataaagccgtccgtgggacgactgacctcgttgcaa

SEQ ID NO: 760 - protein, 266 aa, Homo sapiens; identical to SEQ ID NO: 758

SEQ ID NO: 761 - DNA, 102460 bp, Mus musculus
ggcctgatccttcagcttctctcctacctccaggtgaagagcatttgggtgaaacctcctgagtggtgccactcacccatccagctcacttgcatgtagggaatgcgtgagcaccaggggcagtgttcctgactcctgtggttctcggtatgtggaggttcacccctggccaagtgaaggcaacgtctcctgaagactgatcactgtgtgatcactgatggacagaaaggcttccatctggctctttagtttgtccattccattcctcacctgtgagctcctgttgcaggtatggtgtttagtgttcttggctcactgtatttggatggctcttctagcagaaagtgtgttcttgctcggaaggagagccagggtggtgactgtcaatggctgttgtgctgtgtgaggggccagtggtcttgttaaagtttcgtgtgcttggaaactgctcatgtgactaagggggaagggtgattcagctgcagtcctcccagccaggtcagtccactggcactaggaacaatccattggcactgggacagtccactggcattgggataagccatgggtactgggacagtccactggcattgggataagccatgggtactgggacagtccatggatcctgggacagtccactggcactgggacttcttgattttcccctctgtggttgagttctaacacagatcactttttccctctcatctatttttgtttgcaacagttgtgtagggaaggtgagttgcgcacacattagagaaaatgtattttagaagcagttgcacagttactcaagagcataaccttacattttgttcaaaggtcacacctgctccttatttagtgtgtgtgcacatgtatgcaagtacatgtccatgtgttttactgaagtaaacctgggggctggtgctcatggccaggcctggtgacttgagtaccactcctggaacccacatggtggaaggagagaactgactcctgcaagttgtccttgatctctgcgtatgtgccccggcatctgtgactgccaactagagtcatgaacataaaacaaacagcctcttgcaattttcctcacatttaaaacaggaacggaaacctaacaaatgataaatgaagacaacgcaagcacactcagtgctatgaatgtcttaggttaggcattattaaattgcatcaatcataactgtggagccaggagtaagacttttaccttaatttatttggttggttttatgttgatgtggggtctcactatgtagccctggctgatatagaactctttatgtagactaggctggcctgttattcaggggatacatctacctctgcttctcaactgctctgtcatgcctaaatttatgaatttactgagatagagtcttacactgtagctcaggctggcctgaggcctgcagcattcttcctgcctcagccttccaagtgctggggaaacagacctgagccaccgtgcccagatgaagaattttatatttaacttggcattttcttctagaggaattaaagatgcttgaagaaagtatccttcctgaaccttaattcttatttcttgggagacagctcatgagggcatatctaacgcttatcattaccaatctgctgattttatcgatcctttccgaaatgcaagaaaatctgaaggtatggtaaaaaaaaaaaagccagaattatattttgaaatagtgtttgcctttcttgcttgttcctgttcttgtttgtttttgtttttggagacagggattctctgtgtagtcctggaactcactctgtacactagactggcttccaactcagagatccacctgactctgcttctcaagtgctgggaacacaagcatgcgccaccactgcccggctcttgttctctctctctctctctctctctctgtctctgtctctgtctttgtctctgtctttgtctctgtctctctctctagtcaaggtggagctgaggatgaccttgaactgagccacctgcctccctcttcgcagggctgctgcctggtttctgtggtcttggggatggagcacagggcctcgtgcacactaggcaagcagtccatcaactgatgtatgtccctagccttggaatggtgttttcagattcttgggaaaactaatgtttgtaatctcaactgtgactccagaccatgagagatctgttttccccttcagttctgctgcagtgttagcaactgaagccaggcctctcacgtgggttatactctagctgactagaaactttagatagaggtttacttacagtcttgatcctcttgcctcagccttctgagtgctgggattatattactgtgcacctcgatggttggccaaatttccttagtttttaaccacgtctttacctctttttttcagaagcctgtctggaatatcctattgtatttattccattgtgtttcttttgatccctcttggctgttatagtctccgagagtgtccttatttctcataatcttgacattgagggatagggtactggctagatacgctgtagagtgttcctcagttgggagctgtgtggtgtttcttcattactggatgtcaaatctgaagaggagggctacagaggcgaggccgcattgtcacacaccaaggcacctactatctgtttttccttttcctctgcaatgctggtgactgggcccaggccttaggcttatgcaaacacttccaccgacctatgctgtgctcctccttgtcttgaggttgctcacggttaacctgacttgtctctattgatgtgaccttcatctccgggctgaggcagtgcttgtggaaggaagtcagtgtgtacctacctcaggagtcaggacttgtgctatatctatctcttagagggctaagatctgtaaaatcatttggaattcttttgcatgggagagctgtaaagtgaacttctaaacattacaataaaggctgggggtgcaactcagagccccgagtttaatctctggtgcacacaaacaaaacccaattaaattattatacagttaggtataaatacctcttgagccttttcccttttgatgtgactttcaatgtaatacacgcttactgcagaaaacacagcacagtgcaaaggcttggcaaacagaacaagacacagttccatggtcattggtagcatttgtgatagccccttccagtctttttaagataaagtaatatgaaatttaaaaatgttttcttgctgggcagtggttgcacacacctttaatcccagcattcaggagaggcagttggatctctgtgagtttgaggtcagcctggtcaactgagatagttccaatcaaggctacatagagaaactctgtctcaaaagcaaaaacaacaacaaaaacaaacaaacaaatcaactaaccacacacacaagttttctctttgaatatgtcaaagacagcaggttcatacaacaatggctttcctagctaggatactgactataagctaccactcgtgatttctgaaaacacattttaaatattttctctctttctaagaagcttgttacaaaagcattcactgctaggcctcatagttctcctcctcctcctcctcctcctcttcctcctcctcctcctcctcctcctccttcttcttcttcttcttctttttatttgaaagttttaattttatgtgtatgagaatcttgcctgcatgtgtgtttgtgtactgcatgtgtgcctggcgctcatgggggtcagaggagggggttggttgccctggaactgaagtcagttcaggccaccatgtgggtgctgagaactgaacatgggccctctgtcagagcaacaaaaaccaccttctcagtccctcttctttctaacattcaaatttgttctttattttgttctttcatgatatgtttatttatttatgtatctaagaaagagtctcatgtatcccaggctggcttcaaatcgaccaggtagttaaggatgggcttgaatttctgactctcctgcctccactttcccagtgttggaattagaaaagataaataagatctagttaaaactcctgtcaatagttgagcagggagactggccggaggacctccagtttggggtcattctgattacataatgagatcctgtttcaaaaacaacaaacaaaaaccctagaagcctgggagatacctctgtgggcaaaatgtctgtcatgctagcgtgaagacctgagttcagtggccagcacccatggaaaggtcaggttgatggatggtgagcacctgtaagcagagacaggctgaccagcgaatcttgtcaatttagtgagctccaggttcactgagagactctgtctcaaaaaaacaaaatggagagaaactggaaaactacctgttgtctacctctggcctctgcacacatgagcacacatacacacatgactacatgcacacatacaaacactaatacacatacatacatgactactacatgtactcatacaaacactaatacacacatatacatgattacatgtacaaacactaagacagacagacagacagacagacagacacacacacacacacacacacacacacacacacacacacacacacggagaagggtaaaaagaaagagctctaaaacaaaagccctcgaaacaaagccaagtaagcaggctggttatagtggttatggtagttatggtgggtggttatggtggttatggtagttatggtgggtggttatggtggttatggtagttatggtgggtggttatggtgggtggttatggtgggtggttatggtggttatggtagttatggtgggtggttatggtggttatggtagttatggtgggtggttatggtgggtggttatggtggttatggtgggtggttatggtggttatggtgggtggttatggtgggtggttatggtggttggttatggtggttatggtagttatggtgggtggttatggtggttatggtgactacggtagcgaatgctgctgaggtactggcaagcaggtctatatagcgagttcctggcctgtcagagctacacagtgagacctgcctcaaaccaaaacaaaacaacaaaattaaccaaaacaacaacagacaagtctaactaagatctctaaactccttttttacaaggtgtttttggactcgcaatgacttaatttttctctttaaaagatttactgatttttttttttttgccgggtgttagtggtgcacgcctttattcccagcacttgggaggaagaggcaggcaaatttctgagtttgaggctagcctggtctacagcagagtgagttccaggacagccagggctatacagaaaatccctgccttgaaaaaaaaaaaagaaaaaaaaattactgagtttttaaaaaaagttgattcatacttacagtaaacaaaacaactcaagtaatacagaaaagtctaaaagctaaattcaaaataaccatagttagcattattctcaaagaccctcttttgcatatatgactcagtgggtaaaggtgcctgtctccaagcataggggatgatgggttctatctctgggatctacatggtagaagaagagaactggttcctacaaaattgttctgtgaccttcacacatgtatgggccactcacaacaccaccaccaaacgaataaacaaatagttcgtgtaatgcatactaaatttattagtgtcttatgttcatttgagcctgttcatagatgcatatgacaaggtttgtgtgtagaggtcagaagacaatctttcaggtcaagtatttccttgtatcatgcaggtctctgagatccagttcaggtcatcaggattggagataggtggtaggcaactttatccactgagccattacatcagccggtactgttactaagtttaaggaagaaaatgaagtggaaacataatgagagctttaggcaagaacatactagttcctataggttccttaaagtgttgcacaaagattatgaaaagcattaggaaagagagaaagggaaggaaggagggagagagaaaaataaaaaacaactaggggagaaatgagaagtggaagatagtggggggaggggaggatgtgtacttccaaggaaacggccttaggtagccctgcacaatacagaaaaccattttaactaactgagaagttagaggcagcgtccatggcccacaagcagcttttatttgaatactagaactgcttcatggccacaagtaaagtacaatattggtatgtcttttctcattgaaggagatttgagaggaccctggctttaatgctttatcccttttctgttgtgtgtatgggtaaggctctcactggaatacaaagccttgagaacagatttgtggatttgctactttgtgtatgcttagaaacgactcaatcaaggctcctttctcatctgggggggggggggggcggggagtccccagtgtattccttatgtagtcattgagaggactatggctgggcgttgatggcaccaaactcttttttttttgttttcagctttcttttttattttatttatttttatttatttatttagttatttattatatgtatgtaagtacattgtagctgtcttcagacactccagaagagcagaagagggagtcagatcttgttacggatggttgtgagccaccatgtggttgctgggatttgaactctggaccttcggaagagcagtcgggtgctcttacccactgagccatctcaccagcccggcaccaaactcttaatcccagcactcaggaggcagaggcaggcaggtctctgagttcaagaccagacagaagcactttactcagtcacctacctcacctgtcctaaagcactaattcctacctaagcagttcatctgttttttgtttttttttttttatggtattttggttaattaattaagggctttggatagaacacagtagcagactacctgcttatcatgtgtgagggaggcactgggttcaatccccaggattaaaacaaaacacttatttactgactgggtaacccaggctggattcaaactctccagctctcctgcctccacctccagggtactgtgattataggtatgtagtagcacagctggctggcgacttgatttgtgtgtctgtgtgcacatgttcctgtacatgtgtgtgtgcacaggtgtgtgtgtgtgtgtaaagaggccagaggtcgatgtcaggtgccttcctcatttggtctctatttctgagacatgatcttcactgaatctaaagcttgcaaatgtggctggacattaagccctagatatcctcgtctctacctatgtagtgctgggattataggggtgaggatcaactcaggtctacacttcagtgacagggctgtcccctcagcctctgcaatctgatatttttaagtgatagtttagtttgtatctcaatgaaagcaatatggtataatgggtaagatgtgttcatttaattgtgtattttaatcctgtcattttactgggctagatatataaaaaaaattttttttttttgcctctaggtcttttagtaaacagtaggtacaatcaacacggatgaactattctgtgaattacaagttaaaattatgtcaatttaaatagggttctgaaaccacgcattatatccctccttgtcttcttgtctgagtggttcacagcacacaaatgcataattgctgacctaacgataccatcacttcaacttacaatgcctctactttaacagacttctaacagtcagtatcatacatgagactaagccaatttatagtgatctctaaagtgacaagctagactctttggttgtattaagatatgccttttgccatttcatttacataccaaccattattatacccaaatactcttctaaaccatggccttcgaatttggaaattgttttctgcacgaagcctttgttgtgttttctaaggggatgtgtgcacgtgtgtttttgtaacaggatttgacctatcactgagaattttcttagaggagttcaaagcattttacagggatcatgtcatttacccttccaaagtaaagcatgcattgatctcctctacagacccagaacactaaagggccaaggtaggcggggtttttgttgttgttttgttaagatcaaaaagtaattctagggcaattccagattccggtctgaccttgttacatgatgcttttgcaacccttctgtgctaggtttccagtggttttcagaaccaacgtcttactcattcctggtccttaaaaatgttaaaaggtatagatacaaaagaaaaaatcttcaatcatttttatatggatttttgggttgttttcaagacagtctgactacagacagaccaggctggcctttaaattgtgatttcactgcctcctaaagtgctgggattacaggtgtgtcccaccacaccttggttcttatatagagtcaagaaaaggaaacttattttgcctttttccccccttttggagacagggtctcagtatgtagccctggctggcctgagatctgcctgcctctggctcctcagctctgggactattagcatgttctaccacgcctggctctcctaagtcttacttcctaagtgctgtctaatagagaaataacacggaatacaaagatttctaacaattatacgaaatatactgaattcagttcagtatgtccagactactaataattaacatgtagtttagaattatgtaagacatctcacattctttttcctgtctagctcttcaaaatcagctgtgtacctcacttatgcttacagcacgctcagacctggagaccctgcctttcacacacacagaaagaagccacatgtgattaaagtggccccacagatccagtgggacagcatcgatctgtacttctgaagcttagattggttcaggtggatccagtgggtggtatgggaaacggatccctagtaatcttgtagattcagctctgcctatgtaacggctactaaaaaacccctgcttggccacgtgctgcttcgtttgggagctgcggactcaggatctagaaggttggttttacctccctcattgttgtcgaatcatactgggacaacctacaggaccttggttgacatccttcgtgagaccaagggcaatggaactttctaacgtctggcttgcatttttttaagaatctggtttgtggcttgtggaaagaaggcatcaacctggggaagaggaagcctcatgggaccaaaaggcctcttgagggcagaggctcaactttgatagttcctgaagccacaggctcctcttgtgacctaggtgggagttttctgtgaacctttcagcaatctgtctgtctgtctgtctctgtctttttaatttggacagtctcttgctctgtaggccaggccggccttgaactcatggccatcctcctgccttagcctcatgccgggatcacagacgagagccatcaagctcgctttctccatccggtcttgaagacacacgcttcaactagatgttcctggtgctccagaagatggggatgtcagtgaccaggttggggttcgcaccccgaaatacaggcgtgaggggcgggtctcggcttgggcccgcgccgccccatgtgacccggtccgacgtggtgtcgcctcctctcgaggaggcggtggcgtcttcggctgtgcgtcgagccggccccgcggccgctcatgagcagccagggccgctcgggtccccccgggaaccgcgggcccagggaaggcgagggcggggaggcgaggaaactgcaggaggcgagggtcgcgcggggaaagcaagggaaagggaaagggaaggggaaagcaggtaccgggcacggcggaagaggaagcggggcggaaggaaagccgggcctgcagccggagaggaaggcagcggggccggcggctgaggcaggccggggacaggaaggcgagggaggcgaggaggaaaggccgagaagctccgggaagcgggatgagggcagcgcagagccggggaaggaggagcggagggtcggggccgggcggcgggaggacgacagcctggagagaggacaggagcagggacctcaggcgtgcggcggcatcccgggaacccggacggccatggcggaggacgcggcggaggatgccgcagcggcggccgtggagccggccacccgtccggccgcggggcccgcgctctggcgcctgccggaggagctgctgctgctcatctgctcctacctcgacacgcgggccctcggccgcctggcccaagtctgccgctggctgcggcgcttcaccagctgcgacctgctctggcgcccgatagcccgggcctcgctcaacaccggcttcacgcggctcggcaccgacctgtaagcgcccgctcgcccgcccgctccccgccccgggccggccagcgtcctgggaaagggcggggcgccgaggcctggtcggctcgggaccgtgtggcacccggaatactgaagcccagacttgccccccaccccctccctctcccctcccccagcaccctcgaggaatactggtgtcacccctcttcaagattccccaacccgaggaaacttccggagagcattcctcagtcggcaccctcccccgtgggcggctactcacagttagccatcctaaaatgagtattcccaaaggtttggctccctgggttccttgccctgtgtcctgtgcgacagacaggacctgaagggtgactcctgctggttctagggcccaggcccaggtccaccaacgtggtttttgtggcctttcgtcctgcccaccctctcaaaggttgttaggtttcagggctcagatcaaattaaatgtgcagaaaagggctcagaaccttaaaaaaacaaaaacaaaaacaaacaaaaaaacctttcagttccattgtcaacctattttaggacttaattcaggtggaaggacccacaaaagatgtctgtgtgaggcatcaagttggatttggggtaggcggtatccaagataggcagtttgacctagtaatatctgagacccgtggatgcaaaccattcctaaaacactcaggctgttaaacaggaaggggagagcgtgtatgacagtcacagaactggtcaggataaacgctttcagactgcaccctgctcttgctttgttgtaacatatgtgaatataataaagttttaaaaaaccgtaagaaatgatcatttgatgcactcctatttccattttaaaagtttttcagttgcacaccccctaaccctactaccccccaccccccaccccacttccccatcctaacagaatgaatgcttaatgaatgatgtaatagatttggaggtatgtcatacgccatgacataatttgtcttgaattaactccttagaataaaaatttcaaggtagccactattggattaaaggttttgatgggcagaggtcacagtataccagcaaagaatgagtgagccggtttgatgagagaattaaaccacatctttagtgggtgagtgatagtagccaaagctctgttattttgtatcgctctgcgctagccaggataaatattttgccatgtgtctgtttcacctgtgagactgtttcttcctactccttgtctctggggtcttggtgtttttgttataaatttggaatttttctgggtcataaatgtttgactcttgtctgtcatctttgatgatagaggtacattttccagtcaatttttaattttattgttattagaattttatgtttcattagaatctgctcctcccccctttacctgagaaatttataatctttccacaagcctgacaaatttgattgccaactagttttttgttaacttttttttttttaatggcatttcaatgtcagtagcacttgttttggtgtaaggagtgaaattctcttattatatttttctctaaatggttgctcagttattgctacacctttggctaagcaatcccccccccccccattttgttttagaacgcttacattgctgtatgttgaatacacacatacatttgtatattcactttatatctgaactctcacatttttctcctggcttatcttctcatttccataatattttaagcatgttgctccttgatagagtgtgatatctgctagggttagattatacttgctgtgttaaaatgtcagcatcattgttcagcttgcagttcatgaccaaaaccattctatgcctttttaaggatttttgtggttttcactataaagttctaacataccattttttatttattactgatttgttcctgtgcgctctatgtttattagaaaggcactttttctgcatgctttctaatgtgtcatcctttagtaagttttcaacatgattgtcttgtttaaagtattctattctaatataatttgttgataatgattcctttgcattttatgtgtatgtagtcttatcacctgtaaatatgagtattccccccccccgctttttttatctgaataacttttttaacccaaagggaaaagaaccagaattatatgtttgcctctctagtagtctgtagtaaagtttacttgtaaacattttatgtgcttttcttctctttatgttcttaacggcatatattcactgtctatagtactgggtttcagaaagacttttttcttttagacggatcatgtgcttggacagagtaactcattgaaggaatattgaactataattgaagttggctaaaatgcctgggattcaagccaaccaaagcaaagtttggctttctgttgctccttacagtagagaatgaaagagtcgatgtttatttttgttttcctttctgatattctaaaagcgagaaatcgagactgataaaatgaaaatgaatttatagtataaagtgcttagagtctgccaaatggtatttgttctgctttcccgttattagatatgtgtgtcctagcatgaagcattgtccttccagaggagttgtgctgccgtggcagttgataaagagcaagggtcactgctctgttttctgggttgaggggagaaattatgcctgttgtagcaggtggagagcatttaccagtgtggcctgcttctggacagctgcagagacttcataaaccccaagagaggcagttgtcatccctgaagagataaggccatgtaccttagtccgttcagagcatcagggcaccttcaccctgagtgcagaacatagctgcttgcataaggtggctgttcatgctttggactgactgcacaacagacactcaagtagttagcagtacaaaactcttagttttatcttcttaaagactaggaagaccaccattctgtcaaatgagttgtgactgtgcttactgctagaaggccttccatgaggacttttcattatccgctgtccccctttattctgcctatgtcagaagtgggcatggtttgatttggaagtactgcctaacgacaggagggacacatacacacaaacacacacaagacatcttgaatggtttcacaaacatgacagcagagcctgtgggcagagggactgcacttactgctttaagggccttctgattttcagaaacactaactgccaaggtttactgaccttccggcccagggcaagccctgctcaggttagctgttcctaactgatggtagctttgttgagtaagatgagctgctttggttccttctgattggttaatggtttatacttgtgcttgaaggcatttgagccacttagaaaccacaaacaaataatttgcttccctttaggccccttgcccaaacagtgaacactaagaagtatcctaagtgggtttttccttctccaccgtccccctccccgcccccccccctttttgaggaaacaaaaggtagtttgaatcggtcatctgatttcaaatttgttttgtttgaaagctttatgaagcctgggagagtagaaatatcttggttataataataaaaatcaaggtagtgtttcatacagcagacttgtgagttgcagaatgtgacgagtattaagtcagtgcgcacaaagcaatggccgtgcgctctgtccacacgtgatgcaggctgtatgcatggagcacactgatgagggctggggacagaggtgctgtctgtaaactctgatgccgaaaattagaataaagaaaggggaaatctgcatagaaacccggttaaggaacacgttcagtttctgccaaagctagcttgatccccttctttgtgttagtgttacatattctcaagggggtggccttttaaatgtcccgtggacagtttcctgggcgctgttttacattagcctgtgatagatgtgcctagcattaacaataggggtttcaggagtggagctcctgaggtgtttgccctggcatgcaggctcattcctttggcggtcctgcagccttgggagctctttgaggctggaggatgtgggtatctatttcagtggtgattaacatccagagtggtgagatagacgcagataagcagagtgtgtttgtttgttttaaaatggtcgcacctaagagtgcttcccaccccggtggagggaatcgcatgaagtgtcctaactgagtggtgggcattgctgattggtctttaaggcctaaactctggtttttagaaaacaattagcaactcaaaagtagcttagtagggttttttttgtttttgtttttgtttttgtttttttgcttttatatactttcttccttacctgggaggggccaccctctccttagtcctccaagggactgatgccttagttgttttagaaaggtcttattgtcttgtctttttaatatatatatatatatatatatatatatatatattatttttaattatggtgtgtgtgggtctgtgtatatgagtgtggatgcttggggaggtcagagacatcggctccctggtgctggatgagggtacagagagtgaacttgtctgctgtaaagagctgcatgcaaccttaaccactgagccatctctccggccccaggccttttttcttattactttttaaaaagaaaaaatggtttctgagttaataaaaaggagggttcagcttacatgctcacagtaaatacacctgcagaagcaggaaatggtgtggtgcaggctctaccttcagaagcacaagggaagaaaggagggcctccaaggctgtatggatgaaatagtccctgccttccctagtcacctggcctttgaaccacacgggggactgctctaacattcaaggcaggatcacagactccatagtctgtatgcgaattcatttggaaacctagatccttcagcagaagtaaaatttgggttgagcttctgagccaggtgtggtataaggtaattgagaaagcattcaggtcttcaagtaattattatagtgcacttggcatagaaaagactctcctttgtgtgacaacttacccttaactctgtgttgaccttggcattggatttgtgtctggtcctgattcttaaccatggaacaggaagaaattaaagttgactttccttgaggccagattttgtaaattttgaaaattaaggtgagaaggaataaagaggaaaaatggattatgggttttaaagagaaaataggttacccactccctatatacagaaagtgatttttttttttttcagaaaatgtctctgctgtatcagccatcagatgaggctgagaaagagaaggcttggctcacctttgaggcaatcgttcctattctgcagtctgaatgggctttaggtgggaccccacagaagcaagctgaccatcttctagttaaactgtacacatgcatcttggcttctggcagcactcatctaaaacagaaagagacgatctggaaaaagaattgagcccttgttagaggctgggctgccctgtctcagccttgggccagtttttcattttcttcagcctggccacatcgccgccctccctggaagaatgggccacccaatgggctctctgcctgcccctcgttagcctacaattaattgcccgcacattctttctctctctctttctttttcggtatttgacatgagctcaaattgccaagaaaggtgacaactgtgaaatgaagacagggcttgaagacaccttaaaaaatacatgtaaaggccattaaatgacaagagcagactgccaggctctttcaaaacatcaccacgtctgttgactttccattccttgttcacagcacaaaattggaggtcaaagaatcataggagttagagatggaaaagacatttggggtcagctagttcatcccgccaccttctcccaccccttattccaaatcatcccttacattatattttctccctcccctcttgtccagttttcacggtcttcactcagctccagccgttaccttttggggaaggatgttgtagggtctgtccagtctctccttggtgaagagcgatactgcctctgcccccagttgacactcatgaacttctttgttggtggtctcagctgaatgcttactggatgtttctctgttgcttggtaatggggcttttcctgatagtgtgtggtgacaccaggaaggagtcactgctgaattaagtcctggacttttgcttcttatctctcttggcttgaagggaattagatgtaataatggaagtatattgcattgaagtttgataagaaatgcaacctagaaactggtggatttgccagacacagtggcacacaccttgaggcaggtggatctttgtgagttcaaagccagcctggtttacatagtgagttccaggacagccagagaccttgtctccaaagaaaaggaaaggaaaggaaaggaaaggaaaggaaaggaaaggaaaggaaaggaaaggaaaggaaaggaaaggaaaggaaaggaaagaagagaccagtgagatggttctgtgggtaaaggtaggtgcttgctgccaagtctgaggagctgagttcagttccttcccacatggtggaaggagaaggagaaccagctcccacaagctgttctctggcctctgcatgcactgtggcacaggggcagccaacctcattctctttacctttcttcccaagtccctccttccccacattaaatgtaatttaaaaaatttttgtggattgaataaacacacacaaaaatactagactggtgatgtcgtaggacactgtttccagaaatacaagttaggaaaggcagagtcgcctttctggggtgaagcttcaatcttaaggaaaacggagaacagatgtgttggagatagacatctctgacaggagacactgctgcctttgtggtatctttactggaacaggttttagcattttcttatttatctgtgtacgcacgtgcatgtgtgtgtgtgcatgtgtgtgttgggggcgcacatgccacggtgtgggtggagttgcgaggacaacctatgggcattggttttctccctctgtcttgttctaagtgttctaacgattgagcccagggtgtcaggcaagtgtccttattagctgagccaccttgccagtccttccttttgctttaagagatcagaaaaagagaagtcacgctcattggctccacggtttggaaagggaagagtggattttagaggcagcttttgagggctagccctaactcccccttcttgtcccagcagctgttgggagcagtccgaagggggtattatatttcttctggtaacgctgccaagaaggagaggaaatccacaatctgtggggtttgggggtggggtggggataggtggcagctgatgggacagggaaattaaattgttttatagtaaatacgtggagatacttttcctggagagctattttactgaaaggagcagtatatttcccctgctcacgaacttaatgagttcctttctttaggaaaaaaaaaaggaaatagcttttggtactttttctttcttgtagttctagctttgacctcctgtgttttttgatttcctttagaaggtctctactgaaaagatgcatcaagattgagacgtggtggtctgtgctcaaggcggggtccctgcagcagtgtgttgtggggagggccttccacccctccttgtcttgcctgcagtttgacttatcatagcagcctagactggaggtgggaaagctggctggtggttcgtggtccagttctctccgtcccttcgtccaggtagtggggccctagggactttaagatctggctactttgggtgattaatatggaacacagttttaagattaaaaacaataaaaagtaaccctgggaagcagtggtgtaattattcctcacatttcaggtggggagtccagggaaaagaaggccagatcacaaagtcagcccgtgcctaagtcatgactcagaggggaggcctgtctgcaaacacgcacacacgcacacacacgcacacacgcacacacgcgccagacagtggcttcttctttactgtcatttattctcagaaagtgctagatcagcttttctgaaagttgtattgtgggagtctcaggaagctaattctgtaatcaaatgactgtcagaaatgctgtgtgctgcatccactgttggggatcacagtgcccattggtaaattaaaggcgtcagaagtcctatcatagagaaacctgtttaactttgttctatccttcattgtccaaaagattttgaaggtaaaatttttctcatgcttcatatgttaacattttgctgagcacacattgaacaagtgccttgcaaattatgaatcggtgacaggagagagcgatgtgaacatgtcccaaatgctaagctagctcagatgaagagcaaaggttatgccgagtgcttctgaaactgctttgcatggcttggatttttggcattgaatttggatacttatgtattgctaggaagagttttacatatttttttaagatttatttatttttttatgtataagggtgttttgtctgcatgtatgtatgtatgtatatatgtatgtatgtatatatgtatgtatatatatgtatgtatgtatatatgtatgtgtgtatatctgtatgtatgtatatttgtatgtatgcatatatgtatgtatgtatatatgtatgtatgtatgtatgtatgcatgtatatatgtatgtatgtatgcatgcctggtccctgctgagtgcagaagagggtgtcagattccttggaactggagttatatacagttgtgtgtcactgtgggtgctgggaactgaacctgtgtcctctgcaaaaacaagaggtcttggttgttgttgttttgtttgaaacagggtttctctatgtggccctggctgtcctggaactccctctgtagaccaggccagccttgaactcagagatctgtctgcctctgcctcctgagagctgggactaaaggcgtgcgccaccaccgctgggcagaacaaatggccttcactgctgctgctgtctcagccctggggagaattctgaaactgagggtggtggtggaagtgcagtatgccaaagggagagccatgcttctgagatctctttaaattaaaaacagaaacaaaacaaaaactaacttccttccttccttccttccttccttccttccttccttccttccttccttccttccttcttccctccctccctccctccctccctccctccctccctccctccctccctccctttctgttttgagatcgggtcttgctatgtcactttggctggggagtaagagacagacagatccccagttcagcacactaacctcatcagtgagccccaggccagtgagagctgaggaggcgagatgggcgagatgtggtggcaccaagtttggttttttttgttgttgttgttgttgttggtggtggtggtggtggtggttttttttttttttcttcacaagctttgttttattttatttttgaaggttttatttattttttatttatatgagtacactgcagctgtcttccaacacacaccaaaagtgtgcatcggattccaaagtcaccatgtggttcctgggaattgaactcaggacctctggaagaaaagtcaatgctcttaactgcggagccatctcttcagaccttcacaagttttattttattaaacattaagcatgaagtagaaattccaaatcatttaaatattgtccagattggctttacaaattcctaaactgctggcagggcaaggcttctagtgagagacttctagtgagtggaggccggcaccaagttttaattttagcgcttgagtgggtaaggaggggcaggtggatctctgagttcaaggccagcctggtttacttttccagcctggtagggtgctagtggtaaatgtgactagtctcttgaagagaagcaaacattgtcaaggacagagatagactgttactactgggactagcactataggtaagtgggcttcttaagttgtttctacttgtgattgctttttgcctgataaatttgtataaagcccaggtataaacgtatatacaataggtatacaaataaaaccttggaacacttctttgttatatatccctttcccgtttgttgaaggtgaagtacacactagtgagatgagtttgcagaaggacttagggggtagctgactatttggagttgcggcaggtagggtatctcggggtttcccagccggccgaggctttggcacgcgtcaccaccttaggaccattttagacattattgaaggttctaccataatctcaaggtgaagttcatttaatgtttgttgtgtgtttgtgtggatggatatacatatggtgagtgcatttttgtgatatgtaggtgagtgtgtgggtgtacttttgtgtgagcatgtggaggccagaactactaccaccaccaccactactactactactactactactactactactactactacgtctctgtctctgtctctgtctcctccttctccttcttcctcctcctcttcctcttcaatttcttattctcttctttatccccttctctctctctctctctctctctctctctctctctctctctccctctctctttccctccctccctccctccctccctccctccctcctcctcctcctcttctttttgagatagggtctttcactgaacttggaatttgaactagactgggtgtccttaagcccctgagatcgcctgtttctgccaaccaggaccaggattttatgagttctaggaagcctgcactgctctcagctagcaaggcagacagtttccttgctggccactccctccccgtgctggcatcgtggacactcaccgccatgcctggctttccgtgggtctggagttctaagctcagatcctcatgcttgggtgttaagaatcttgccagctgccaggcggtggtggcgcatgcctttaatcccagcacttgggaggcagaggcaggcagatttctaagttcgaggccagcctggtctacaaagtgagtgccaggacagccagggctatacagagaaaccctgtcttgaaaaaaccaaaaaaaaaaaaaaaaaaaaaaaaaaaaaaaaccaaaaaaacaaaacaaacccccccaaaaacccagaattttgccagctaagccaccatctccctagcccaatgtaatgattcttttacaaaatgaaactcaggttggcaactcaaacagcaattttaaagtcaagcagtctaatacaatataatccaaagatatacttacaagctgaggcgtgatggtagaaaaatatttggggtttgttttccatgattaaaccaccatgtttctctaagagcagacaattttgtatacacagtaaaaatatggcaattcataatgtaaaatgcttttccgtttgagccaagatgttttgggcagcaatggtcagtattgtggcatgaaggtgtgtacgatgaaaagtgtgcacgttgtgtgttcaaagcgaggctgcagtgaagtcacacctacaacatgggtgatctgtcaaaactactgattcattatgcatttgattttgaattcgttttgtgaagccttttattgtttgttttttttttgaaaccttttattgttaagagatgtttaatgactctcacagtgattacacatggcgctgtagtatggatatgttaagtgtgaaagcagcctcctgcaggcacatagtgtggaccgtgggtgtgagatgataaagtgggttgacatttgaggggaggtgcagggcattctcagctctgtgctgtcctgtgcatggtctttgctcatgttgatgtgttctctgccattttacttcgccctagactttggggtaatttaacatggttttataatatttcagtttctcattgggcagcttgcactcttaggatggttaggactggtgtgggctcaggcaatatggggaagatctgtgttctggaaagcagggaaatcaaggaagagacatgtgctaagggaaatccatgccccaaacttccttttacacagtttgtgccctttcactggctcagtgcatgttagggggtccttcttctatacctgtctgtccttcccaagttccaaagcatcagacttgcctgttgcttgagtagacagtgttggttatcaaggggaatgttgcttcaacactagagattccataggcttacacgcgcgcacacacacacacacacacacacacacacacacgtacatgcaaatgtgcacatgtacacaaacacacaaagagacatacatacatgcacatacacatgtatgcatgcacgtgtaaacgcacacagggacacacatgtgcgatatacacgcatgcacacacacacatgcaccccacatgaacacacacacacagagccattattctttagagtaggtttctttatttgtttttgggttttggtgtgagattggagagggaagtgaaggtctatgaacatcctagattatttctgtcctcctggactcacttgccaagatattaagggggcaggtagcttacagtgggtgcatgctgtattgttttgtttaaaatagtccgtgcacccaggaatgcagtcaaactctgatggtgactaagtgcctgaaagctgagatggaggagtgagtgaagaaattagcctgaggcgaggaaaggaggctgggaaaatggcagttcagccaggcccatgggccaagttagagatttttcctcgcattaacagccacagggagatttatttacagggcactaatcatgttctttgaggggagcaccctgactttatagcagtaactgggagaaatggttagccagaggccgggtgagagccaggcctttgttgatttctaaggcgcaccagcctctgtcctctcaagtacttttctgcttggttctcccctctctttgaatggataacaggtctcagagagagcagataattggggtgtagggagcctcatttttcatgtacggaagccaatactaattaagatacagtttagcaatcagctagggaagctctcgaaaatggctggtgaaggaagggggcgaaagttaagtcgcctttaacaaagtggtgcttttccaagtggaatgcccttgtaaaagctggaggtgaggtgaaggaccgcagcgttcacctcaagagaagagccgtatagtctcagtctttaaaggccaactttgaaagtttcttggtgcagagactcctcagggggagtgtcatactcctcactaaagtgtcaccaagtcgctgttaagtgaccaggcagagggacaagcatctttatcctggtgaggaactgtgctgattcatcatttgtagtttacctgtgcctgttaatctagacctaacttaggagaggggtaactgcgaactcctgaactccgtctctggcgtggggaggggcgtctgcagggaagtgctggcagaatggtgtgtgccttttcagttctgggtcagctcctttcctgtccttaggcctctctccctgtggtacaggttgctccctagtaaagtaaaaccgtggaccacatgtgcccgataggagagttcagtaaaatagtttagtgttaatgtattcgtgcccatcctgatagccttcagcctaaaagataaattgtttgataatagaggagtcattgattagaagaaaataagtaattactagtttagatttagtggtgacatcactgataccattagctagtagatatctttgtgtttataagaaaataatgtctccgtggtgatttataaattatatcactttataaattatgttttatgtgtcatctttggaatatcatgtgtgtgaattatatttagtattttattttgttattgtatgtgtatgatacgtgtgaacactgaggcagttagagaagatcagagaacaactttgggagtaggtgctttccttcattgtgggttctggggaatcaaactcggggcatcgggcttgtgtggcaagcgcttttcctcaagccatctcgggccctgtgtgagatattattctcatttcgtaggtgtaggaatagacggaaagtgacctgaggttacctggtacacactggaggcatttccaggtctctgctttctgtgcttctctgagccgtgtatgtaatctgtctagttaccgataagcaggcgtagtatcacctcacgtagagtaaagaaacgtgctcatgacccaaagcaccattaatatccatcttctgacctgttatctatagaaacggaattttatatggtattcttacttagtcttacgttattgttcagtgtcccacagttgtctctgtgttttgagccctcacatttgtcgtttctagaggtcgcacatggtctattccaaagcgtatgtgcgccgcgctcccacaggcaagcattcaggctgcgtccgtctggccacagcacggtcagacgtctctcgaatttgagttacctgtttgtgatacagtgttcgcagtggaaactggagatcagaaagacagtgccagcaatgtgtaaccaaacccatgtgcttgtgaagtcaaaatcttgtcaggttttcctactatatagaggggaggcagtgtttaatacttgttttaaggtacatttctgtaagttagtttttctcagtgtttcattgagtgaaccccacgtgactgttctcgggctcttggacatggatggctggatacgagagacagagtgttgttttgatagatttttatcagctccctaaaggttttagagatgaaacttgtgtttgcaatcttaggttctctgttacctacctttcaatctcttgttcccacctctgttagcatttaaaagttagtagaatcaagcttacacagtttataatctgtatgtttgtttcgacttttagttggagtgtgtgtgtgtgcttcattttcttctacctaaactgtcttaaattgactttttttttttttaatgagacaaaatcttaggtgagggtgaattggaactcagtatgtgactcaggctggtttggggcttacaataaattctcctgccttaaccttttgagtgttacagtcataggctcgtgctatcatgtccaactaagcttcccttttttttttttaatttgtcctactgtatatgagatggccatctaaatcagtttatttctttcgctttattggtaatgttcagttttgtcaacaccatcaattattttttattaatatatgctaaggattgaatccagagcctaacaaatgcacatgcattctactgctgagctgccctctccgctccacaccatactgcctccaagcttctataatttaggggacattttccccttattaaatattacattgtaatttttttcatctatgatttattttgtctttgaaccttaggagcgtgggttgtaaggaggctttgtcaccacagcgagtcttctagagcacagcttagagactgtgtcctaagactgcttcatgagcacatggtttcaacactacacatgaatgaatccgattctctagctctgatgtgccgaagccagtgccaactgaatctattaacatgcgatttatttatttagcattcaaagttgtttgtgaatttgttttgtataaatttatacttggacgaatgttctttaatcttttaaacattttactatgcttttattttattttatttctctgccagtcttaatgacgtaaaaataaaaatgctaccctctctagcagttctgcttcacaagcgttaagtttctgtgcacaacttttctaagtgtgcaaataaaatgatacatgtttttcaaaaaagtatactacattgtagaagaattcggaaatatataaaagcacaaatgcctcatacttaaataagatattacaattacaattaaaatgagaggagcttcgtaaagggcaaacagaagaagaaatcttgattagaattagaacgggttcttccccccccccccccatcccccagacagagtttttccgtgtagccctggctgtccggggactcactctgtaaaccaggctggccttgaattcagagatccacctgcctctgtctcccaggtgctgggattaaaggtgaatgctactacagctctgttagggttgctcttttttgtttttgttttaaagatttatttatttattttatgtatacgagtacactgtagctgtacagatcatcgtgagccttcatgcggttgttgggaattgaattttaggacctctgctcgctccggtcaatccccgcttgctctggttagccccgctggattactcatttttatactgttaatcttctgtgatatgtatctgtatctttaaagttcagtcctctacattcactactttacaaatcaaaaggattattctgggctggtgagatggctcagcaggtaagaacattgactgctcttacaaaggccctgagttcaaatcccagcaaccacatggtgactcataaccacccataatgagatctgacgccctcttctggtgcatctgaagacagctacaatgtacttagatataataataaataaatcttaaaaagaaaagaattattctgtacaaatacatggcttagataactttctacccaagccatctttttcaatgtgtgttcattagactcttgaaagtgactttcgctcactggcttttagtgttgggtggtacatatgaaggtgtaagtagaaacaaagagaaatgtctgtatgtctctcccttgtcagtgaatttctaggtaggcacagtagtcatcactgtgtgtcccaagcagtaaaccttgtacagttatgtgtgtgaagccatggagacacagatacacaggcacctaaagtggaaattcaagattcttgcccatgatttcaaaactctgtctaaagatgtactctcaaaaggcctttgaactttttgctgtctctgcatcccaaactctgccattttctggctgctgtggcccctgcctctttcatccctttcttccaggtagccagtgctcagtgaacatttttgtaatgaaaagtttaaaacatatagaagagaattatacaatgaacgctcacatattcactgtctagattgcataattatttggccatatttgtttcctcgtgcattttagtactaatacacgccatactagagcacacgtgcaaacccttgattatatcagtttatgtgttttcttaaaaattatgcacagtggctttggattatgattttgagtaaagtgctcaaatttaaacttgatcatttgaaatttgttgatggcgagttttattgttttctaaaagaaaaaaaaatagcacatttaatgtgtgtgtgtatcacatggtggagaacagagacaaattgtgagagtgggttctctccttgtaccatgtgggccctggggatagaactcaggtccagggttggtggcgagagcctctctctgagtcttctggatggccccgctcttgtcttcctgagacagtgtctctgtgtggctcaggctggtctctgtgtggatgaggtgcccttggactcatgatctccttcttcagcttcctgaggcctgtggcaccacatctgggccagcttttgcctgtttggtagatatgcccaaagcccctcaggatccagacgcaggacataaaacctcggagaggttccatgtgctcctttccagacagtccccagctctgccttgttggtcatttgtcattatgaggggtttcccccccatgtttggttaattggtccttttcacatgttcatgtgaatgaaatacagcatgtataatgttgccttcattcattataattttttttttaaagttgtggcaggcagagagatggttctgctgttaagagcatttgcagaggacctgggtttggttcccagcaaccacatggtggcttacaagtgtctagaaccccaggtccaggggatcgcatgtcctcttctggccttttcaggcaccagatatgaacatggtacatatacgtgaatgtaggcagaagctctcagacccataacaatataaaataacccctgctgggccttctgctaatagctgtgccattgttctttccccatcaaataggaaacttccttactggtcttttaaaatataaggatgcactgtctgagcgtggtagtacctgcttgtaatcctagcacttgggagactgaggcaggatggaccagggccagcctaggcacagggagagaaatgcagtctgagtccaagtcctttgatatgtgtgtgtttgtgtgtgtgtgtgtttgtgtgtgtgtgtatgtatatatgtatacacacacacacatatataaatttatatgaaatttcaatatattcatacatgtaatattttctcccagactctagcttgttatattcattttgtggaataattcttaatttttataaggtctaattcattagctttttttcttttatgtttttgccttctatatcctaagaacgttgcctatcccctgacagacacatgcctccttttgttgtttttatttttttggtccagttagatgggtttatatagtttattctaatagctttatattataggttttctgtgcttatttattatagataaactttctgcgtttggcatgaggtaggataaatatccagaggttttacaagatggttatctaggagcgccagtacttgaaaactaaaagaaatggtttgtgattatgtcaccgtctcaggaggcagtgcgttggtctcatgccatattattactgtgtgtgctcacaatgtgcgtgtgggcaggtgcatgcgtgacacgtgggtagaggtcagaggacagcctttggcagtcagttctccctttctaccaaggcctttgtggccagtgtgtcttacccagggagctgtctcagtggctctagcactttcttgtcctgcttttcactagactgttttgacatcactatagacacttctaatggtttaaaggatagacgtctgcttggatttcttgattagccacgtatggaggtaggagtggttagttcctgatctcacaatccctttagtgtatatttgattccattctgcatgtttccgagtcctgacccagtaagcccctcgactcctcctttattgctaatgagctgcagtgacgagttcttccttctctttgcacatagcatggcaggcattccagtaaaggagcgcgtgaaactgtctcagaactggcggctggggcgctgccgagatcggattctgctgaagtggagatataggtaagcagcttcttgattgtttaaaaatgtttatttgtttttatttcatgtgtatctttgctgttgttttaagatggagtctcactatgtagctctggctatccccaatttactctgtagaccaggctgttcttcaactaacagatccacctacttctgcctcccaagttctgggattaaaagtgtgcaccactaagcctggcttgaaaatagtttgttcctgtatatgtctcttcacagtgtgtacttgaggaagttccagagggcatgagatcccctggaactggagttacagacaatcgtgagccaccatgtgggtcctgggacttgaacccagatcctttgaaagaatagcacgtgctgctaacctctaagccgtcatttagccttattttgtgattcttttaaggcttcccaagaccaaagagcatagtagaaaacatgaaattagatcattggggctgtctctggcgtggtaactattagcgagcctttagacacccatagagagtccagcaggatggtgtgctcacacagttcaacaaagattataaaaaagtgcactctggacagtattaggcaggaggatctcaatttcaaagtttgtctgggctaaagagctaacctgagtaacttaggggagtcctatatcaatttttttctttttctttctttttgtttgtttttgttttgttttgaaaccatttctctgtatatccctggagcattctatagaccaggctggccttagaaatcttcttcctccgcctcccaagtgccttgattgcaggcgtgtgccgctcttgctattatctctaggaagttagttctcttcttggattctgttaaactcttcatggggggggggggtcatgatgctggggctcaggcccaggacctcgtccatgtctggcaggggtgctttacactgagccacacctccattcctgtttctttaatttggtagaaggcaaagttgggggctggaagatgctcaggaggaaagcctgacaatgtgcgtttgttccctgagatccacatggaaagaagaaacatctgagctagtgcatgagtgccacatgtgtgctgtgacatgcatgtgcaaacgtttgtgcacatacaaagtaaagaaagaaaatggaatttttaaagaaaggcaagatgagatattaggcatatgtgaagtaggacgtagaaagactgccactttgtctctgtggtgtatgttatatgtgtgggtatgcaaaacagtgcctacagccaaaagaggactctgggtgacctactctatcatcctctgtcaaattcccttgataagggtctctgactggagctaggctggtagccgtcaggtcttgtgaccctcctgtctctagtcctcactgcacagtgctgtggttacaggtctgtggtcctcctgtctctagtcctcactgcacagtgctgtggttacaggtctgtggtcctcctgtctctagtcctcactgcacagtgctgtggttacaggtcttgtgtagaagcagttggttctctatacaggtgctaggaatttgaaatcgaccttgaggcttgtacagcaagtgccttccccactgggctgccgccatagcccagtgccgtgaagattttattaattttattgaagttgttaaaccacacttatgcttcatcagtaccaaagcatttcataattattatttggcacattacccaaaaagtgcttcttgttggttgattttagtgtattaggagctttgtaacttttcatcctggctgacctgtccctttgctgatagaaaaggcacacggctacctttggtgactgtcttaggtactgttctatcgatgtgaaaagatgccatgactaaggcaacactcacaaaagagtttcacttaactgggggcttgcctacagtttcagagggttagtcaatgatcatcatggcaggaagcaggtaggtactgggtcagcagctgagaactttacatactgatccacagacaacaggtcacacacacacacacacacacacacacacacacacacacacacacgtacacacgtacacacacacagagacacagacacaggacccaggctgagcttttgacttttttttttttttttttttttttttttgagacagggtttctctgtgtagtcctggccatcctggatctcactctgtagaccgggctggcctcgaactcagaaatccgcctgcctctgcctcccgagtgctgggattaaaggcatgtgccaccgccccggcttatgctgagcttttgaaacctcagagtccactcccagtgacacatttcctccaacaagaccacacctctttctaatccttctccaacagttcctttcactctggtgactaaacattctcattggggtcgttctcattcagactatcaaactgaccctttacctgtgtgcattgttttcagtggtttgcctgaggtcagtttctatgaattatgtggcagtattatgatagagaagttatgaaagagaaagatttttatggtgaaaggctttaccggctggtttccatctgtacctagtggaagttttcttaaagaacagctcctctctgtagctcacattgacctaaacttgccgtcctcacactttagcctccttagtgctaggactacaggctagtgccgccatacctcgacatttgtgccttttaacatcaaaggacatttccctatcaagcttttgctcctggggtatcttttagggcactaatttaaggcagactggcaaataaacagaacagttaccaggctgccccaggattaccactgttcacctggcatgaacctgacttcttgtcctaggtgaatgtctgcctaccacatggttgtaagtacagtccagctttctgtttgctgcccatgtgagtgatctacataactgtggaaaagatgttgaagaggaatgtgaatgatgagtaagaatgtaggcgtctatatacgctctccacatattctgtataatatatgcacacacttgtgaaaaccacatgagtagagacttagttactacaaagttcgagctgcatttaatggcccggcaagtcaatttgcggagctttccacattcccatgacgcttggggaagaagcacaggcccgtttgctcagaccagcttggcagcgggagatggtgtctgtacatggatggggaggagtcgctttccctttgtatttcttgagacttggtagctccaggactgttaggtagggtaggcacgggctggaggatgtctgtctcagggaaggggcttaggccgcaccagggagcctagctgagcgtccttctctttcctctccttctgttccctcatctccctgtccccatcttctccctgctttgtccacagcccctcctatgacggccttacccgctacatctatgtatctacaaatggcctggagcttctgttcctcctcggtcagcactcaggggtgcgtgccactctgcccagcaaaggctttagtcccatgtctggcctgtggcctttctctctcactgttgagagctgagctctttttagccccaagccacagcgtgctgctttggagttattctgttttacctccagtacagaaatgtccctctccttgggaggatctaggcatctcttgagcaggtttgcatactttcctaaatggctagatttttttttcacttgtaaacatgtctttgctccaataacaagggaatgggatttctcaaaacttgtctttcctcggtcacaccttactgatctgttgagcagtgtgtacatgttggagtctcagagtcttgaaacttaacttggacttagccagaacgcagaggtcacattacctggtcgggagtctctttcagcttcccctggtcctcagctgacatctttcagccctgcctgtctgtaagaagtgcaggcagtagctacacttcgttgatgtttgttttgttcctctctccagtcagatgccttggatgcagctacaggatgcttctctgtacctatcgcaggctaatttcatcctggcctaccagttccgcccggatggtgcaagcttgaaccgacggcccttcagagtcttctctgggcacgatgaggacgtctgtcactttgtgctggccaactcccacatcgtcagtgcaggagggtgagtgctggaggtctctcacctcttccttggtatgctccaggcattggctggggctgcttctggctttgtgcttttttttttttttttttttttacacttaaagcagagatttaccaaaagctgataacaggttagccagagaagaaaacaggaagagcctttaatgccaagtggagcaggtttgctattctctaagggaagtttattttctctctcagctctgttagcctcaagtgtgctgaagaagtaactgtgtaaaagctcagctccttgtgagccaagttacagaatgtttggtaaatccagacatcactggacccatgcatgggctgccggttcagtagacttgccctctttctataagttaactcccggggtgggctccttattctcttgtagagacgggaagatcggtgttcacaagatccacagcaccttcactgtcaagtactcggctcacgagcaggaggtgaactgtgtggactgtaaaggtggcatcattgtgagtggctcccgggacaggacagccaaggtgagtcccccccaccccctcctgccccacacatactgttattttctcctgtctttagggcctggggtaagagagggtggatagagcctgaagccccaggattacctgagagcactgagtgaggacagggagaagagacacaataaagacctcactatatgcctttgcataagcttgccatgccaggctatgctcctgccagccggactgcggtggggaggagtggccagcagctgggatgtgtgccactctctggaaatgtggtgtgaatgctaaaacacagggcctggctagcttctcttccctgagctggctttcctcaagtttgtgggttgagctctaaccccaatattttattttcaaatctccctcctcttgcttgctctctgtttggagaagttaatttttcaccaccttgtttataagcaatcagtctggtaattaaaacatgtttttactgactctctggagagtgatgtggccagcaggcagtggagaggacggggctgttggtagtggcatcagtaccaggtcacctgatccacagacttcctccaggacatgaaagatgaaactgataagcacttgtcatccttgcgttgtggatccagtcatccaggctgtgtcaagtgttgctgcttctgggacagagaagacaatgtccagtcttgggtgcagcaggcctagccaggagacaggctttgggtgcagggggaacattgcagaagagcctcagcagggcttgttgttagctcttttctaggacctagaggctccactgtagcaaaatgcctattcatatcagcaaatgggcctctaagctgcagagagagctcaggagagtgaagttgcagcttttatcaataactctgactctgtgtagcctctagtgactgctctttcatgtcgctgatttatatgaagacaacagctaaataggttccctgctgtttatgaacatttctcctcctttcggaattttctgccttatattttatacttagagaaaatgcatgccggcagaggacgcctgagcaggatgagaagtttgtgattttattttgagacagggtctcaggtagccaatgatgtcccgtgtcttcgttgtcaagtgccgagcttacagcactgagagcgagcgagcgagtgagcgaggcttcctgtcacccgctctttcctcttcccatcccatattcatgtggaattgttgtttcatcaatgactttgtagcgttccttgcaaagattctggctttaactggccaaactgctcaggagtaagctcaggcgagagaaagggctcagtcaagtgcttgctagctggtttggattgtcagtgctcacatctggggacagtggcatttgtctctagtcccagtgctggggtggcacagacaggtgtaatccctgaagggtttgttttttaagtaacttttgttccttgatgattccatgcaagtttctaatacatcctgttcccctggccctatgttgttccttcccactctctctgcccccatcttcctcacagatctcttcagtatatttgctagctcttgttcttattagtgtcccaacgtttaacagggctgtctttataagcaggtgtgtaacagggcactatgcaatctgttagttgccaataaatgtagcactaaggtgcccataaccttcttccttcatcactgactgttaggagggcccaacgtcacagtagcaacagttactatgagtccatgactgccctgtccaagttgtgcttagcaggtagcatttgaagccctgccccccaccttctggctcttaacattcttcctttgccattttccagagtattccctgagtctgaagagggtgatgtaaacgccttggttaggttggttagctcccaacagtcctataatgagcaattgtgaagccatgggtctttgtagtctctgtttacagctaggagcagcagcctttgtggggataagcttgtgttttgaaggtggtttggtggtacttgattcagataaacaatagccttaggttcttctctaaaacatcagacccacctctctttctcttttgaaacagcgtctggctgtgtagcatggactaaccttgaacttgtaattttctgcctcttgagattatagatacgtataccacatgcctgctaggatgatcttctagcaatgtagactataaccaggagctatgctaagcactttattcattttcttattttatcttattgggtaaataccttcctttgcataattgtaatatattttggatatacagtatactctgtggtatcttctctataacctttttttctttttcttacaaccttttttgttatttctatttgaatagttgtccttgaagttactatgtagtttaagagtcaccttaaacttctgctcttacctcacctgttgaatgctgggattacctgtgtgctaccacacccaatctatgtgatgctagagatcaaacccagtgttgtgtgcatgctaggcaaatactctaccaaatgagctgtatctccagccctcgtgtcatcttcagtggcttcaaaaggaacttagttttctctagtagatggatgtttgcatctggtttattccggaatacaagaacctgggaataagaatcctttcttaagtctgctccattctgtgcattggctgtgctacttcttggttagttaccctcccttttttataccatggtcctgagacataggcatggcccccattcaatgcgctgaaactgagaccaagaagttaggcaacatctctaagcaaattcagtaagtctcaggtagggttcaaacccagacgagccagactccaagacaacacgcttgttctgcaataacaggtttccacaaatatcttatcccttgggttttgttttaggatcttttttaaatgaattctcatacttagagttcctgagtcaaagatcatgacaggaacgccttgccacctctctctggtttgccttctaaaagggctgtataaatgtgtatgttcgctgagtgttttctgggatgggtccgtttcactgatagtaaagatctgaccacatgtttattatgtcaactcctgtcgctcaggtgccaggacactcttgttgccacaggatgctgtgctacagagacaggctgccactcctaactgatgcttggaattggcagtgtacttcctgattcactcctgaagatcaggaacattaatctgtagtttgagggctctcagttactaccagccgtctccacagaagctactagaacacaggtttaggctgtcctggagattatgtaaatcaggagggccctcttcaccacacaagcacgatcctgactctgagggagttcagaaaaggcaaaggtctcttccaagctgggcagtctaaaggaagaaaccagaagggcatctggttattaccaaagggtttggctgctaagggcaaggcagatgctagaatcctgggcttacaggaaatactgagatatgtgccctcgttggtggttttttgttgttgttgttgttggttttttttttttttttttttggttcccttctcatccagaatattctcgttaaatttcttagttttggggaaagttccccctactcttaccccacccccactgcatcatacccacaaactctgagaaacactctctccttttatagggaagagataccatgtgatcctaagaaggcaagaccacccccattccatcactgccccttacactgaaggaatgtttccttaagttcttccatctaaggtcctgcctgagtgtggtgtgttccccttatagctctgcagggaccttgagaggtcactgatccctctagctgccgagggatccctctgtggctgctctggggagagccctgtacattggaggtttcccttctgtttggttagaggcttatgtccctgtgtgtgtgtcatctggggtagggtgaggtgcgggggagccttgtgttaatgggagatttctaaatgcactgagtgctgagaggctccggagtgttgattagagttaagcccagagtgcctgctaatgtgcattcctgactgatagggcccagatagtgggctccaagcaatatttttaacctgtggagatatggaagcttaaaagagttaagcttttctgctactttaggtgacactaggtgctaaaattccctgctgacgcgaatacctttgggtcctgggcattatgaacaaacaaacagcaacaccccctctcactttgaagtcttgttcccattctctccttgttttgcagttttcttcttactcctctaatagtatacatgtctccccccccccccccccactgcgccttggtcttcccgccgctctctatgtgcctaaagtaaagttttggtgaaagataggagaagggaagagtcacaaacaaggaagtttctgagagaggcaggaggcttccatctgcatttcctcagttgaatctcacgcagggctctgtaacctctcatagcctgggaggaagagggactcgcagggtaaaggttggtggttggggcaggaagtaaggcccgtctctgtggcagctgaacgagaagctgaagaggcccctctgctcagaccctggctctctctgtcttcaggacagaaaggattctctgttccccagttcctcagtctcactcttcccacatggtgttggcttcttcctcctcagcccaggcaatgccaacaagcgcatttcctctcctgtttccaggtatggcctctggcctcgggccggctggggcagtgcttacacaccatccagaccgaagaccgagtctggtccattgctatcagcccattactcaggtaagggagacgtgtttggtttttatctcattcaagaatggtttcattttattaggtcagataagctagaagttttttcactagtgtattctaggttgctatgaaccactctcctggggatttaaacattctccagagactttaagtctttgggtctttcactatactttggaattgcgataacctttcctaagcatctgaccagaaatgttaagagaaagctacatactggctatagctaagggcagtgttacctttctggagcagatgtcctctggggttgctccaacgcagaggcttctcagtatacctgagaggcaagggcagcagctagcctgctgttgtgactcacttctgctttgttccctgaaaatgtcttctggtgtatcccttacaggctctggttatcaggagaggaggagaggtttggggtctgccaactgggccgcatccatatatggagaggagcagaaacagtggcaactttgtggaagggcagctcagttttattatttgatgtctgtggtagttcgccgtgcatgctcctgttcatgcgcctggttctctggagaccagagagggtgctgaatctggaactgtagctacagatggttttgagccactgtgtgggtgtcaagaatcaaacacaggttctctggaagagcatctctccccatctctccagtccacaactctttaaaacaaacaaacaaacaaacaaacaaacaaacccctaaaaccagaatcaaaataagtcttgctgtgtagctagggcttgtccagaactgattatacagcccagactggccatgagctagagcttcctgcctcagcttcccaatggccaggattacgccaaaatgcagttatttcttctgctttaactagccaggtgtgttggctcatgcctgtaatccctgtacctgggaggctgaggcaggaaacattacccatgtatttaaggccagtttgggctataagcatcagccagcctaggacacagagtaagaccctgactcaaaaacaaagcaaagtatgcaaaataaaaataaaaagtaaaactggccaggtagtaagtggtgcacacctttgatccctgcactcaggaggcagcagcaggcagatctctgtgagtttgaggccatcctcgtctgcagttccaggacagccagagctacacagagaagtcctgtattgaaaaattgctgctttttggctattaattgtcattaaaaaacattttattggcatatagtcactgtacctactgttgagtttcatgtagacagtgtcgttcagtgcatcgtgtgctttgtatccaggcttttaaaagattttctattgctttgtgtgtatgggtgttttgtatgtatgtacacacacacacacacacacacacatctgtgcatcacatatatacactgtccctagaggccaccagggggtgttgggactggagctcagatggctatagccaccatgtggctgctggggatcaaacctaggtcctttagaagttcagtcagtgctcttagctgatgaggcatcgctccagcccctgtctgggctatcctgaaccaaggaggcctctctccttccaggggcatttagagacttttctatacttgaactatcttagaagttagtagagtctgtcttcctgctctttcctgatgcctctctcatcccacctgagtggaattgggaaagttagagggccaccacctccaccacctcagtcacttgtttttataaacaggttggtgccccttttgctcagcccccttcagcctctttctcctcacttcatggagcctgtagctctcctcttgctctcttccacaactccctttcaatttctttcttcctaagaattagagccgattagccacgtcattaattcttcaatttgacggctgatatagcaggacctgaaacacattgctgaccttagagaatggagaccccattccttagcatattgacgacgggagaagttaattaaaattccacagagcagaggtgtcggctaacctataaacctgtcacttttcagaacaaatcattccagcatcttaggaaagaggaaagggacaaccagtgaccagagggaagctaagtgtatggggagttctgggtggaaaaatggagccagccagctttgtctccttggcagtttctcccaaatgccacctttctgaaagcctgtcagccaggcttgtgtgtgggactagagagaagtgagtgacaaatgtgctggcatcaggggacaagagcagcttgctggtgaaggggctctgggctagagattgtccgtgcactcagtacatggaggtgtgggcaggctgtcccctgcaccccagccttagagacttctactctagccacatcctctggagaacgctaggttacttctcaagagaaaagaccacatagcacctattacagatggtgtcaataagagaagttgagaaaggaatttgatttgagatgacagtaagccaagttgagggtcttggccataacttggaccatgagtaagagtgtgactttctaatacttgcgttactgtgatgtacgtaccacactctgtgcagcgctctctctgtgcggcctttcttggctcttttctgctctcctcacatctccttcagtttccttgctatattttccttgccctggatgactcttttgccccgtgttggctgactgtttagtgttaactgtcgagttatttgatatggctttttccttaatttcacaaacgatggcttaaactctgtttttgtttattttgtttctgagacagcttctcactctgtagctggcctggagctcacagagatctgtctacatgtgcctccccaggtctgagattcaagatgcgtgccaccatgcctgcagactctagcttaaaaaacttgcattcgttctttcatttatttgtgtgtgtgtgtgtgtgtgtgtgtgtgtgtgtgcgcgcgcgcgcgcgtgcgtgcatgctcacatgcctttgtgccttggttgcacatgtagaaggcagaggacaaccttcaggaattatttctgccctttcaccatgtaggtcccagggatagaactcaagttgaattctcttctaaaaaagcttgtgctggacattctgacttcacactagccatctagggcatgtgctagggttttattgtccccccctttttgtatttagaaatatatgggctaggatctctatactgtattattaggtccatgtctctccactttgtccatgactttgagtctttaaataagtaaataaataaataaaaacacaccaaaaaaaatttctctaagcctggtagtggcagcacacacctttaatccctgctttgggaggcagaggcaggcagatatctgtgagttcgaggccagcctggtgtacagagcgagttccaggactgccaaggctacacagagaaaccctgtctcgaaacaaaacttaaaaaaaaaaaaagcaagctctccaggtgggcatggtagagcctgccttttcctagtactctggaggaagaggcaggtggatttctgtgagtgccaggtcagccagtgctgcagagcaacgcctgtcttttctttgaagctccagctctcagcttcgaggcactccctcagcgtcttatctagtgcagcatgtgcttagtgcttccaagcttgggcttccccgggccttctgcctcccaggaggtgcatggttcttttgtagtttgcttgaggtggcatctccatgggaatctctcttccctgtcctcttcctttgaagtgatcctcactggctgccttctgtcacctccctgccactgttcctgctgaatgtgtttgtcggtcactgagttggcaacgtgaggggttgtgagcagccactgtcctctgaggacaggcgcttcgcttccctcgatgcttcgcttccttctcagtgagcgtctttctcctgttaaacagtcggtcctgtgcactttgttgatgatgttctttgtttctaagtttccccttcttttcatgtgtttgtacccaggaacttttagcataaaatatgggccccaaaactccaggcttaatatgaggtgcttctgaccaatagaaagcagagattctgacctggctctacgtatcaccttttgtttctgtgactttgaatttttaatttgcaaacaattgtagaggtgatatttaatagcagttatgtgctcaaggatatatttgttttattttttatttttgagacaggctttttctgtgtaatctgtcctggaactcactgtgtagaccagcccagccttgaactcagagttctgtctgcttctgcctctcaagtgctgaggtaaaaggtgagcaccgccctcctggcccccacatatctcaaagctatgtttactcaaacaaacaaacaaacaaacaaacaaaacaaaacaaaaactaaaaggaacagcaggcttcagaggcaggtggcaggcaggcaagggcttttccctttgcttcctgcgagcccacccacccttcttaccctgttgtcaagactcagctcttatgaaatgaggccctgctccatataagagtttcctacctgactctattgggtgaacaagaggacataaagaaggcacacaatgttcttgaaacaaaatggtctatgtcttccacagttgtgtggcagacacataattttaaaaaaatttaatatatatagccacaatatacatatacatatacatacacacacacacacacacacacacacacacacacacacacacacacacacacacatacacacatatattcactgacttcagatacaccagaagagggcatcagatcctattacaggtggttgtaagccaccatgtggttgctgggaattgaggaattgaacttaggacctctggaagagcagttagtgctgttaacctctgagccacctctctccagcccctagaaacacattatacatggtctcagatatagcttctaagatcactgtgaattcttaataccttcctatgagttaatacagattaatatatttattactatttaaataatacttcttacctgagtgaagttagtaaatacaaagctcttttccccctttattttaaattttatatttggtgtttttgaggcagggtctcagtatttatttctggctagcctggaactcactatgtagaccaggctgacctcaaactcacagaggtacacctatttctgtctcccaatactgggattaaaggcctgtaccaccatccctacccctatacaatactatttacaagactttattccccattaaaagtagactggagagatagcttagcaggtaagagccctggctgctcttccagaggacccaggctcaatcccagcatgcacttgctccagttccaggccccttgaaaggctctttgagaacctgaaaacactcgttggagtccagaattgacacaggtcatggtgaggaaggccacctatgagaaagacctgggctcacttaggtacatgcttctgctattccaggagcacgcagacacttagggctttggttgtctggatgcctccatctacacttggggcctgtgatgaaatgaatcttatgtctgcctgaaaggagaagggagagcatcttgtagctctttttttctctgcagacgccatgcctacttccccgaagtgaaaaaaggcactgggtagagagagcccttgcctctgtggacaccaccactgccgtgtgagcgcctgtggtcagaaaggtttccccacactcttgggttttaatcccttctctcctgcttctgtcatcagggaaatatatgagtggtataggtgtagagacttgacttagccgtgttattaaatatacaatatcattttgtgcactgtggcggcctgtttgttttgtgggggattagtccaagtctgcatgaaatgtaccaattcaagtttgtaaagtgagttgtggcctctgggggggtttgatggagaagctgttccttcttgcttcatttctcccagaggtgagggtgaggctggaaggaaagccagctctggacactgcttggctgtggatgctggtactgggagagcagggtgtttgttccaacagctacagggtttgctgtgtgctgtgtgtggtagatgccaccaccaacctgctgaagtacatctttctttaccaatggttaattacatgtggagtgtactctgacaggtttgggagttgaaaaaagaggcagtttcagcatgggtttcattggttctttatgatgttgctgttttctggccctgggcatcataactcactgctttgcagggaagaagagtcaaatataaggagtccatctgtggatttcagttttctggttggtgatgaagtgcagtatatgaaggggctctccagcctcgataacctgaagaaagaggaacaaatgaccatggtgcttcgtcttttaaccagtcctccggacggctcaggtggaccacagtagcttaaggatctttctgtctctttcttctatcctagagtaggggcagaggaaagaaggcttagtgctaaacgaggcaagaatgtctccttgtcctgaagtgagccagccagacactggagggagtgtcctgcatatgacatctcgacgatgagagtaggagtttatgcaaagtcagcagagggcaaggggctgctgtggctgggagaggagttgcaatacttggagtagaatagatgctttgagcaatgctaggtgggcccactgattccgcttagaatgtgctcaagttgtcaggcattggtgatctgtgtgctgggggcattgcattgggtcaggtcctgcagaaccgtcgtgctgtgctctttatctgggggaggggtgggtcactgtctatgccaattcaagcctctcaacgggccatagccatcagtagcaagaaccaaacacttgggatggtttcagttcctaaaactgaatttcagccatttctcagggtaggatggcacatagagactcatgtgttgatgtgatgcctggctggcttagaacccatttttagtgtggttggttcctttgtcaagaaccgacttaaataccacagtaggaaatgggctactgcaaggttagatggcatgcctagagttgatgtgctgaggctgtgtccctttagcagggctctgtgtccagttcccagtgtcagtattggtattttttcttttagatttatttttaatcaggtattttgtgtgtgtgtgtgtgtgtgtgtgtgtgtgtgtgtgtgtgtgtgtgtgtgtatgtgtgcgtgtaatgagccacctggcatggatgctgggaatcgaacttagatcctctaaagcagtccgtactctttttacccactgagccgtttctctagtcccctggtcttttctgtctctgacatctccctttccactccagcctcccttccttctcttactcatctgctctttcattccgtttccaggtactaggtaagaattgctgttaccactgggtgtgtggtttacagaggcaagtggatctcttgagagtttatggtcagcctaatttacaaagttagctccaggatagccagagctatacagggagacccaatctcagaaaaactaaataacaaagagttatgatcttgttgtccctagagaacacaccacgaactggatggaacagactgacaggggggtcagatgggtaggcagtgaaatgtggtaaattctcagaggacacaaacagacgggaggaaagagctctagtgtcactggagtcacagcagagaagtaacaggagtccaaggtggtttacaatatgtttcaaaataaactggaaatgtcggtagtacattttattgtttaaggcagggtttcacagtgtaggcctggctgtcctgaactcctgtgtagaccaggctgcctcagactcagaaatccccctgcctctgccactaggctttggcacgtggagatgatcagacttgatggctatacatgcatgaacacacccgattactacactgcccctgtagatctgtgcagcgctgatgtgccagtgaaaaataaaatgaagagcggatggagggatcagtggcctcggtcctactgtctgtaccgcctgctacctgaagtccacctctaccaccttttctgtgtcctgtgtgcagagtgctcacctgtattgtcctttgatcacgttctactgacaggggggtcacttagcacatatcccaaggtggaagcatgccttaatgtcaaaattagggtgggtttcccccattttcccttctttctacctttttctttctttttccccccttctctttaaacttcagtgggtgatgaggcagagagggaggtgggaggggaaaggggagccataaattcagagacctgtgtagctgttctctgagcagccaggaagcctctgatgtctccagagcactttcattaacatttaaattaagggtttgttttccaggctgttttataggctgggacctttcatggcctgtcacatgcggcacccacccccttccccaagcaagtgtgtaattgtagccactgctctgtcctaactctgggttttggccggaggttcaaagggagttgttgaggatgaagctgtggcggccggtacaagccgtgacagtcaggcctcagatgaaggtgctcacaggactccagcacctctcccctgacctgtacttttctttgcccttgaaggaacatatttcaatccgagtctaacctcttccacacttggttcccttgggccatgggcaggtgggcaggaagcctctgtgcctttggacctgggagcagtgttagtgagatgtgactctccctgccatcttttcctcctttcatctttttagcatcttgatgcgtttacacacaggttaccatctgcaaagaatttacaatgtgatccttaaaagcacctgcttgcacagctagatagctgtgggtcctccactctcagccaccagcttatgcatctgtgctggaaaagctgactgaggtcattgagggaactgttcttacagttaggaactcagggcaagtgcttctcacctgtaagggacggcatttgtattgaatcttcctttcaccaaactattgggcagtgcaaagggtgctttggaaagacatccctgtgtgccttccctcaccctcagtctgctcttcctctgtaagtagcaagaatgagcactctatgcccagggcacacatcctcccccactgctggtctcagctggatttcttctttggacaggaatgagaaagacactggactttctctgatgagaagctgcggactttctttttcttggagcactgacttcactgtgtgagtcaatacatatttctccctatctcattaagcaactcaaatcgtccatgacttacctgtcaagtgggagataactaaatgtcacctatacctgtcccaggtagccttgccagcaggtggacaccttcatgccctggggttctgcccgaagggagtgagggaggtgctgggcagacccctctgcaggtggtgcccggctcggattgcaggctggtgctcagctcttgcctagtggtgattaatctggggctcagccagcagaggctcaggcagggcagctttggtccctcactgtgaagacctttggcttggagacacaactgatctctgtagcttgcttcggcttggggtttgatctgtcaaggctaaagagtaacctgatggtggagcggaagtttctagccctgcctgacttacggcactgacccatcccagtggccctgtcatgataatgctcatatatttaagacgatttctccacctgttagctgtaacactcagatcagtcaaaatagggatcttcatgaaaggtgctgttagtttcttgagccaatagagcttacttccataagtggactgaggactgggagtgggtaaaaaaaggtaccagtggggctatggctggctcaggagcagactatgttcgggaagggtcatattgaggtgtccttctgcagtgaggtggccctcgggccgtttcaggcagatttcactttagatgtcttggcttctttgtgctccatttcatttcacatttctttttctaagggggcctctacttgcccttgtcatcactgctacctttgctgagtgccagtccctgtgccctcccgctggctatccatggagccagtcgtctgccatggagcccttctctaaggtcagaataggctccatttggtcataagcttagggcccaagagtaggaattctgctgatataatagtttcctgtgtttgtgaatctatatgttgtcctctgacctccacgttcgtgctgtggcatacgtgtgccaaccatggcacacacagaaacacacacacacacacgcatacacacacacaagattaaaatgtttaaaatagtcacagggctgaagatatagctcagttggtttggacctgtgtttgatcttcagaacacgtgtttgaagagggggcggggagggagagagggaggctaaggaaaggaagaagcagaactgggtctaagtagctcattctcggaacaccagcagggaggagggggagcaggcgggccacttgggctggctaactggcagctagtctggcctagttggtgagcttcaggctattgtcccaaacaagatggtggctgaagaatgaacactcaagagttcataataaaccacagtaatggtttctttaaggagtcagggtctttctatttggtcctgactgtcctggaactagctatgtaggcctggctgcctcagactcacagagtctccagcctctgctgcccaggtgttgggttaaaggtgtgaaccaccacgcccagttaggtatactcactttaaatgtacagctccctggactctgtacacagttttagaattgtgtatcatatttcagtttcagaaaattgttattcccctctccaagagcctttctttgttcctgggacgtgtgtgtgtgtgtgtgtgtgtgtgtgtgtgtgtgtgagagagagagagagagagagagagagagagagagcgcgagcacgctgtgtaggtgtgagcgctcacgcatgcgtgcgtgaaggtcggagccagtgctgggagtcttcctttattgcttttgcctttcacctggttgggaatcagagcagttttgacaagcaggcccccggatctacctgtctcaatcctcctggtattgtggttacacatgtgtcacagtgcctggaatttacacaacacaggtcctcgtgtttgtttagaaaatactttattcagtgagttcttttctcagttcttttctccacttggacccttttatgaagaagaaaaaaaaatagaaataaagaactataaactcagaaccatttttctctgtcatgtgatcctctggtagcccatcttctagaagagtggaacgttgctttgctgggttgtctcatgtcacgtacgaagcctaagagaagagccagtttttacctctcaagacgttatagcagtattaaggggcgtgtgtacccagagctctgtggcctgctgtatgtatatcactgtgaatgttaccagaagctggagtagtctgcaagcaactgaggagaacagtcggttggcttgttgaagacgtgcttcacggatgctgtggagtttgacgtgggactaatctggcagaagggcgttcaggcaagggttcgagtgtgggcaaaggcatagaaaaggacggggaagaccaaaagtaggtctggggttcaaggttgactccctggaggggaatttgagggccaagttgggaatggattgaagagatgatttaacttcagcctgagggaaaacaaggagcttgagacagttctgagtggattgaagtggtggggtggagaggtggggtggagagtggtggggtggagaggtggggtggagagtggtggggtggagaggtggggtggagaggtggggtggagagaggtggggtggagagtggtggggtggagaggtggggtggagaggtggggtggagagaggtggggtggagagtggtggggtggagaggtggggtggagagtggtggggtggagagtggtggggtggagaggtggggtggagagtggtggggtggagagtggtggggtggagaggtggggtggagagtggtggggtggagagtggtggggtggagaggtggggtggagagtggtggggtggagagtggtggggtggagaggtggggtggagagtggtggggtggagaggtggggtggagagaggtggggtggagagtggtggggtggagaggtggggtggagagtggtggggtggagaggtggggtggagagtggtggggtggagagtggtggggtggagagtggtggggtggagaggtggggtggagagtggtggggtggagagtggtggggtggagagtggtggggtggagagtggtggggtggagagtggtggggtggagagtggtggggtggagagtgatggggtggagagaggtggggtggagaggtatctgcacacagcagtgaggcttgctgctaggatgcagtccagagtcggtcccgtctgcagagagtggaagggagaggctggtgaagacctgagaacctgagcgtgatggggctctgacctgagcagacccagttcccgtgtccaagggcagccgggtggcaatggccagagatggctgggaatggtggccagaagctcagatgtagggttgaaatgtggaaggcctcagcctaagaagaagcagtagacataaggcaatggagctacaccagaggagaccagagataaacagcagacaaggaacatggaaaaggaaacaggaaagctaagagctgggaaagggagagcgccccaacacacacacacacacacagtgcagggcggggctttctgtgcaacttacgtaagccagctgccagcctggcttgttgggtggacaccataatggtgaaatgcagggcctccatagtgatgtgtggggtgggacgtgtgtgtgtgtgtgtgtgtgtgtgtgtgtgtgtgtgttaccatgttttgtctttcataagtcgttgagttcagcattcgcttcctaactgcagaaagtttgctttcaagttcccactggttctggttctggttcaggttccggtctctgccgtctgccctgtggttgtaaataaaaatagatgcagagtagcagcagatacatcgcaaggcagcatcagtcagaggtccagaagaaggtgattgtgaagcccgggtgaggcaggcggctggagctcctggttgggaccgcactgggtggagatgcaactcttgggtgaggctttcaagtaaaagaacaaatagcagagcagaaacaaacatcagatgctcggacatctgcagagaggcagccagctgaagtgttctgttgagacttcgcttcctagggttgagcttctggcttctattcccactgcaggcattctcatgtcatgagatgaacagcagtaaccactctggaactgtcgctcaaagatacacgatttttactttgttgttgttgttgttttgctgtttcctctctgacacagcgttggttgggtcaaagcatccccagacaaggggtcttgagataagcatgctttggtctgaaatgcagggcagagggcaacttcacttttagagtcagagtcggtttctcagtagctcagacagtgctgtttattaatgcagtgtacattctggttgatgagatttccccgtcagtctaaagagtcagatctgagctggtgcttgtcagtggcatgagggatgggtgaggctcagactccacgttattctggcatccaatgcgagaaagagaggctggtttaggacccaaggaagagccagggaccatattggcattcggaaagatttggcatgggagccacagggctgcctaggtcctgggcttactggccaactgtgtctcttaggaaaccttttctttaaagagaattgaataagaactttctagtcctctttggatccccttgggtagtaattccacagggcttgtcacttgtgtttgaagctggtgctgaggagggcggaatgaagagaagtgagggggtggagatgggaggcaagagggaatcagagagaaattttattgagggagtttgctgggtttatgggagggaatctctcccctcctccccattcggatttgaaagggccggtgcatctttgattaggtgcaggtcaaaagaatttacacattgtgaccttaataactagaggtgattggcaggcgggctatggggagggggtggcgggcccctttcatctcacttagcacagagaagagacaatggaccagccgattttccttgttgtcccttgtttgaaaaggtctggtgtctctactaggtacctgtgacatgggggtcttgattggggtctcataaaggcccctgtcagtgtgtccaaaggccaagagtacaaaagcaagccgtgggtgggggtctcagctgaccactgaagaagggaggggagggcccgggaggcagtggagggagaagcaaccccgatgggagcccttagagagggaggggaggggggcaaagaagggccatttttgtccctaactcatcaagcacatctgcagaattgtccaagctactgcctcccagtttcaaaggaaaaaaaatgatcgtttgataaaccgtcctgattcaccactttctcacaagggtgggagacccagtcctgacctctgtatgatttcacgtcagaacagggctttcttgccccgcctccaaattgctagagaaactttgaaatatatcctgtggctttctctctctcttttccccccaacccccaatttcccaccctctccaccccactggcttctgttctctccctgggcactccagagtctaggcaagtaattagtcccttctttctggggcacaatgaagccagggtgtttgtcaggccccttcccaccgctcacagtgctaggggcctgcgggaagtaccaggtggcatgtgcactgtgttccaggcctgtgcaatcgctgagggatagagtgaggggttcagggagcggtgtgcacagcacatccattaatggtctgcacacagtgcctgcatttttcccaggtagaagctgttcactgcactcagagcccaggtgggagcccttggcactgcagctatttcccaccctgcgcttagtcacttggagctaacatgggagaccaacaggcctcgtctcttgagagcctgatctttgtatccaatgtgtgcaccccctctgccctgtcagttttgtgtgttcacggagtgttgattttaatgcggcctgtgtaggtctgggaggccaggctggggggcctcgggtctttgtcttgcagggcctcttcttggagggtcttctgccctagaggacagagacagatttgaaggtggtgtggtatgccaacactggctggcaaaagattcccccatctctgcgtctgtcacagaccactgcagggtgcctagaaaacaagggccccttggggtgctccaaagcacgcttgccttgccgccttgccgggcacctcccagccactccttgagatgggtggggacaggcaattctaccctgtaggctgccagcttcaagtgagttgaaccctcctggtgactgtgagatcccaggaggcagggcagggtcagagaggcagagggcaggcaggatggtaaggggagagatccagtcagctgcaggactggtgcagtggttaggcagggccagtaggtgtaggcaggaaagaggcagagtggtgggagtgctcctggaatgctcatctcctccaggcatagagctccgatgtagagggaagcattggggggtgtcaggagctgagagggcagactctgtaccttgctgggagagaagttacaaatgtaggaggtacgggtccagcacttcaggaaggcctgaggcccagttagagctgagctgctctgcctctaggcggtaaagcttctgagaatctgggcctcagggaggggggggggagcaggtggggggacctaccatcctggctagcggggttgtagccctaggcctgaggccttgttctgaagcacgtggttttcagaactgagctatgtcttcactgctcatagggatcagaaggcagagatgaggtggccctgggaaggcttcctgccagagtccaaacacagtggctcctctgtgcttctgttggcatccttcagactgtcttgggcactgatgccagtcactctgccaggcctgttgagggaatagagctaaacctccaggctttggggggaccaagtcccaaaggggcccaccaagaagaggtttggatcactgtttggggggatatttctttcactgagaaataggcacccccaagagtactcagtccctctgttctctttccttagtctttccaaggcctgtttctcccttcctttcctttcttttcttttcttttcttttcttttcttttcttttcttttcctttcctttcctttcctttcttttcttttcttttcttttttttttaaatctcccttcctttcttctgccttgccaaaagcctgggagcaagagagccgctgtatagatggcgtgccgaggagtgacactgtcaggaatcctcagcatggctcctggctgagcgccaaggctcaactgttactccccatggggtgtgttgcttgccagggtctgcctgagagggtaccaacacatccagcctgtaagtgcaaaggtggtagaggacggagccgtgagcagagaggcaaactggacagatccacggagatatccacctggagaaaacaactgtccgttgcttcacaacaagtagagtgctcagtggacctctctggggatcccctgagctgatttttttccttttaaaagtataattatagtcagggtgaaggactgaggcaggaattgcccttgggtttaaagcagagtttggatcaaggtagaggttaagggggttgggtctcctagaaggtgcttgcttagtggttcaactctaggacaatagaaagagaggagctgggctgtggtatggtgcttaggaggcagaggcaggtggatgtctgtgagttagaggccagcctggtctatagaataaattccagaacagccagggctacacagaaaaacaataacaacaaaacaaaacaaaacaaaaaaaaaagaaagacggaaaaaaaaaaagaagaaagaaaggagggagggagggagctctgtgggtaggttcttcactcctgcaaccaaagctaaagaatttggtgccagaggaacaacaataatcacaacagttgttttcctgggagattttatatttgaattgtaaggggaggagtgttaggattgaagcatggctttgcacgtgtctagcgagcggtccgctactgagctgtacccgtgtttatgcgtggccatgatgacttctatattgaggaccaaatggtgctataaagatgcagcatggcagtctgacaaagcgctctttgcacagcatgcacaagatcttctgcttgtgacttagggaaggagtgggccgaggggttcctgcaggcgtacgtagaatccttcatccaggcaggagcaacctgagctgtctgtggaagatgatctaactcagattatcagcgatgacgctgcagccgtcatagactcctgtctgaagtgcattgagttctcagaaacctgtcctaggtcaaaggagtgactaatgaagttctgcaaattattctgcctctctggtgtttggtgctctcaggaagcgcgagagaagggattgctgacagagagcgtgcacgcagaagcagtggcacacagtctcaagcctttctcttgttgcttgtgacctcggaggcccagagactcttccccacccaaatggcttttatttgtattacaagtatacgtaatttccctgagctgtcagcggttggaatacatgagagtccttactagtgggtaaagggcctcatccctgagggagtttcccattggttccctgtgtatgtgggctttcagagctccctgaggggactggagagctggcttagtgtttgagagcccttgatgcgcttgtagagcacctggtttcagttcccagtacccacatggtggctcacaactacctctaactccagttccagggaatccaatgtcctcttctgaactcagggcacaaatggtacacgcacatacatgcagtcaaaacacataaacattttttaaaagctcatttcatctttcactctcctcatcctcccatgatgaaggaaagggtatactctgtgttggctctacatccccagagccatggagaagagaaggtggtcagaggacacatctggtacctcaggaaccgagctgggcactaggtagtcagcaccgccattgtacttgctggcgcatccttctcccatctctgcctggtaggtagcctgtggattcatgaaggaactaaactccttaatttttctacacagggctctcaggctattaggtaggtgatgagaagttagctttcccttgaaactttggacttgagtttgctcaagccggcagccagtggtattcttgggctatatagaaatggaagcctgaaatgaggtgggccaaccagctaggaattcaggtgtccgtccgtcccccagtaaacagtctgctagcttgtgccatttcattcttgtgtaaagttgttaccccaccccaccgtggctcaggggaagagaaagcctctgatcagatggtcttttccacagcctccttttgttgtttgcaaagaaacaaaacaaacaaaacccccatagctttgtgactgtttcagaaatgggtgaaaagctctgctcgggctggagcaatgtcttaggtttaagggttggtgtggtgagcaggttgagccagactagagctgggtgggatggcacacagcagtgtggttcccctgaggagagtccttccctcgttctgtctaaggaggctgtcacttaggaaggcacaggcatgaggaccctggtgcacgctggagaggagagagcaaaggcagaaataatgggcaaacagggaagctaagggctcccttggaatctctattgtaggagcccttgcccaggctgggggtggggctcaggggatacaggactccaccacacagtgagctctagccagtggagttgagcattcaatgtagaaagccatgcatagcagtgctgtgtgagtatgtggagacttgagttcatctcaggattttgtggtgggatcccaccacttagaagctgaggcaggcagatttctgtgagtttgaagccagcctggtctgtatagtgagaggcagggctttgtagagagacccccgtctcaaaaacttaaaataaaaacaaagccgaaggtaagtaaccgctcctgcactccagagagctccagcctgaggactgcggtcatcaaccgccaacactgatgctcaggccctggctcctgtcggcgtgcccattacatctctgtacagatttgtagtccctgcccgttacatctctgtagagatttgtagtccctgcccgttacatctctgtacagatttgtagtccctttggatccagactgagccccaagaagcacttcgcccctgcctgccagaagatagagaacttccctcttggcttcttgggactctgctcgggctccactgcctgcctctgccgctagtgctggtgttaaaaggattatatttgggtggaatacatacctggctacagttttcttttattatttttcaaaccaacaaaaatactcacagaccaatttttaaaaatttgtttatttttgggttttttgtttgttttctgagacaaggtttctctgtgtagccttagctggcctggaacttgctctgtagaccttgctcaaactcacagagagaagcctgcttctgcctctgagtgctgtgattaaaaggatttgccaccactgcccactcctaaccaaatcttaaaaccctgaaacctttcattctcctctcttttcctgttgtctttctttgctgggtagtacagtgctttccctggcctccttgggctgtgtgctgaacaaagtgggaaacccaggagcggaggaggctggggccagatgggctgctcctggcccctcccaggcctgctgcagccaccgcgaggtctgggccatagcccaagcaagcaaaggcaggttgaccagcaacaagccccagctttgttccacgtgtgttctgaagcactgggtctcatctgaaagccacctgttcctcctgcctggctggcaccttctggcaccagggcctggtcttgtagccagcagactagtggtagggaacgtagggtgggctacagcaaaggaggctgtggtcagcttgaggggactcaaatttcaacttgtcccttaaagccctgtttgactcaggttctcctaagactttggccaggctcaattggtcctatctgtcactgcagtgacagtgactttctaagtggcctgtagaaagggacaagctctcacttttaactccagctcttggtgcttcaagaggtaaacaaatatatgttctcattaccaggccacttccttgattgggaatcccaagtgacacatgttgcctagtcagtgctgacagtatgagagtaactagcataccaggagcacggctacatgccagggaccgtgctgagcatgatcaaatttaacccttccaaagacatagttaatgctatcattttcagttacaagtaaggaaactgctggcagtggtggtgcacacctttaatcccagcccttgggaagcagaggtagctggatctctgtgagttcagggctagtgtggtctgcagagagaattccaggacagccagggctacatggagaaactctgtcttgaaatagcaaaaacaaagcaaaacaaaccaaaaaccaaaaaccataacatagccagtaaggaagctgaggctagtgagcagttgctgtttcagcggtcatggccacagatgtgcaagtctgagcactggctttgggtccagaggtgatgctgttcgctgcggtcctacactgctcatggtcctgtctcatgctgaacactttcagttgggattagaactctttgactgtcttgaaattattttcaattttaaacaatgaatcttgacttgcttctttgacctgagcaagcctatttgaattttattttctgggaccctttagcccggctcggcaaactcagactgtacctgcttaaaaaggaagctccccctcccgtgtctgcctgtgtccagctcagaaactcctggacaggggctgtgggagacatgggctccagagcagagtcctctgccgtcccaggtaactgagggcgtccattccaggcagatcacaaggagtagcgagaagaatggaaggctggcccggtttcaggtcttcatggacctgccgggctgtgtggctcctgtgaaactcatcctgcagggagggcttgaggcggggtgagaactgcaggtcccagcagcccggctggggaagaacagggcagggttaacacatgatagagcagtcatattttttttttttctgacaggaataggcaaaacaaacaggcaaacaaacaaacccaaaaagctctgcatctgacctgaccactcccaatgaacaatgtaccaaaatgaagcgactgcccatggttctggtccacttagttcgactctcagaaatctagatgctgcccagaaaagtgttgttagcttttttttttttaaagatttatttatttattatatggaagtacattgtagctgtcttcagacactccagaagagggcgtcagatctcgttacggatggttgtgagccaccatgtggttgctgggatttgaactctggaccttcggaagagcagtcaggtgctcttacccactgagccatctcaccagcccgtgttgttagctttttaaagttaaaagaaaaaaaaaaagttgttctagtataactggtttctattttataaacaagaaatctgaggccccagaaggttacaggctagcctaaggttgggcaacaatgtggaattggcaccataggccaattcagtaggctttgggccatgctggtactcttccgtgctgcttgctttgagtttccctggtcagtacccgaagcctgcattctgtctctcgtgctcctcttagttaatctgcagctcagcgcatctgctcgtatctttaaattttgcgtttttacaaggaggacacctaggactagatgctgagcccgcagtctggtctgcatactgcccactgcagcagcacccctcctgaagcccgtctgccagccttggcattctctggctcggaatctgggtgtagatgtagcttttgttggcctgaagcagctgttgtctcccctctgtctgctgaccgggccctagtcctggaagcgtctagcctctgcattctaatctaggcctagaaggttttcagcctgggacttaagagctgaagaagctcacccttcctagctgtttctgagctctggctggctggtcggctcagctgctctggtgcaaactcctctctagcgcgagtcaatcaatctggcttctgtctcagcctctggccttttgcactccttgagcacaaactaactctggcaacctgttctaatcttctggctcctcctcattctgtcttcacctctgtctagcccccgacccctctctctgcactgttctcttaagtagcctccctttcttctctgttcttgtgagagctggacgtatcctattctgtcaaatcttttcctaatttcatcactttttctgccacccaattagacattactttcaaacacaggtgctgccttctacaaactaactttaccgtcattgttttggattaaaggtgtgtgctaaaagttgagccataccaaactagaaacctcttctttcggtaaataatgcaacattggggtttacagtgggatcaaatacctttcaatgtccaagcaagccgcatactgttccaccttgtgtccccagccttgtgacccctgtctaacagagagctgtttccctcttcagtcctggattgaagcagctgtggtagcagaggtagaatttggggtcacagaggccccttgggtctccctagttttcagctcataggagagtctctttgcgaagttccccaactctctggtgcttctgaaaaccccatcatggcctgagctccaacactgagctgaccgggaaagctaggtggataagatatgaccatgctgctgcctacaccgacctcctccttggcccaggctgccctgccggtgcctgtttgcttcatggtgccggtgtggtgctaagcacaaggagactacttggagctctgcgcctgcctgaagcagactgtgtaggtacccatggaagcagtggatggtagcacctttcctcccttgtgcaggccccaggcccagctggccccccagccctggtccagctctccacggggctcaattgagagacctcttttgtttggcttgcacagagcagcccggctctcactgttctcacatgccacagtctccacaccattcactggcaagactgaaaagccctcagctaattgcgttgggctgaaaattaccacttgcctgcgttcccctgctgctgaggacatttgtgtcactgctgtatttagggggacaaaggcctcctgtggggaaagcccaggtacgaatgtgggccgtggggagtaattgcaatctctccaggtgaaagccgctgttaaacttcagtaagtcaattaggctggggggggggggagggcagagaccccacaataaactgttcccaccaccaattaaagaaaatcattttagctttgaggacagaaactgcttattagaaattttgtatccccccacctcccagtcccctttagggatgaaacaacaaaccgccttcctcaatagaagtgtctctcctcctcctgctcattgtgtggcctgaaagcactttaccctgggagggcaaaggcagggacacaggcagaccaaaggggaggaggagccggcttaacacctgggctggtgcaaaatcaccgctgcttggtgactttgccacagggactcctgtgggcacaatgtgtctacagggtgtgggtggagtttgctcatgtgggggaccatgcctatggacaccagtgaacaccaagtactgcatgtgtgtgtgtgtgtgtgtgtgtgtgtgtgtgtgtgtgtgtgtgtatgtccgtacatgtgtcttctcagtgaaaggtggtaaagccaggacaactcagcaagcggtgtagcgctttccagggctctgaccaagcccatgttttctctcctggaagaggagccaaatagcagcaccagggaattgagccacagcatagctgtccacctcagacagttggcaatggagggttgaatgccagtaaccacctagtggctttgggctggaacagttgagtgggactgaagggtagacatgctccgctcctctgtagcattgttcctgtgttacttgggtagaaatgaggtgagagaagactgaacaggtaagaaagtagaggtttgggcatgctctctgggcacctggcttggctgataacaatgtatgcacaggaaactctggtttgcagagtgtggccctccccagccagttattgagaggcacaggttggagaagcttgcaggaagggaggttgacttgtgagtcaggagactaatttagtgcgtatgtctgtctgtatctcagatcacaggtgaggaaggctcacacccggatggctctgaatcttactattttttactgggagttgatggcaccgatggtggccatggcattgagttggtccctgctcttgtccccagcaattccttgtggttcatggtgtatttgaccttcatttcagtgttctgaagaagtcaaattaagtgttaaggggtaggctcttccaaataatcaaatattccaagttatttgcttaccaaggggccacaggtagtagaaatccctcccttcaggctggatgtgtaagaaaggctctagacaggaatataggaagaatatatttgagagtacagctttacctaggcttgtgtatgtatgcatgcatgtgtttaaaactatttagtatttgtaattatgtgtatatgcgtatatatatgcacctgcagtgtgcactcttaaccactgagccacctcttctacttccctgccccactgctttttgagacaatattgatgtgtgtactccaggctgccccggaattcactatattgcccaaagcagacctcatacctatggcgatcctcctgcctcagcctctcaaatactggagttataggtatgagttgctgggggtggggggagaatatgaatgagaatagttgagtttgttcatgtatgcttacctttccccttgattttgtatctgagtcaaggaaaagaggaaaagataagttggagcaagggaatcaattgctgggggaagtgtcacaaaaaagatttcagtcatttggtttcagatatctaaacgtgtgtgagggcattggattcccctgaaactggagttacagacagctgtgagccaccatgtgagtgttgggaattaaacccaggtcctctgaaagagcagttcgtgctcctaacagctgagccatctctccagcccctgttatgtttttaaacctttaattaaaaaaaatggaaaccctcagaaatgaatacaactggccatggccgtctccattgttccatgtgtggtttcattcacgtcagaagactgtctgggaatgtcctggttctgtggtgaggacctcaggggagagcaaactccagaagcagtcggtcctggtacatgaaaagggttcggaggaaggcggactctgcccggggctttgatctgtggacactgtacttccatccttcagcaacattcttgatagctgctagtgtgcagactttggagaggaaaggtaggtctgtttctgcatgctcttcttgggcctgggtgggagagaacctcttctcttctttctgacattgcaggctaccctgtgttgatggttttatctgcacttgttgcagactgctaactactgatttcatagcagaggtgtctgttcgtaggcacttgtggtgtgcccagtagatgcctgtctaagtgcattgctcatttctagctgggacattcagtctgttgaatatccagcagccactgagcagagaggggctctgtattaggacaaagtggttgtaaggggtgacttcaaagcaaactcaaattaatgtgagttttatttaggctgtgctccaaggcagcagacttcagaagtgacctagaggccacagtgccgcctgccacttgatccttctggggcctttctttgcgtcttcttggatcttgattccttcctttttccaagctgaccagcttattccatgaggcccccaagaactcttcagtctggcaagtcattgcttatgtcgcagagagtgacagaggagttggctcatagagcttggtccagttcactaccccttggtcatctaactaggcaggaggaagcgtcacatcaagtgatggcaggtcactcaggactcacacttttgaagagagaactcaaggtggcagagcaatagctgtgtgctacattgtttgtgtaaggatcaaattagcctgtgacatcttttctcagtgtaactataggaaggctgcctgagttcagactttggcttccggctctcaaaccaagtctggaaggaacaagtcacattccttaaactcccattctctttattactagttttgtagtgaatagagatttcttcccctgtatgccattgatggggaactcagaaaaacctgccatcttcctaatgtgacatgcacaaggaatttggctgtagagacatgattattgaatatgagagagagagagagagagagagagagagagagagagagagagagagggagaatgaatgaattgtggcttagtacaacttagggctagggccagagacaagaatcaagtcctggcatggaacaggcctaggctagccaggcctcctccttagaggccaaaagaaggtaactggaaggctacaggacttggaactagatgccgaggagaaccctcgatcttccagaagaggcagagcatagggccctgcttcccctccttagtgctcatcaaggaggcagaagccctggggaggagcatggttccagatccaggtatgtggtctggaaacaaggaagccccttggaattttactttcctgaaaactcatgtaatgtagtttgatccaatggagctcttctctcttcagcctcatgattttctcctagtttcaggagtaaaagtcacaattggtttggacagtggaaggactcagcacagaggagttgccatgtacatcttggttggatttgcacaccaagatttgcatttgacaaacctgtacttttctacaaatggagcactgtagagaactgtagtgaactgtagagaacagttccccaacaataagtactcttctacaaatgggcgggcggtcctgacgatggataccccagcaaacatgcacttgtccaccaatgaacattgttgtttactgataaacatttccctataaatggagcattcctttacaagcagagtcctcttgtgtgtgtgtgtgtgtgtgtgtgtgtttgtgcgtgcgcgcacgcgtgtgcaaatgtgtgtgtatttttttcatgaatcttatttctatagctctgctggatatagtttataatgcatggcaggctcttcaatcctgtcagcctccatgatacttgccaaaacatacataatccttaagggtagtgggggaaggggttgaacaatgatcagtccaagttaaaaagtagagggtttttgagacaagcctggcacacacatacatgagagagaggagtgaggagaaacacacacacacacacacacacacacacacacacatacacatgggaagagggataaacagacacacatatgtggggggggggagatgagagaaagaataggacttcacgtccccttttactccatcttttaaaaagtttaaatgtattctcttacaacatcatacacatatacactatactttggtcatacatgtacttgacccgtttagagcccccgtgtgcccctccctccttcatactctcctctttctcttttctagagatagctttctcaaccggtagccctacctgacctagaaactgctctgtagactaggctggcttgagttcacagagcctcacacgcctctgcttccagaatgctgaggttaaaggcatgcatctccccactagctcttcttatcacttaagtccagatgtgtgtgggcaacctacctgtggccacatttttcaaagaaagatgactccccttccccacagccgtcaactgccagtagttctcagctaagagtgacacctcagggccccgctcatgtccatgacaggattactaactggtttgatcttgtttaggtttctgcagctgcttagttcatgagtgcaattgccgtgtcatgtccaaaggacagcacttgacagagtttctcttaatcttctggctcttaggtttgtttgcctctcttctttaatgttgagtctgccttctggggatgggctctcagtgagggccgagcactcgacggtcacttactctccgctcttgaccctgcctgctgcggaaaggagcttctctcaccaaggccaagagcaacgctaacctacgaggatagccataaatatttggaaagcagtttgagaacatgtctagttagccagacaacaagaatgctcgcccccaccccctcccccgcttctagggcccatgacctcctcagccaagggcttttccatggacttacagtgctaggaatgagtcctcacttgtgaagcagaccttggatccaatcagaaggcagctggttactccacaacagtcatgccactactgcacctgggccacatgttgcccagtaggtcagcatcgacacgcagggcctgttaccaggtccgtccattgatgccttcctccagtgtcctttcagcactatgagagctagccatcggggaggaagtttctggatcagttccaactatgcactgtggtgatggaaaggccgtggtcaaggtgcaggccatggttgtgaatccacaagtagccccctttgccgcctttcacagtttgctcggtgtgctgtgggactctcttacagcttgccttagggcctcttactgaagccctggaatagttttgtttttttttttttgtttggaaagccacagatgaggaagccatccgaccatacagtgggtagggtagatggactctttactctttgttcctgccaagaaactttctgttactctttggtatgtgcatgtgaaaacgatggcctgggttgctacttaatgaaataatgagaatgcagataaaacgctgcagatctcctggaactccaagactctgagcctggtgtcccagaagatagggtacagggccctgggctctgttcttcactagtggcttcatagctactcagtgctaccaccattatctaaactaagctgagggtcagagccctcggtgtcttattagatgtttgtttagaaagagcggaactttcaggtaagcctgtttgagtggctctgtcctacctctacaactctccgctaagctccgctttccttttgcttgtctatggagccacaattgaccctagtggctcttgttgccctctcatcccatgcccccatttaaatgacagccacttacatttatccacaaacctgagaaaacacctgagcccatctgtgctcagttctcaaaatatcagcagacaatgggccaccagggccaggagatagttgttagcagccctggactcaggcttgacgatgctaccatgatgctaaggggacctgtctgaaaggtaaagtgtcttgtgctggaaatgaaatcttttttttgtgtgctcctgtctgagctagtcatagcataatgaccatttgagcagtagtgccctgtgggttattagtgtgaggggcttcagggttagccttcagcaggcacacgggagagtccgatcacctgcttgaagaactttccttttgtaatgttttattctatttttattttattggtttattattttttgagataggatcccactatttagttctagatggcctggaacttgctctgtagaccaagctagtctcaaactcacagaaatctgcctgtctctgccttctgagtattaggattaaagacattaaagccaccttgcctggtctttttaaatttttaacttttacatttgtgtgtgtgtgtgtgtgcgtgtgcatgtgcgtgtgcgtgtgcacagtgtagatgtgcacagcaggagctagaggagggctttgggtgcctcctctaaggtctcctgctgaacctgaagctactttcaggtggaggtgagatcagtaagccgcaatctcatctctggtctcatgcatgtgcagcaggtgtttgtaaccactgaacaggctttgtcttcagccctcaccttcagctttccagtgtgtgatgagtgtgtgtttatggggagatgagagactgtgttgtcaccctcaggaacgcgtcaccttctttgagtcagagtctgattggcctggacttcactgtttaggctaggccggtctgggagtctcagggttctcctgtccctggctctcaggtgctgcacatcactgcacccagctttttgtcgggtgctggggatcaaactcaggtccttacgcttaagcatgcgctttaccgttggaaccagcgccccatcccctgaaacttcttgtgactctttctggagggagtgtgtagttatgaagcaagtaaggggagaacagtgtcagagcagctcggggaacctgcgggctttgtcctgcagtcctcactaggatgtcagggaacggagaaagcacagacacgcgacaggagcgctggaatcagccgggctgtgctcactgcgctgggactgtcaactaagccgctgcacaggacctcatgcactgtgtacagtgaggaggggactgaggctgtgagtgttcaagaggaggaagaggctccatgcctgcattgcactgtcagctggcacacaacagaggagagctacccagtcccagtgggcatcgttagctacacatgttcacttgggggctttgccctctccttacacatcagctcggggcttctttcacttcccacatgcgcagacatctcttctcaagcctctaccactcccagggccagccacagagcgagcctctcttcagtccagcgttgaatggtggcctgcggttcgtgtgagatccagaaccatatttagtgcaatccacatttagtgtaatgttttacctataagcaaaccatctttcaggcaatttcaagtgactgcttttcttatcatctttctcgtaattcccagggttccatttttttttgtagaatttttttaaactttaaaattgtgtgtttgtatgtgtgtttgtgtgtgtgagtatgtatgtgtctgtgtgtgtatctgtgcattagagtgcagacacccttggaagccaacagagaatattggattctctctctttcaagtttgctttgtgtagtcttatctgtcctggaattatctctatagagtaggccgacttcaaactcacagagatcctcctgcctctgcctcccaaatgctgggattaaaggcgtgcaccagcactatctggcttttggattctctagggctggagttacgggctgctctgaggtgggacttgtcctctggaggagcagcaagccctcttaactatagagccattttgacatttttttgttcagaaacacaattcatttcgttgcttattcgcctctttggtatccttccataacgttttacattgggcctcttctgggttctgttcttgttatttcctgttggtttgtcaggctgttcttaggtattccatggtttttcatactttttgtgatgcgtatttagtaatatgtcccattggttataacaataactaacatttgtgggcccttctgtgttatatgtgccacatacttaccccagagaatccatgcaacaagcctatgatctcttctattcctatttcacagataaagaaaccaggtttgcttgcttgcctctctctgttaccaaggactagctcagctgtggtcactccataaggagagaggttcattgtgactgagattctgggagctccagaaatggttgaggccatgtctgatgacggcctgcatgctagccgagttctgaggtggtgcatgaagcacacagcaagagaccggaaccgagtccccctcccctctcatgtccctccttctcctcctcctcccccactccctctcctcttcctgttcttcttctccccctctttctgtcttgtgatatgaagcctccaggattccattatgggggttctacactgatgacctgatcctagtctttttcaaaggtctcacctctcaacactctatttttgttaagtttctattctcctaatacctcacaggggaatgtaaatttcaacacacaacccctctgtgagacaatcaaaccatgcctaggattggttttcaaggggttaaatacatccaagatcatcaggaaacgaggtggctactttatctagccctgagcttctagacaccatcctgccctgactcgaatggctagagaggcgtgtatcaatgtgagcctgaccgtatagttgttgcaggcctctgtagcagtgggcggcaggagtcagcctcctgctagccagggccaagtggaaagaagaggctgatggagccactctagacgtgacctgctttgttttgtttttgaggctatatatccctacctgatctgggatttgctatgtagaccaggctgaccacaaactcagagatctagctgcctctccataccaagttctgggattaaaagtatgcactatcacgcctatgtctctagggctttcttgtatgactttggtattggtcagtcctgatgcttcagctaatgtgcatggaggcggctgttggcagatactgtccacctgttcttggccatgaacctgggacaagagtatcgaggtgttgtttgttactgaggtagagcctcaccatgtagctctggctgtcctggaaatcactacttagaccagagtggccttgaactcagatatcagcttgcctctgcttcccaagtgctggaattgaaggtgtgaggcaccactgccagcacttgttagagattatctgaaataataaagaaaacacgggaagacttgcttattactgcctgccaagcacagtctccttagcattgtagcatgcgcgttctctcaccgctgttttttaaatccttgagtaatgcctgccgtttttaccctgttttctctcacacataagcatctacctgtactctttggaatattgtgtttaactcacattttttggtcttgacccatcaaaggcaaagtgtgttcttttctaattaaccaaccattcatggaattggctaaatctcttcttaaaaaaaattcttgttgttgttgttgttattgttgttgtgtgtgtctgtgtgtaagtatgcaaatgtcttttgtgtctgtgtagagctcagaagacaactttggggagtccattctccccgcactatgttaggtaggatctctatgattccttctgttctgtgtacttccccctggcaggcccatgagcatcctgtgattctcctgtctccacttcgccataggaatgctgggattaaagatgtgggtcactgcatccagattctcagctggttccaggggggtggaactcagattgtcaggcgtgcacagccattttgctagcccaaattggctgaacttgtcttcattctctttttgaagtagttattccagtttctgtatgaaacagaacttatgctgatttgccttaaactttactcaaatgtcagacagtccttttcgttctatttcctttagtttgatgaacaaagttgtgttttcttctttggacactgccctcctcctccctcctagacatgctactctagacagtaggctagctagtgtgcgcccagtctctgccacaggcgtgacacgcatccagcagtggatgcttccctggctgtaggtggacatgtgtgtccccccccattgacctctcccagacaatcagtatctctgtgtctttgttgaccaggcttctctggtgattacagctcaggcgcctcactttcacctgttgcctgcctccatctttccccttcttgacttgtgttgacctcctgtgaccacctcactggtcctgtccctgcaatgctgttaccatagctcccgttttccctcctgagtgagtttgtgtgaccttcgcactgtattcatgctttgggatttacgctgtaatgatgtcatggcgaaggttagcagatggcagcaaagcaatgagacctgacatgttctaatgactccctctttcccatccttactggccaagccagtggaggggcaggggtttccttgaagtatttaaggagggggccaagggaaatcaggggtggggcccaggtgcctatgaggcctgtgacctttgccgctataatatcagtgtttcacaagcagggcggttcaggagcccacttgcagcccatcaaaaattgatttaattgcaatttttcctccaattaggagcactggagcctgactaattggagtaatagagagtaataaggctcagataaaaagccttcctcggcttcctttgtatcttgtgtcagtgcctgtcagaggtcagagagcttgcatattctattaggcagcccggccttcatttgtacaaattagtttacccaacagtaattaaaatgccagtgcgggttgaagagagctgaatacacttgatgggcatgctggtgaatgatgtgacagctctgctggcctcccttgccaaagtgtgtccgcctgggctcaggctgctggggcctcgtccagccgggcggctctggccagcctcaggcacagctgctgagcacagccacttctgctgcctgtctggggctggacttttcctccctcccccaggtacaatcgtttgtgcaacttgtttgattcattcccaccgtccgtccagaagcttttgagacttctctagacattgtactacacgctgggagcccaaacaaagtcagcttaaaacatatctctcttgggagtttgtggggtgacataatggattctagaattaagagggccagttccaatactgctacttattgctccgctgaggaagaggccacttttattaccttcctgagcttcctaatctgtggggaaatgcctcaaacatacttactcatcacctgacacgcagtaggtactcaccacgtcacacacagtaggtactccgtaaattacagttgcttggtgtgctgctgcatgcttgtcatcatacactggggaagctgaaggaggaggattgagagttcaaggctgatctgggccacatacgaagaccctgtctcttaacagatagtgagagccatttccttgtgtctgtgcgggattagatccagtacccatcccctgatcaataccaaaatctccacatcttcaaatcccctcctaaagaaatgcacagaaggcagcaggtagtgtatacttgcaatcccagcacggaagagtcagaagcagggcaccacagatttgatgccaccctgagcttcctggtgagttccaggtcagctcttaaaccctaaccaaaatcaaggggcaggaacgatgactccatgattaagaagcactcgctgcctttgcaggggaccagggcttggttcttggccccaacataggacagtttttaactgtttgtaactctagctccaaagttgtcttggcaagagtttctgtggctgtgaagggacaccatgaccatggcaactcttataaaggacaacatttcattggaggtggctttcagttcagaggcttggtccgttattgacatggtgggagacgtggtgtcaagtagcttaacctacaggcagacatggagctggagaggtagctaagggttctgcatccggacccacagacagtgggaagagaatgagtcacactaggcttgagcttctgagatgtcaaagcccgcccccagtgacacacttcctctaacaaagctgcatctactccaacaaggccagaccttccaacagtgccagttccaatgagcctgtggggccattttcattcagacctacaagggttaatgacccttcccatcctccatttttctgaattttctttctattctttgtcttgcatataggatccttaactttcctagtatctttcttgattggatacctgtgtgtccaatttgtacctatggcctctgtgatgtcaggcttgcctaaggttcatagtcagcgccaagttgagggtctggacaagggccgagaaaggacaagaaacttaaggctaatttctggccagggctttgtggtaagaaaatatagcttatggagtctgagggacttgttacccccacccgtggatacctgtcatatgttgttcaggtctgagtctttgatggtttgggacaccctcctttaagaggcagcaggaccacctccatgattggctttaaactctgggaggccctttctggtcaatctcatgactccatactgagtgccttttgggctaggcactgtactagactggagtactagtggggaatctcggagatcagagagggctgtggcgcttagagaactgagggtaaaactgccacgaggcacaaccccaccccaccgccctttcagaacttctatctagacagtgctggggaggtgctgagtgatggcggcccttgaccgggttgaccaggctcactgacttttagcatctaccttcagatgtggctagtcagtggcttttgccacattcttcataatgaccacaggcactgggcagaagaaggcaggcacaaagcgtggccacagcagtggggaggagttcgaggagcgtaggactgcttctagagccagctcggctccttgatgcccaggcattcccatggatcgggcttgttgccgaattgatcagtctgtctgcagtctgtagttcacatgactttgtcattaaactcttaggccctgctaatgccagaaagacattctagcttcacagcaccaggcaaaggggagagaacagcgttggggaagcttttataggtgctctgtccaggtcatcaaggaggagaatgtccaggtcattctcggtggcagatggtcaggaccaggggtgggtgggagggtcaagcaaaggtctggagtccctgggaagggtctgcgtcctcctctgccctccctgggaagggtctgcgtcctcctctgccttccctgggaagggtctgcgtcctcctctgccctccctgggaagggtctgcaccctcctctgccctccctgggaagggtctgcaccctcctctgcccctaccccacctgctgggaggtcagggctacaggagtggcagggattagcttccaggctcctcccccagctttctctattgatttaccttgaggctaatttaggcctgtggccaagaggcctcagagacttccataagagatgcccgtgtctgtgctggcgcccttcacctggcctcaactcctcaaaagtctggagagcccaattgcctgctccaatgatttccaagtagctattatgtttccaacccaaggtaattggctttaccagttattaatggattacactgaagagaaaactgtggaggagggaggcaaggggagcacctcctgcctctgtagtttggttccttggtgctcggtagctgcccggcactgccactttatggtagaatggctgctggcagtagatgaagaggaaattgggatgctgtcatattcctggaggaagctttggctcgaggcacgagagcccccgggtgtcttgtctggccttgttccagtttggagatgacaggtgggcactagtctacagttttggtacttaaaccagccagtgcctgcccagacatttccctcatcagcaactgctagctaactcttcaccagctgcactgtccaaggcacggccttcttcagacccttctccgcagaactctacctcccgctgacgtggtgggtacaggtgctgggcactgccggccaaagggctgcttgcccacgtgtgaggtatcactaatgcatccaatcttccttccccggtgcaggacatgtggggccctggcccatgccccgcccagtgcctttaatcttactgattgacattaggcttcgtgaggcttccccttccacccctcccaaatgttatgatgaaggtctgctctagctcagccgttcacgctctcatcccagtattgaggctctgcagaccgatccttcccacagtgcctgagcctccgcagcatgaaaccactcagactgcctacgttgaccattctgagagactctggaaattgtgtgttctttctcacctgcctgtaggcagtgtccatggtactcttcgagactcttcccaactatatctcatccctcggcagacctggctacttggccctgctccctgaaagctacaacatacttttggagatgcactattttcctatttgcccagtgtttgtacagctttgtcagtcttgcaattatttggggtcggggggtgagacggggtttcactttcatagactagcctgagttctggcctcaaactcaagagattcacctgcctctgcctccttagtgctgggattaaaggcatgccctaccatgcctggtttcccaactcttaaacccttctggaaagtctctgtctgattggggtggtcactggtcagtccccgtaggatgctcctagggggtcttacagcactgagctctcaagtctcacgcaggtacattctcatcagctcacactgcctagggctcagagctgcccatgcagaggcacaggtctgctgccgaccttctgtggtcagaggtgacatgccccagtccaaagagcgggcatatccgtggttgaagctccgcagcctctagtcagacagccttgggaggctgcacccctcttcgcaccaagttgtcttagagatttctgtgatacttcctcattctctctcaatgtttctttttctggcttaaccccatgatccctgggcaaggagcccagcatttctaatgtgtagccatttccgccacaagttctgacaagccagctctaactctgtcctccttttgtttggcagctcttttgtgactggaacagcttgttgtgggcacttctcacctctgagaatctgggacctcaacaggtaagagattcctaagcccacagcggcattgagtgggggcaggctagggcagctgcgagacaaaggaagagctagctagccagcccctgcctcagttggcctggtggtaccagaggaagcgggagaaatcacacctccacccaccaacagctgcagtgcatttcttgggggagttatttgaagttagcttgaggagacccttgaaatcacctggaacaggtgagcgtgctcatggacaattgatagtaactacttgggtttaatatatctttcctgaagagttcctggctgtgtactctctcctcagaggggcatttttataccataaaaagtttcaaaggtggcctgtagaacccataacataattttgtatgatgattaaaatgcaagcaggttttcttcacagttctccagtcagcaagcttaatgcattctctgatcctctgcaagtctgttttagttttgttagtttttcaaccaaaagctttcattttgaaataactgtatgtttataggatgttacagagagatcagcggggtgcttgtataacatttatataacatagtttcagaagcagggcactagcaatgggatctcatgggcctttttctgtacctaccaccacagtcatgatagagatttgtcagacacccttcccagtcagacctgcatcgtctctaatacccacaaacatttagatgctctctgcctctaattttgttattttaaagatacgatttaaatggaatcatatagtttgtttcctttaagagtagctttgtatggctggagaaatggctcagcagttaagagcactgactgctctttcagaggtcctgagttcagttccaaacagccccgtggtggctcacaaccatctgtaaatgggatctgatgccctcttctggtgtgcctgaagacagcaacagtgtactaacatatataaaaataaatcttctttaaaaaaaaaaaaaaaagagtagctaatgccagacatggtggcatggacttttgaccccagcacaagaaaggtagagacagacagatctttgtctcagaaaaaacaaaacaaaacaattgaaagattaggtaatttttgttggttggttggttggttggttttttgagacagggtttctctgtgtagccctggatgtcctggaactcactctgtagaccaggttggcctcgacctcagaaatctgcctgcctctgcctccggagtgctgggatcaaaggagtgcaccaccatgcctggctcgtttttgtttttgttttttttaaaaactcagcatattacaatgaaacctatagacatgttatacatacatgtcagtatctcattcctttttattactgagtatagtccataatagtccatagatgcaccaaagtttgtttctccattggagaattcacccacgaagggacatatgagctgttatgaccatttatgcataggttttaaagtaaacatacactttcatttctctggggcaaatgccaaggaagacaattgcttagattttttttttatttacttaccaaactttttttcttttaaaagcacatctttattattttgcatctccaccaacagggtaccaggtatctggttttctttacatcttgaccagtgctttgatattgtcactattttttattttagctgttctagtgtgatattatgatttttaatttttttctgatagctaatgatgctgaacatatgttcatctgctcatctgccatctgcgtgtcctgtttagcaaaatgcccatgtgacgcccacgtccctggcctattacatcgcttttctactgttgagtttcgagctttatgtagtctagaattagtcttttgtcaaatatgtgatttacaaatatcttctagacgctgtcttttgtccttttaatttaatgtcttctgtagaacaaattttaagttaagaaaaactttcacatttatgtgtgtgttttgcctacatgtattggtttgtgggggccagaaggaggtgtgggaccccccgtaactagagttacagatggttgtcagttgccgtgaggatgctgggagctgaacctgggttctctagaagagcagccagtgttcttgttgagccatctcttcagtcctcaagcttaagattttcatctaaactactgacttttcctctaatcagctgtgccacatctcagactcttgagctagccctgtatggcaggaagaaggctgtttcttgcctgtctcatccatccttttcccgagccctgtctcctcacgtcgtcttcagaagcatatgccccacagcctctctctctctctctctctctctccaggggatttctcaacacaagacacttaattgagcatttgtgtacattctgatggtaaatctgagaacaggggtaggatgctcagagtcttttcttttttttttttttttttttaagatttatttattatatgtaagtacactgtagctgtcttcagccactccagaagagggagtcagatctcgttaaggatggttgtgagccaccatgtggttgctgggatttgaactctggaccttcggaagagcagtcgggtgctctaacccactgagccatctcaccagcccgctcagagtcttttcaaactgcactgtctctctgttcaactcagaggaccagaatgcccactctttattgaggtccatttgtttcctgcatctgtaagcccagacagaaagcaagctgaatctctcctgtagaataagcctccagctgtctggaaaccttgtgcctgctcctccggggtcttctttttcccaggcccaccattttattccttagttgttcttcgcaaacagaattcatcagttaaatgtagctttgggctctaagtaatgaaaatctaattcaaataagaatggaattatgatcgaagatgcccaagagcccagagttgggtggctccagacctggaagggccatccttactcagctttcccctgccactgcagtcatggtggcttggtgacaacagtgccaccaactcataagacaacattcaaaagtagaaggaagacctatgtgtgcctgggaccactttactgtgaacgagcctttcccaggaatgctgaacgggcgtctcctcacatctaattgtcaagactatgttcaaggtctcatcctaaaccaaaccctggcaagaggcaaggacggagccattgtgctttgcctctttggcttgagaaaagagcagcctcccctggacataacagcactgacagggagagaggcaggtgttgcagaatcagggtctggttaacaggcaggaacatgagggtgggtcagtggtgccctatgcagttggcctcatgctggctccagggtcatttgtaccttacagtttatgtctcagtccctctgagcactgaacagtccaaatgtggtcggtctcgtgggagatgtgctgtggcctctctcccttcagatctactgcttctgtccaggcagtaagtggtcccatcaccactgtctgctgagctcggacttctcaggctcctgtggtctctcgtcctggggctgttggcatcctgtggaattccaatgctgtgcagtttgttctcatgaattccttccatacgactgccacctgtcctccccttgtgattatggccaaggcaagaggagccctctctcagagggctgtgtgctggaagcagtagtatcccaatcaaaactgtactgtcacttaccagcctcatctaggacctctctgaactttgctttccacagtgggaactgaaaaatgggaatgcagtgtgtccccaactccagaagtagttgtgactggatacctgaaaaatgccccccccccccaactgcctgacacctttgctttctccctcagaaccaaagggtttgtgaggatctcacctctcaattcccagaatacctgtggcctctggccagggtagagggaactgccagccccacagcaaggaggatcttgccaggagggctgtggtttgggatggcatttgtgccagcagcttcagtcagccacacagctgtagctcatgacaatcatctctgcctgggcctggctcgcagactgtggtctgagtacaccaccatggcctagcaaccaacatctcaactggatgatcttcaagctgcctgtggctgccttggaggcactagggtcaggatggtgttctaaggggcactgccattttcatgaaatctctagatgtcatcaaccccaaacacaaataagtataggcacagggctgggcagtggtggtgcacgcctttaatcccagcacttgggaggcagaggcaggcagatttctgagttcgaggccagcctgatctacagagtgagttccaggacagccagggctacacagagaaaccctgtctcaaaaccacacacacacaccaaaaaaaaaaaaaagaatgggcacaagacaactgaggtctctgattgtcctggaaccaaatgagttattgtcactgtattctctgccaacttctgggctctgcctgtgacagggccaccctagtatcacatggtattgcctcttctctagccccagactgccctcatcacccataggaggagccagaccttgagcagacatctaccctgtatccagaattgtgctcagcttagagaactgagcaggccagggggtacggagatgccctggtggaggaaatggatggccagggcagctctgaagctgtcttgcctaaagaagcccaagcagataataaagccgtgtagaaaacaggattaaggtaatgaacaggcaggaccaagtttgatctttcaataacaccaaagcctgagtgacaggcaatctgcgaggtggagtggtattgccggcaggacgctggctgggcggaatgtgccactgcctggatgctttgcttttaacctgtcaccgccgaaacctgagcacagcctgaatttccttttatgtgtgtgctgacttggggtgtagggtagctctcggcatctgagctaccctgaggtgatggtgggggctgggacacccaggaagtacagctaccccactggacaccagttgtgtcccctttagagctgttgccacattcatctcccaggtacccaccactgtggtcagagggacggcacagccctttcagggtactcaggagccaagcagggaagaggggcgaggaaggggctggtcgaggttgcctggtatctccttttcagccttttcctctattggaacagcactgtaaagttaagcccaaggaggggggatttccaatgaggaagatggggcatctttctcacagcatagcttcgaggtgcacagaacttgatttctgatagtctccaggcccagtattcattttcaactgccaacacctcctagtgacatccaacctttgaggtagtcttgttaggctctgagggactgtgctttgcaaagccatcccttagcttgaagcccggagacgttagagtttgcgtcctctgtctgcatttcaacaaagcacttggctagtccccaggggtgcacacatctctagctactggaggttggagaaggtcagagtggcctgacatcaccttccaccactgactctgcttttgctttaggacttgcattttctaccagggggcatttgagctggctgcatttagcattggtccctaagagcagagcactctgggtcccctgtggctagggacaggtaagctactatgactacagacctgaaggtatcacagagggtccagcccttggacataagcaatcctagggactgctagggagggaagcaggtaggggcttttgctgacttcactgttgagaggtattgagctctctggatagtccacctcgcaggtgtgtattcacatgtcgctatacaaaccctttatctctgtcccctgaggccggggccaccactgttctctgttatgcttttcttcctctactgaaggaacccactaaatctcttctctgcagggaacgggcagagtgggtttcccacccacctgggctttgctcagggcagccccatactggaaccaatctctgcctaaggagaccttccaggtcagcactaatactgtcccctcatgaagctttccctgatctgtccccatggcctcttctactgagtcctgagctagcctactgaccagggctacctggttaatcccaggtatctgggaacgtggcttcagcttgtgctgagcacaggatatgaacacagggctgacatcagaacggcagggtcacatggatggagatggaaactatggtcagcccaggctggtatgctaaggacatcacacatgccccatcccacccagatgtggctttgtctgcccaggccttcctctcccccgccccgtacaggggcctggccttcagtcagggtgattatgggactgcccctcttgaaagtacctgccttctcctttgaaagtattactgacagctttttcattctcccttttctttacttctttaaggaaccctgtaatttctttttctttctccccccttggttttgctttcttgtcccctctgtccccctcaactctttgaaattggctctctgcctgctgacaccaaactgatactttgcgtttcacttctccttatccctttatggcaacagatgttgaaattttgtatccttttatctgcccggctgccctttcctgtaattatgtcgccttgttagcagtacaaagtgggctgcctggctgcctggcctttgagccagtgtgtctgaacacgtgtgctctggtgggtgccgagaggggatacatgctctcacacacacatgcttacacacacacatgctcacatacatacatgctcatacacacacatgctcacacacacacatgctcacacacatatatgctcatacacacacatgctcatacacacacatgctctcacacacatatatgctcacacacacacatgctcacacacacatgctcacatacatacatgctcacacacacagatgctcacacacatacatacatgtgacagataccatgtgtcttctcctcagacctgatgtggcaggggcgaaacccttcagcatcatctctttatcctacatctccactgttacatttggggtctggggcaagtgctcagtgggcagaaagtgtcttttcatcaagcctgacaacttgagtttgatattcagaccctacatggcaagagataactgagtccttgaaattgccccaacttctataagtgcaccgtggtacccacatggtacctttctaagaaccatgtgaatttttttttttcttttaaattcaggacatattcccaatgaggaccagacccttaggcactcgtgaggtgcagaggcccgcaaagcacaagtgagggcctgaagctggtccttgtgtccactggggtaggccaactacggatgatatctaaggtcctgtgtgtatgagagaaaagtgggaaggccaccagcaagagagtgcagtagagcaggcaggcttgaatccatgatcttgacttctggttaccaggggcaacctgtgccttggcttactcatctgtacagtggtgttaggagaccccaggcccatgctaaggactccatgagccgagtctatgaagcactgtgtgtagtgcctcccagacacagggactcagccacgtgagctgctgtagaggtggcagctatctgccacccgagcctgcagagccatctccactcctctcacgaggctaccaggctgcggttgcagctttcctggtctgttttcttggtgtgtgaacctgaaggtattttctctgtagctctggcttctttattcataatccgagggctgatctgagactgctactctgccccaaagcctcacggtgctctatggcaggtagggctgtgtatccacaggcctgtggtctgggtgccagagactctggcgtgccctccccactcaagcctcatcacctccatcaatgactttccttctcattgcctgtcacagtcccatcactaactaaagaatcactcattcccctcacccaaaatgctgattttcctcatagaaagttgtttttctctgtttgtgagtataaatttagacttctctccctcgttggacagaatactcactgaaaagagggacagtacgtcctttatagtgcagctcacatctctgtaatttctgttaaagcatgatagtttgcatatagaagaaggtgctcggttaattgttaagggaagaaaaaagagggccccttttactttctttaatgatcctgggcctgatgtaaccttcaggccatttgcccttggagcgaggatgtcagcttgccaggcttctttcccccaaaaccactgttccggttcaaggtagcacgtgccagatgagtcctgattccaaagagaagcacagcacccatgcacagactccagggagcccgctcatacgtcaggatgttacaagtagctgaaaatgtgagagccacaagctcatgtcactgtggcatggagcctcagagggtttctagtacaggggcctgtggtgtgtgggccagggctgagagtgaagcggggctgttgggcagcatcggcggcatcccacgcctcaaatcctaagtgggtctctgagttagaagccagcctgatctacagagtgagttccaggacagccagggctacacagaggaccaccctcccaccccccagcgacctcccctacacacacacacacacacacacacacacacacacacacacacacacacacgagagtgaaatatggcatagtgtttagattctgcagggtccagccttggggcagggaaatgcctctgtcaactgggccacagtggttaatggcaatacattattaaatttctctttctcttggtcagcagggtgagccaggtccaggagccctgccttctgttctgagagactcctcagggagatggtcccacttagcttgcttcttcctgcccaggtactagagcctcacagagacagctgcagtggctgtgccagggagcagggctccttcagcatgcatacttggcctctgtcattcattcatcaggctcgccctgtgggccaccccatctgtctttatctttccctgggtggagagagaattgctgaagtcagactcaggaggctagggtgtgggggtccccagcccgcagcagctcctggagacctcggctttgtctacagagctggaagagaaggggttttgttgtctgactctatagtgacaagcccagtttgtgctcctgtcttggcctggggctctgagctgcagccctgttcccacacaagttgtgggacagccaaggctctgcgcacgccgcccccctctgccccctacagtgagaagctgagtcgcattcttaacattctttccagagaaaaggggtgaaatgtctgaatttgggggtcaccacgttatacaaattgcaatctaatcgtttttacaagaacacacttgcagtgagaacagcagggcaggaggggacagagacacaggctgctgggctattgttgaccagcctctccctcagcaccacagcactacagctttctacggaaattgggcctggggtgggaacctgaagggcccatggtgccatttctgtttgttttcccaaatcaaagtcccagcagggctcccgtggcactgctgggccactattagaagagacaggccatttcccagagcctggtgtgtcagttgatgctctgaacttaaccttgcagtgctttacaacagagcctcgagggtcctgagcctcaaggccaaagaaagtgtatctttttattggtggtttaaagtgtgtgtggccacttgagagttctagagaaaggaaagcagacacttctcaggctaggccaagggtccgtttcccacccccccccccccgcccagaccccttggcctatgctgttctgggggcttcttgggcagtgagcaggatccagattagtggttcaatgtggatgtgccccctcgttgctaaccccactagcagtggatgcccaggtctcattctctcagaacagggtgggcagatggggctccactagactccaccctaccccaagtctttcatcttctatttcaaacaaacatgaaattacttccacagattaaaggggagacttcctcaatcatcccttacagctttactaatggagtgggcaggcccgcagtcaggaaagggagaagtgtggagcgcagcagctccccctggtgtacacaaacccaagtgcacccagagacagagactcctcccacctcccacggccaaggtgcttggtggttggtctagaaaggcagggcctctctgggagcaaagcccagggtctctatcagacattgacctggggagaaaatgtctaccctagtccctggaagacagcctggttgttttgtttttttttttagttgtgtgttgtttttttcaagacagggtttctttgtgtgagagccctggcttcctggaactcattttgtagcccaggctagcatcaagctcagagagatccacctgcctctgccccttgagtgctgggatcaaaggtgtgtgccatcaccaccctgctacaagcctgtctttatctcctcaggccaacactgggccgctgcatatgtcaagaatatccctgggaaggtggctgggcacagaggtgccaatctgggatgtaaccattcagtggatagcaatagtgaaccttagaagccttcagtgttcacagtgaaaggccacgtaggtaaagagagagtcccagtctcccgtgtcaatactttgcaagatgatgtctttttggggggagttggctgggtaagagtctgagtgatggggacagcttggacctcgtctacctttagacacatggctggcagccacgcctgtttcaagccctttgctgacaactgctcaggcctcttacctgagcgatcctgtaatgtgtctatggccttgtttctcctgtcataccatggaggagggccttaaagaggaggctgaggcattaggcctagagggtgcctctcctccatcgttccccccagacattctgcagaagctcaatacatccacccatcccctggccacaaggattagcgggtgcacttgatgttgaggggcagttgctagggccaagaggcccccctacgtggttgctaggggtctggcatggggtgagaggtctgcccactgccgcggtcacggagggaattacacagtcacaaagaaattgttcttctcagtaatctgttctcggccaccgggcgggggggcggggtacgggtgggggggcaggctggagcccagcaggctgggggctgtgatcatagaggcgtgttagccctgggctgggggccagagaccgagaacaccagggaccagcacactaagctgctttctcagctatttctgtccctggacacaaaggtgtttacttgttttaacatttcctaggactctcctttctccctttgtgtggtctttatccccaataaggtttgagcccgagattacaggcaagaattaaggcactggactcagacagctcagaactgcatgacctgccagatcaaggagtataaagtaaccaagtgtgtgcttctgaggggggccgaccccttcagcaagacccattcattgccccagagggagcaggcagccggcatgcaggtgtgatggaggacggctgccgcattgccccactgaggctttggcttgggactggggggctggggggctgggggaggggtgggccatgttgctatttggaggtccagtggcttgccatatcttccctgagccctcctcttcaggagcacccaggtgccagcacggcccaggtggacacctttcaccggctgccctccttttttcttccagtgggcagctgatcacacatctgggcagtgactttcccccaggggctggggtgctagatgtcatgtatgagtccccctctacactgctgtcctgtggttatgacacctatgttcgctattgggacctccgcacaagtacacggtgagtgtgctgggggtggggggagaggggcctggcatgggtgcaggctctttttagtcttgagtcagcccagggcacagagactccgtgccagcaaggccatatcaaggtcagattccctacccttcggcagctctggtcactgtggccagggagactgaaaaagcagacatttcttagagcctctacaatgggtcctctatcaggtcgtctgccgggaaacacagatgaggatgtgctgcctcggtggcccaaggctccgttaggtttggttgagtaaggcttcacatcacttgagcccattaggggtccctaaccagtctctatccctgagctgggctaggtagagggcgtccaaacctacctgtatcactctctcttcctggacaggaaatgtgtcatggagtgggaggagcctcatgacagtaccttctactgcctacagacagacggcaaccacctgctggccacaggctcctcctactacggtctcgtgcggctgtgggaccgacgccagcgggcttgcctgcatgtaagtgttctgcccagtgtatgcctctgggatggcaagattcattgtgggttgcatctgagagcgggtgacgagcccaaggtgtacctaaagccggctgtcgtcattaagtttcactggtctaaactcctccctagcaagagcaccccatctcccacttgagaggttctcatcactcctgtgtctcccttgcaggccttctcattgacgtcgaccccactcagcagccctgtgtactgcctgcggttcaccactaggcatctctatgctgcgctgtcttacaacctccacgtcttagactttcagaacccatgacagagcagccctgcttagggggctgggcaagtcagctactcagggacctctcctgcctggcaggtgaggggatacctcactcttcttcccagccctgctgagtgagctcctaggtctctggccaccatgccctggcacctgaagcactgagtcctggacgctgggctgactctgacgtgggccctcctgtgctcttaggagaatgtacctgaacttaggtgtttacagtagggtcaggccttctcctgagcccttcccagcactactgcagcctacagagtgaaatgagggctctcaccatcccggacagaaagagatgcagttgctagaacttgtgctggtcccagccacctcctcagtcagatggtaactctggccaacatcttggagctgggctcgtgcctgaggtaccagtctgctttgctttgaaacgaaggaaggacaaagaaagcctgtcagcttggggttccggactagctgttcctcagtcctgctatgggaaacatgctaccattgtaatttttataaaaataaaatttaattgttgacaaatctggttctttggtggttaggtcattctaagtggctccaggaaggcagtgtacagggaaaggacaaaactatggctctgtgtccccaagaacctcctcagggggtagacaaggaactgtcggaggactctaggctgttgagctatggtgacctttcgcctctgtcctaccatacacacacctttgacagtactgtaaccatgttcttttaaccatagtgtcttaacgttctgtgctgtttccaagatagctggatgtttaaacttcccttttgcccacccctgcctcagaggagtttttcctgagtctcttgtataaggcaagccagcacacaggagttccaagatgcccagcctgttcccactctgctcccccgttagctggaaggtccccaggatgggaaggtggggtgggttgtcacaccaccatcttccctaagaaggcagggtatccaggagcgggcaatacacagaagtagagaaaggggcagtcagtccttctagagcaactgcaaatgactttactcaggaacagagccacaggtggaagcaagctgttccccacgagccagttctaggggctctgtagttcttagaagagaagaggctgcccgcgccataaaacccacgccggaagtctcacagtttcctcctcactggaggtgcaaggctcaggacagctactgcgtcttacagtccccagcactgccgtgggccgtctttaccttctttaactccttctgtaactctgactcagccgccatgacctcctttggcttctgatactgtggagggaaccagggagaaaccataactcagttactagattctccctccacactctcactctggctctccaagagcctccttgtatgggaggaaacctaggcgtgccgggtctgaaggacttcctcagctcctgtggctggggaggggaagaccaaggtgacaacttaaggcttgtgattaccaccactgccccacctcgagagctttggggtgtggctctctcttggtctcctcctgcaccccccccccccagatgaataggagatgccggttctctaacaagcacactaagtgtttgggatgcttggatcctgggacgtgggagagggatgagaaacttcttcctgatgccaagtctgggcaaaccttacagagattatcagggtgcagttggcgtgcgcaaagctcaacgcagaatcctctagaggaagctggtgtctgtctaggtcagggatggagaacttcttgtagtacctgtggggacacaagaggctgctgaggaaccagcacagcgaccccgacagtcgggagacactaggccctccacagctctcccccattttctgtaaagctcgagaggaaacagggagagcctgcagaaaggcctggttgagtctgaggttctaaaagaacggtagtggcctcagagccaacggtgagcagaaccaggggcagaggggctccccatgcagggcgggaactcccaactacacaaagagcaccccaagcctcagggggccttctcagagggaaagcacagcacacagagccatctatctccccagggagacgagctatgacgctaaaggaccctggatcccagacctggacccttttcctgccctcagtactccagccttccattttcacatagagtaaaacccaaaccaaccaagcacagatcccaggcttccctggaggaaatgcagcagagtggggtgaggcgctgctgctgctgccctggtcagttgtcagtgctgtaggagtcagggtgaggtggggatgggggaggctggggggaggtcggagatttccccacacacttattagaccagagcctaaggaaaggcccttcctctcaaacagtctcatttggcagtctccttggtggctgtgtgggctgggcactggccaggggctgccggagccttcacttggacaaggggtcccttttttgcagagggagaggctgtgtgggccaaggagggaaatgccttaggcaggtacaacatgcttaagagctgggcccagagagaatggctttcaatacttcagagggtcctggcccttgtggtgacagctacactgagtccacttcaaaagccctgatgccccagggactcagagagttgacatcaatgcagcacttctggcctgtcctccctgcccaaatccctcagttcagaagaggcttgggggggggtctcttcccaggttcccctctccccacaagtgctgggacccaacgcaggaaaagaatgtttacttaaagactgacagttcaaaaggagtgggggcgggggaccctaatggtaccgcaagtttctttcctttccaaagctctgccccagggaaaggcgatccatctgcctgcaacagggtggaatgcctgcttcatcctcttcctagccaacaggctgagcgagggcttttcctggggccctggtctggccagcaaaggtggcagacgctgataatagcagagggtcaaaggttaaacagcagagattaggtgaacacaaaggccgggtaggaagtgttaacatcttcctggcaaatatacacagaaagcagaaccaacagagaagcgccttccacacccactcccaggaggggccaatgaaggagaagcagcccaaggtttgtccccatcccaggcaacctcaggatcccggggacgtcgaccccttccttaacctacccttgccacgagtctgggaagcggaggcagccagtgccagcagcgcaaacactgggtgaggttcaacaactccttaaagtgcagtaccttccgggttcccccatgcacagccaccccacctcacctactcagggtttgctgcaacaataactgaacttgaactgtccccagggcctggatgagaggaacccaccgtgcttctgacacagtcagagtgccttctcggcctgctttgcttgtattccctgtgaccccctcaccggtcccttccctttgcaggctcagtgaacatccctgagggagggctgaggcaagagcggggctgctgaggaaaggtccatgcgcgctgccccacgctcctccagcctgcacaagggcttggcgggtaaccaaagagggcttcagcccgagagctgctgcagccctacttcctgtcccgggcacatggcagccctacttcctgccactcccagagtcataatgtacaggcccacactcaagtgagtctggcggtgtgcaagttatctgaccaccgagtcctggcttctagggctgtcacagcatcatcaccatacagtgagtgcagttagccaggctttcttcagatcccatgctttggcaccttgaccacaggacagggagcacgcaggtatctgatattgtcaaattcctcaaacaatcgttgaggtagtataagcaccgttctcctacgtgagaagctggcctaaataccacagtcacatggcagaggctagatttaagccagcatcttcctagtccagcacactccatctttccccttaacagctgccagcttccaggctgaggtcttatcgggaccagatgtaccacaccagaatcatgtagaaacagttccttccttccccagcccatcctagcaatactgaggcggaggaccaccacaggaccctgaaatcacttctttaaacaagtggctaaccacattctccaggggccaggcagataccagcaaggcagctgcagctttggctgggaactgcatgctggaatactaaaatgagggcacagcgccaggggaaggaaagtgccatggtggggtgtgttacagatgcccaggtgctcagcaaggaggccacattcttctctgcacaggtcatgtggtgccgacttcttacatgcctttctacatctattcatacactgcatgtctgctgtggatgatatgatgaccaggaaagagatttttaaagtattctgaaaaaaaattagaccctgcacatataaaaacactattgtgctttgttgaaagcataggtcacatctggccgcctctctagcttcctatctgatggacctgcagggggcagggctgagcctggttagggctcagaaactcagtctcaaagtgagcactaaaataccattcccctttgtgggaagcccacccctccaggatagcactcccatcctaccttgcctccaccagcatctctgcaatgtccccagtccccgccactgggtgccactgggtgctggaatgccccactagctacagagcccctggccaacagcgccacctacggtatatacggtatatgtgtgcaggagatggggcccagaggatctgctcacagatgaatttttttggtgagctagctagcctttcttgtagcactcgcttgtaatcacatttctgtctgatatctgtattcgacagtgacctctgggggatgaaaaggaggcagcagccagctccacaaagtgctaagccgcagattcaagtgctatcagaagcacttttgttcccagtttggacccagggcctctcccgccagggaatgcttgctgaagcatggagtttgttttcctacaggcaatttctctgttgtctgaaattgctaaattccactttaggcactgactcctgttaatgatgagaacaataacgggaataaacggccttttatcttaggacttcagcgcactttataaacgtaaacccttattattatgactctgtatttatagacaaggtccactacaggggctgctggctgcgtgtacagcaataatcctgaaattaattcattcatctctccctttcccttgtccctttaaccctgccaaaatgacagggtgtggggtgctaagaggaggacaggactcagggctgcgctggaggtgggtggaggttccccaccaccacactccccacttccctgtaggcaggcctcttaggggaacggagactgtacctaccacaccacctgaaggagagtgtggtaaatgatacagtggcccatggggctaggctctgcacccgagcatcaagctggccagtttggcagcttgtggataagaagataaaacagaaacaaaatgaagccccagggtggaggtggccacaccctctttctcgatcaggctgaaacagattcattgccaggctcttccactgtgatgagccagagcggcagaaacaaaatgtgatcccaccccggccatctcctctcaaacctgaccacccactgccttcacccagcagaccacagagagaatctgaaacgccatcgcagagatttcggagagcccaacgtctgcccactttctctcagtctggggagggacgggggtttactacctcattgtctgagacttaaagtctcaaattgccaccaaggcaagcaggtgtaccttccaggacgtgactccctgccaatgcagtgatgtcaccaagccaagctcaccagaccaaggacataacaaccttagagtaaaactaccagagactacaagtaatggctatgtgattactcctcactcgttgttcaacaacagtcttgtgaggcccagcatatgccacctaggaaatcagacactggctgagttctgctgcctcgatggagccgcacagttagctggttactctgagcacccgcctcccagatacggagcagcctgagcgctcactccaatccactcctctccgcacacagtaaacaggcgcccaccaccctactcactttttgtttgtcgttctaacaatgacgcagcgctccttctgggccacagacacactatacacatccttcgggtaggggagatttcgaatccgccactggaaacttgttttggtgtccttgcgcatgaagatgggctatgaaaagcaaatcagcccaggttggccttggactcactgtgtaggaagatgaccttttggctctccagcctccacctccccagtgctgggattataggcttgtggtatgatgcccagcctatcaaggaccattcatggggaaaggtacaaaggcttggctcctccccatccctaaactcctcccagagtcaaacaggaagctcctctgctcttctccatggccccccacctgaagcagctgctgaggctgtgacagacccttcagatgtacacacaaacctactgtggctaggtgggcatagtatatataaggtgaacaaattatagaccctgcccttaggggtcaggagtctcctcccaatccccgtaagaccctggacaaacagacatacattggcattactttctttgatgagctcggatcccaggctcccagctcctgagggcactggctctcccacttcaagctgccactggcccaaggctcccagggcatttttcacacgccacttcctcactgcaaagagaaacatataatggattaaagctcgctgctgccaaagctgacaagacgttggataactggaacgggagaagcccaggctttggtctcaatgccgggccttgtgtatttgagccaggaatcatcacaaacctggggaaatcacatggggcattccagcagcaggtaacttgcaaagtccatttcaaaggcgggcacacaactggaccagggatgaagctccgagagcacccggaagaaggcaaagaggcgataacagccatttctggaaacgggacatctaggtctccagatggaattctagttgtgctttgctgttatttcttgagacacagttgtactagatagccaaggctgttttcaaactattccttgtgtcttggcctcaggtgcttgtatttcagagtgtgcctgcacacctccacaccaacacatccttgcacccacacacccacacaccagcacatccttgaacctgcacacccacctttgggtgcattttcccccctctagaatgccatgcaaagaaaaaaatgaattgagtgaaagctgtttttgcttcatgattcataaagtccaaatcaagacattcacttatttcaggtacatctgccttaaaacaacgaccaacaacaaaaaccctgatagcaccaacgttgtatttaaatgtagtctcaggctggagtgggactcactgacagtttcccaagtactagggctgacctccagcatcgcaatgaacacataaagtcttcggcatacactggattcttagatttgtttatgtttgttttatgtgcttggtctgcatttgtacactacattttaaacggactctaagtgaactgtttttaatataaatgtaaacaagtgaaaagatctgacaaccgtattgctttaccaagaactgcgcatcactctcaggttagcagtaaccgccttgctaacctgcggcctcccaccccaccccacgatatttgtatgtgattacaactctcgctctctgggctccaggagtgtttccatgatctctctccagatcccttcctcatggcttcaaatcctccctccagccgatctgaatctccccctctctctcctttctctccttcgtctggttggcagacatcccaccctattctcccttctgcccagccactgggtggtcagcatttagtgacaaggcagagaatagatggtaagaactgcttacacaaacttgagacaggagattcttggtgtacacatttcaatgctgcgtccagattgaaacaagacatgagggcagagaaatcagtatttaaataacacaaggacaaccttatacacagtgcacaaaaatattagcctacaatgtacggattataaatgtggagttttttgtaaaataataatagatccttacatttataacttgataatgcaaataatgattttcagtttcccaggttttataaggcagatatttgtgaaagggttcttttgttgttgatgatattgtttttagcctctgccctacacccctttaggtttgcttttgatgaaaatcattcagtagcctaggctactgctgatcttacggctatcttcctggcttagcatcatgggtgctcggtttacagacctgtgctaccaggtctagtttttctcgttgtcttttaaaccaaggcacatattttatggaagtcataaatccagacgggagtcctgtcggcagcactgggaatgagccccactgagtgctgtgctggtggctgcagtgtcacctgccagtggcagaggggctctgctgaggagtaacctccgccctccaccctctccctccaccttccacccttccattcctgctctgttaagaagatgggggctgtggagtttgggcgtcctgctgcaagagctgagcagtcagcgctaaactcctgcagcctcctgcagccactctaggagctgagcaactctgaaaggcctggtgggggccacggccgtttccggggtggggcagcatcaggcctgggggcttttcatcagctgggaccactgtgagcacaaaagccgaacacagaagcctcatgtaaacttagaactttcccttgaacgtgggctttttataaggtctgctgcactctgcactgtggttttattacatctcagggccaagattctccctagaaacacatctgcaagtttataatgaaaattaataaggaagagtaaaacttagaaatacgctttctaggcaacttcttacacccacaaatacttccttaagtgaatggactgtgaccaggagtatatgcaaacctagccacggtaatacctcagacaactggaagccagcctctggggtctccgtcacagctacaaacaagtaacagacacctcctagcagcagctcaccatgtcatgatgatgaaacctactccccatgagagcaaggatcaccctggatcctcaagccatgtataaaatgctctgcagcctggggtgcagcttagtggtagagcctgcacctagcatgcatgaggccatgggtttgaccctcagcactcagaaggagaagggccagggaagcccagcagcagctgcatatagaaaaatgaggcgggaaagtacgtcctcccccccgcccccgacacactgacagtagtatcagaggacagctcacagggcaggatacaaccacccatgcaccatttggtgtctttaagatagggtcttactatgtaactctgaaagttctagaacacactgtgtagagaaggcaggctgtgaactcacagattcgcctgcctctgcctcccaagtcctgaggtcaaaggtgtgtgtcaccaccgcctggccctgtgtcaccctggcgacactgaatggcagagcatagtcatcactggcctaaggaggcagtcacttaggacacagctagtctaacggctctatttttatttgtttattgagaagaaggcatttcttcctcacctgcccccttccttcacctctattctccaggggacccggtagaattactgaggaaaaatgagatccaaacgtaacagttaagatccaggtctacagatcacagtgctacacatgcacacttaggctggtaggatggaggttatatgctatcctgggctagataacaaaatcccgtcttaaaatagacaaagatactttgagatcatcctgcctcaacctcctgggtactgggactaaaggtggccctctccatacccagcttctagttctgtatttaaaggccaggtttggttatctgaaggagcaatatgatgaatttttatagacctgggctggaaaagcaagataatcatgggctctgttacactctttgccctggggacatcaccagtatgggccctagaggcgagaaccactgcaggacttcccacctggtcctcctctttaaggacggccaactcagtcttcctcagaaacgcaccctaagaaggggaaagcacagacccgctggctctcttctctctcctttcaatgttcctcgggctgtggcagcttggtgctcttggctctcatttttgtaaaacgccctagggaatcacatctatgtaagaatgtgacacgtttcctttccagcctttcaagcggaaagat

SEQ ID NO: 762 - DNA, 1946 bp, Mus musculus
aggaggaaaggccgagaagctccgggaagcgggatgagggcagcgcagagccggggaaggaggagcggagggtcggggccgggcggcgggaggacgacagcctggagagaggacaggagcagggacctcaggcgtgcggcggcatcccgggaacccggacggccatggcggaggacgcggcggaggatgccgcagcggcggccgtggagccggccacccgtccggccgcggggcccgcgctctggcgcctgccggaggagctgctgctgctcatctgctcctacctcgacacgcgggccctcggccgcctggcccaagtctgccgctggctgcggcgcttcaccagctgcgacctgctctggcgcccgatagcccgggcctcgctcaacaccggcttcacgcggctcggcaccgacctcatggcaggcattccagtaaaggagcgcgtgaaactgtctcagaactggcggctggggcgctgccgagatcggattctgctgaagtggagatatagtcagatgccttggatgcagctacaggatgcttctctgtacctatcgcaggctaatttcatcctggcctaccagttccgcccggatggtgcaagcttgaaccgacggcccttcagagtcttctctgggcacgatgaggacgtctgtcactttgtgctggccaactcccacatcgtcagtgcaggaggagacgggaagatcggtgttcacaagatccacagcaccttcactgtcaagtactcggctcacgagcaggaggtgaactgtgtggactgtaaaggtggcatcattgtgagtggctcccgggacaggacagccaaggtatggcctctggcctcgggccggctggggcagtgcttacacaccatccagaccgaagaccgagtctggtccattgctatcagcccattactcagctcttttgtgactggaacagcttgttgtgggcacttctcacctctgagaatctgggacctcaacagtgggcagctgatcacacatctgggcagtgactttcccccaggggctggggtgctagatgtcatgtatgagtccccctctacactgctgtcctgtggttatgacacctatgttcgctattgggacctccgcacaagtacacggaaatgtgtcatggagtgggaggagcctcatgacagtaccttctactgcctacagacagacggcaaccacctgctggccacaggctcctcctactacggtctcgtgcggctgtgggaccgacgccagcgggcttgcctgcatgccttctcattgacgtcgaccccactcagcagccctgtgtactgcctgcggttcaccactaggcatctctatgctgcgctgtcttacaacctccacgtcttagactttcagaacccatgacagagcagccctgcttagggggctgggcaagtcagctactcagggacctctcctgcctggcaggtgaggggatacctcactcttcttcccagccctgctgagtgagctcctaggtctctggccaccatgccctggcacctgaagcactgagtcctggacgctgggctgactctgacgtgggccctcctgtgctcttaggagaatgtacctgaacttaggtgtttacagtagggtcaggccttctcctgagcccttcccagcactactgcagcctacagagtgaaatgagggctctcaccatcccggacagaaagagatgcagttgctagaacttgtgctggtcccagccacctcctcagtcagatggtaactctggccaacatcttggagctgggctcgtgcctgaggtaccagtctgctttgctttgaaacgaaggaaggacaaagaaagcctgtcagcttggggttccggactagctgttcctcagtcctgctatgggaaacatgctaccattgtaatttttataaaaataaaatttaattgttgac

SEQ ID NO: 763 - protein, 462 aa, Mus musculus
EERPRSSGKRDEGSAEPGKEERRVGAGRREDDSLERGQEQGPQACGGIPGTRTAMAEDAAEDAAAAAVEPAWAAGPALWRLPEELLLLICSYLDTRALGRLAQVCRWLRRFTSCDLLWRPIARASLNTGFTRLGTDLMAGIPVKERVKLSQNWRLGRCRDRILLKWRYSQMPWMQLQDASLYLSQANFILAYQFRPDGASLNRRPFRVFSGHDEDVCHFVLANSHIVSAGGDGKIGVHKIHSTFTVKYSAHEQEVNCVDCKGGIIVSGSRDRTAKVWPLASGRLGQCLHTIQTEDRVWSIAISPLLSSFVTGTACCGHFSPLRIWDLNSGQLITHLGSDFPPGAGVLDVMYESPSTLLSCGYDTYVRYWDLRTSTRKCVMEWEEPHDSTFYCLQTDGNHLLATGSSYYGLVRLWDRRQRACLHAFSLTSTPLSSPVYCLRFTTRHLYAALSYNLHVLDFQNP

SEQ ID NO: 764 - DNA, 104461 bp, Homo sapiens
acaggtgtgagtcaccgagcccggccagagatggagatcttgagagattataaaggtgctgggttgtgccacatatctgctgagcttggtgcagtgtagggaatgcatgagcacctggtcaaaaattcctctctactcattagttgctgcatagcatttacagacccacacccttgccaagagataatttgagctcttagctctgtcttgccagggctgatatcgatgtaattattgtttgattctactataagactgaattcagtttcagctttttaatttgtccatttcacttctcatttatcagcttctattgcagatgtgaagtttagcatttctttgctcactcttttactgggaaactcttctagcggaaagcctgtcatctgttgtgaaggagagctggtgttgacttgaagcaacagagttggtggtccagtggccattgtcctgtgttaggagcaggtggtctcgctaagctccatgtgtttggaaatttctctgaccagtgcttgttctgctaaaggaagaagagctcaagctgcactccttgtttccaggtcaatctactgaacctgggaaaatccccaggggctagcttgaacttcttcctgcttttctcttcatggtggattttaaacataggggattttcctcattcatctatttgtatttcaaacagctgctataagaaaggggaaaaggcacattttatagtacatatttttagaagcagtgacatagtttctcaaaggataacagttaaattttggtccaaagactataattgctctttacttggtgggtgggtgtgtgtgtattttatatatatatatatatacatatgtgtgtgtgtgttgtttttgagtatgtgtgtatacattttttactaaagtaaaaaacaaaaaaattaagatctattcttattccattcacattaaaacttgtgtttatatttaacaacttaacacaatccaccatctgttgaagatactgtatgaatgatactccagaaaagttgtcctgtgtgtttttcacatttttttccacatttttaacaggacttgaaacctaggacaatataaataaatgatatcctgtggtttcattcagtgtaataaatgtctcaaatgaaaaaaatttacttaaactttggcattgttaaatagtagtaataacaatagaatcagaaataagaattttgtatttaacctggcactttcttccagaaaaactaaagatgcttgggagcaaattttttctagaacttaattctcattattttcttggaaaagaactcataaggtcatatttgtacatattctatcttagtggtgactgattatttacttatacttttaaaaagaacctagaatctgaaggcaaggtaagaaatccccagtgatcatgaaaatttcacaaggttttgtggttcccttcatcttcaagtttttttttatcttctatcatctgttaccaaatgactcagtcttctgactggcagagaccagaaaaatcacaaaacctttttttttttttttttttttggagaaggtctgtctcccaggctggagtgcagtggcatgatctcaactcactgcaacctccacctcccaagggtcaagcgattctcctgcctcagcctcctgagtagctggaattacaggcgcctatcaccatgcccagataatttttatatttttagtagagacggggtttcaccatgttggccaggctggtctcaaactcctgacctcaagtgatctgcctgccttggcctcccaaagtgcttggattacaggtgtgagtcaccacgcccggcttagaaaaatcacaaaatctgatgtcacatggcaatggcaatacaagaatttaatcttagatctgaatgctgatggtatgctctatattttattcaaaatctcttggaatgtacactgttgacacaaagaaggccattgcctactaataacagcattactaactggcaaaacccctggagatctgttttttttccccccagaaaaattacattgtatatttctatcctgcccacctgcccacctccttacttactgttcattatagacatatggtccttaacttttgtagacatagctatacatttacataccatatatttaaatgcatacacatatataatttatataaaaattagtgatgggaaatgtctgtttttctcagttataaaattaggacagtgtcttggaatgatgttatgtgaccctttggaaaacatcttacagctgttgtccaggctggagcatagtggcgggatcatagctcatgtaacctccaactcctgggctccagtaatcctccagcctcagcctcctgagtagctgggattacaggtgcccactaccacacctggctaatttttgtattttttgtagagatggggtttcaccatgttggccagggtggttttgaactcctgacctcaagtgatatgccctcctcagccccacaacgtgctgggattacaggtatgagccaccacgcccattctaagatgaaactttaaaaaacttttttagaacagttttagatttacagaaatattgtgaagatagtagagcgtttccatagacccctattatcacattttacaatattatgattgttattattaacaaaccgatccaatttccttagtttttatctaatgtcctttttcttttctgttccaggatcccatccagaatacattacctttagtcatcatgtctcctgtggctcttcttggctgtgacagtttctcagctttcccagttttaatgaacttgccattttcatcagattgtaccaagacctactatcaatatgacttatgactagtggtgctgaccttgatcacctggctgaggtagttcttgtcaggcttctccactgtcgagttgctctccccatcccccttttccatattgtactctttgaaagaaagtcactatatgcagcccttccttaaaaatattaaaatgaactagcttaattaagttctttcttacatttaggtgtaaatacctctgaggtttttttcttttaaaaaatgattatctatgtaatacatactcactgcacaagactttaaaaatgcaagaaaagtataaagcagcagcaaatagaactacccataattccatctgtcacaagcaaccatttctagctttttgtcatatttccttccagttttttttcttctgcataaaataactatttttatttctatttatttatttttttgagacagagtttcactctgtcaccaggctggagtgccgtggcacaatctcggttctctacaacctccacctcccaggttcaagggattctcctgcctcagcctcctgagtagctgggactacaggcgtgcaccaccatgcccagctaatttttgtatttttagtagagacggggtttcaccatgttggccaggatggtcttgatctcttgaccttgtgatccacccgcctcggcctcccaaagtgctgggattacaggcatgagccatcgcgcctggccaaaataactatttttaaatagcacttgcttgaaattatttcataggtggtaaaaatattttatctttgaatatggcaaagaagatggattcatataaaaccagagcagatcttggtggtacttcaagatataaactaccaacccaatagataatttctgaaaataacattttagagtctcttcctctatttttgagaagcttgaatatttacaaatacagcattcactgtgagacttcttgtttcttttcctttctaagacttttaacttgttgtttattttactattacatgaaacacattttattttaatttttaaagttttagtgttttttgagacaaggtctcattctgttgcccagtttggagtgcagtggcatgaacatggctcactgcagcctcaactttttgggctcaagtaatcctctagcttcagcttcacgagtagctgggactacaggtatacaccaccacacctacctaatttattcttacagtttttagagacgggggtctcgctgtgttgcccaggctggtcttgaactcctgggctcaagcaatcttcctgcctcagcctcccaaagtgctgggattacagggatgagtcaccatacccagccttatttaaataaggtttgaggaaacttgggtagctggttaaaactctggcaatgatctaggtttcaaatcatcaaattcctttttgcatggtgtatagactcatgacaactcttatttttttaaagactttattttgtacatgcttcttattaaaaaattaatacagaaaagtacaaagtaaaatcccaaaattctatcacctaaaaaaaccattattaacattattccacaaaccttccctttgcatatatacacagagagataaatttacacaaaaggctcacacataccatacatagttactaaatgaggatgaagcaaaatgaagaaattgaagaaaatgaagctgaaacaaaatgaaggaattaccaaattttagctaaatgttcttttgcaagacactttagttcctaacaatccctttgaagttttgaaaaaagattatgaaaagcattaagagtttgaaagtctacataattaactttttttttttttttttttttgagacagggtcttgctctgttgcccatgctggagtgccttggtgtgatcatggctcactgcagccttgacctcccaggctcaactggtcctcccacttcagcctccgaagtagctgggaccacagatgtgtgtcaccaagcccggctaattttttaaaattattttgtagagacaggatcttccagtgttgcccaggctggtcttgaactcctggaggctggtcttgaactcctgggctcaaaaacaatcctcctacctcaggcttccaaagtgccaggattacaggtgtgagccaccgtggctggctggaaaactcttctaatagtggctggcatgtagtaagtgcttatagtaaatgtaagccaatgctattatagaggaataatggtgagcatctgggcccacgtatgatattgaaatctgtcactcacaaaataatctctttgtctctcattcatctcagaataattttcctgttaaatctaccagctcctgaggggccctgagggtataaccaatgagtatgtgggcaccaatgtaatgaatgtgtgaataggtgattctgtcatctgtttataagaatgaccagaatacaaaattctagcctttttacaatcctaaacatatactatgtgctaccaataacagcaacaatcaccatcatgcatgtcacttacatgtacacactaacataaagaactttatatctctgctttaaaatcctctttaaaagtaaactattagcctgggtaacatggtgagaccttgtcaatgaaataaaaaaattagccaggcacctgtaggcccagctgctctggggctgaaatgggaggattgcttgagcccaggaggtcaaggctgcagtgagccaagatcatgctactgcactccagcctaggtgacagagtgagacgctgtctaaaaaaaaaaaaaaggtaaattaatgttagtgtttctaaatacccacaaaattatgaaatttatattatgtcttaagtttttttttttgtttgttcgtctttgagatggaatctcgctctgtcactcaggctgatgtgaagtggtgcaatctcagctcactgcaacctccgcctcctaggtttaaatgattctctggcctcagcctccttagtagctgggactacaggtgtgcggcaccacgcctggctaattttgtacttttagtagagacagggtttcaccatgttggccaggcagacaagcctgacctcaggtgatctgcctgcctcggtctcccaaagtgctgggattacaggcatgagccaccacacccagccaatattgtgtccactgttttcagtttattaatctataaattaattttttaaataaaaaagctttatgaaaacaaaggtagatttcacctccctgccttatttcatgatgattcctgaatctgaacttcaagggagttgatgacttttacttaaagatgttctgggccgggcggggtggttcatgcctgtaatcccagcactttcagaggccaaggcgggtggatggtctgagattggtagttcaagaccagcctggccagcatggtgaaacctcgtctgtactaaaaatacaaaaattagctggtcgtggtggcaggtgcctgtaatcccagctacacaggaagctgaggcaggagaatcacttgaacccaggaggcggaggtttcagtgagccgagatctcgccattgcactacagcctgggcaacagagtgagactctgcctcaaaaaaaaaaagatggtcaagtccaccaaagtctttctaccttcctcttttctgagtattaatatatttattttctttgatagaaaaatgctattcaggtccttcatgaagacatgcatttacttttattacaaactcatcttttcagccacatcttttcagttgcttttttatttttgacactctatcccaaaaaagaattttaaaagtaaattttatgatacaatttttaagtttggttacatcccaaattggatttttctttgttggcagggaaagggagagttgatgaaaaattctagctgcttctctgagctaaggctaaaggttttcttctttgttgttttctttatcacatgtttggtaatttagggacacacatcaccaccaaataacagattatatgccaattttccattttggctttgctttttttcctgcatagtgagtatgttgacttttttggaaatcattacattacaaattctaggctaagagtttacctgatctctagtttgaatgtgaaagaggatgatttgatgttttttttttttttttctctcacccaggctggagtgcagtagcgcgatctcggttcactgcaagctccgcctcccgagttcaagcaattctccttcctcagccttcccagtagctggcgcctgtcgccacgcccggctaatttttttgtattttttagtagagacgggttttcacagtgttgtccaggctggttttgaactcctgagctcaggcaatctgcccgcctcggcctcccaaagtgctaggattacaggcgtgagccaccgcgcccggccgctttaatgatgcgcccggccgctttaatgatgaccgctaaatgatgctttaatttctccattaatgagggccgggggcagtggctcactcctgtaatcccagcactttgggaggctgaggcgggcggatcacgaggtcaggagatcgagaccatcctggctaacatggtgaaaccccgtctctactaaaaatacaaaaaattagctgggcgtggtggcgggtgcctgtagtcccagctactcgggaggctgaggcaggagaatggcgtgaacccggaaggcggagcttgcagtgagccgagatcgcgccactgcactccagcctgggcaacagagtgagacttcgtctcaaaaaaaaaaaaaaaaagaaaaaggccgggcaaggtggctcatgcctgtaatcccagcactttgggaggccgagacaggcggatcacgaggtcaggagatcgaggccatcctggctaacactgtgaaaccccgtctttactaaaaatacaaaacaattagccgggcatagtggcgggcgcctgtagtcccagctactcgggaggctgaggcaggagaatggcgtgaacccgggtggtggagcttgcagtgagccgagattgcgccactgcactccagcctgggcgacagagccagactctgtctcaaaaaaaaattctccattaatgaaaataaagtaaattacacttgcatgattatggattttaatcctgatttatgttgggttaaagaagttttagtgcctccactaaaaatgagatagaatatagatgaactactcagctttactatgtatcctgaatgagttaagtactcaaacagtaagaaattacaaacatctctaacacaaatctaaacacaaaatgcaggaaccatattcctgctatatcatttgtcttccttcttgattcgctcatagtacacaaatgtagcaaaatcaataaatattgaactcatgacatcacctaaatgtgaagtattcctgccttagtagtcttctaacagtatggtacctgtgaataagtaaatttctttataatgatctctaaaacatggcttaaattctttggccgcattgaaatctataaaatagtgctttcaataaaccactgccttgagtttggaaatcgttttctacacaaagtctttgttgcatttggagagggggagggatggcatttttttgtaacaggatttgacctgtaactattattaagaattttcttagaggagttcaaagcattttacagggatcatctcatttatccctcgaaagtaaggcagaggcattatctccactacagattgagaacactaaaaggccaagataggtggggctttttgttgttgttttgctaagatcaaaaagtaattctagggcaaagccagattccggtctgaccttgttacatgatgcttcttgcagcaccataatacaatgtagttgcttccctaggtttctctttggctatgctaggtgttgaataattttcagggtcaatttttattcttccctgctccctgaaaatgagtgttaagatgtagataagtacaaaagaaaactctccaatccttcctacctggatttggagtacaggataaacagacagaaattggcatcttcctcccctcctccaagttttactgcctagcccaatgctaatagaaaaataacccgagccacaaatgcaagtcccatgtataattttaaattttctaatagttacattaaaatatattgtatttagcccaatacagcgtatccaaaatattaacacttcaacacgtaatcaatataaaattattaatgagatattttgcattcttttttttgtatggcttcaaaatctggtgtgcatttctcacttatagctcatttcaatttgtattagccacatttcaaatgctcagcagccacatgtgacgagggaggacactgttggacagcacaggtctagacctcagtagctctcccttcagattaatgccatgtgaatcgaatgggtggtatgaagaatggatgctgagtccttggagaatccacttgcacttgggtggtgactgataagaagccctagctgtgccatttcctgatacatgactgtttttgaagttatggactcaggatctagaagactgcaaatccccaaatacgtctaacacccaagctcacgccaggaccgtgcttccgggcctgtgtgagaacctaagctatggaacctgtcaacttctagggctgcagattcgttgggccctcacatgtggcccgtggaaaggaggcatcactcgaggaagaggagggcttctagaggggcaaggccacccaactaggggcttcttgagggcaggtgctccaaatggccgcttcctgagggcagcgggtcctcttgtggcctcaggcagggccctgaaaccggcctcacgtgtttgcagcgcgaactcctgtgcttccaccaagcgctctcggggatgcgggggtggtgtcagcgccccggccccagcccgcaccccgaagtggctccaaggctgcaggtgtgaggggcgtgcccagggctcggcccgcgccgccccatgtgacccggtccgacatggtgtcgcctcctcccggggcggcggcggtggcggctcgggctgggctccgcgtcgggccggccccgcggccgctcatgggcagccagggccgctcggggccccccgggaacggcgggcccggcgagggcgagggcggagaggcgaggaagctgcaggaagggagggtggcgagggggaagcgaaggaaggggaaggggaagggaaaagcgagagcggggcaaggcggaagaggaagcggggcggaagggaagcccgggccgcagacggcgaaggaggcagccgggccgggggctgacgcgggagcgagggcatgcccaagggaggaagcagagggaggcagaagcgtggaggaaggggcgagaggcatcgtcaagggagtcgaggggagcgcaggggccgggaaggaggcacaaggaagagagtatgggaagaaggaggaatggagggtcagggctaggcggcgggagggcgccaggccgggaagagcacagggacgagggggtcaggcttgggccgacatcgcggggacaggggtggccatggcggcggcggccggggaggaggaggaggaggaggaggcggctcgggagtcggctgcccgcccggccgcggggcctgcgctctggcgcctgccggaggagctgctgctgctcatctgctcctacctggacatgcgggccctcggccgcctggcccaggtgtgccgctggctgcggcgcttcaccagctgcgatctgctctggcgccggatagcccgggcctcgctcaactccggcttcacgcggctcggcaccgacctgtaagcgtccgctcgcccgcccgctccccgccccgagccggccccgcgtcccgggaaagggcggggcgccgcggcctggtcggcccagggtcgtgtcgcaccccgagtttctaggcctacacctgacctccgcctacaccctttcccgagcactctcggggacccctttgcccctcctccccaaggcctccatctgaggcagcctcccgagagcatccctcagtaggcaccctcccgggtgggccgctcctcacaattagccatcttaggcactccctacagctttcgattgtgtgtttttgcagaggtttagctgccccggttccttcgccccagaggagccagtctggtacggtgctttggacgattccttgagtccaggtctaggactcaggttccttaagtggtctatcataaatttttgtggactttcatctttcatcctccctacccttttctaaaggttgttaagcttcagggctcggaccttaagagaagccctcggtcccagtgttcagccatagtttatgacttcatataggcagagcgacacgaaaaagggggcctgcttgaggcaggaggctggagtctgtccaggatgtgtacaagacatggtattgcaatttggcctgtttttggtagggtctgagacctgtgaatgaaaaacttttctgaaccacttaaactgttaaataggaaggaaaaaacatgtagggaattgggggaataagagctttcagattgccccctattccacccattttttaaaaagtagttctttctagtacattatgacaacattaaataacgtttttaaaaacataaaaagccataataccatcacctctagacaattattttcatttaaaaaccttttcagttgcacatataattgctatcttactgatcctaacagaataggtacatagtaaatgtttgtgggctgtcgcataatgagattaaagaacatccctctactattaaacttacatgtagtgttcagctttttgttattatagataataatgaaataatgcatttttgagtaacagctttactgaaatataagtcacatgtcattaccatacatattttttaaaaatcagttccttaggataaagtctcaaggtggcattatagcaaaggttatggtttgcagaggtgctgtaccaaattatagtgggaccagcacagagtgaacaaattttatgtgagaatttagaaaatctttgccactttagtggtcatttaaggtaccaaagttgtgttattttgcatctcttttaccactggctgggataaatatattcccatgtgtttgtttcacctgggagactgtctcttcccactctttgcccatttattactggggtcttcttgtttttcctataaatttggaatctttgtgggtcttagatgttagaatctagtctgtcatctttgatccagatatttttcccagtcaattcattttactttactgttttacactgtattaggctctgccagtcttttgtgatttttttctctttttctccccaaagctgagaaatttataattcctccacagacctgataaatctgtttcccactggttttcttacaaatttgatttttttttttttttttttttttgagacggagtttcactcttgttgcccgggctggagtgcagtggtgtgcactcggctcaccacctcctgggttcaagcggttctcctgcctcagcctcttgcgtagctgggattacaggcatgcaccaccacacccagctaattttgtatttttggtagagatagggtttctccatcttggtcaggttggtctcgaactgccgacctcaggttatctgcccacctcggcctcccaaagtgctgggattacaggcatgagccatggcgcctggcctaatttaattttttaatagttaacactttcatcaatatcacttttggtgcaagaggtgaattcaacttactattgttgtctacaactttgttaagtaattctcttttcctttgttttggacagcttattttgccatataataagtttatatatatattatatataatatacacatgtatatacacatagacatatatgtgtgtatattggatctatatctgaactcttcattgtgtgtcactgatacagttttccatttccatactattttaaatattgttactttttgatagagtctagtaatctgtcagggtaagattatcctgttggatttatgtgtgtgtgtcacttctacacttctgttcaactctctgtcaaaaaaaaaaattctgtactttttcaaggacttttgtggttttcatgataaagttcttacatatctgttgttgcacttactcctatgtatttccgaaaatgttatgcatttcgtttttattgcaaatacactctcttcagtatgttttctggctgggtattactgaatgtagaagattactctactcttgtaaattttgaatttgatggttttttattctaggatgattgtattcatgataatggttccttgggacttcttgggcatgcagtcttgtcacctgcagaaatagttttttattctcttcctttctcatgagaataactctttcaaagaatattatcagttaacctataagagaagtctaaagtgactgtaacccaagctagctaaggcaaagtttggctttctctctcttcatatagagattgagtgaatgaatgaaagaattgatgtttattttcaaatgctctaaaagagagatattgggaatgaatctacattctgtagcaataataacaacaaaaaaaaagaaagtgaatttatggtgtaaaatgctttgagattgccaaatgatatggctttattatttattagacatgtgtgttttgatttctcgcccatgtcctagggtaaggtgtcctggccttctagggaagttattttgccatagcacttgataaagagcagggtcactgctcgggttttctggattgagggaagaagttatgcgtgttacagcaggtggagagaatgtttaccagtgtggtccgtttctggacagctgcagagacttaataagccactgagagaggtggttgtcatccctggagggagaaggcatgcaccccagtccacttagggagtcagcgaacccgggcccaaagtacagcaagagtatggctgcttggatagtggcagggctgtcgttcattgctttgggctaattaactgcagactagataagtgagatgagtttttatcagcattacacaaaacttgatttgaccagaagccacataacctcactggccctaggttttattacctataaagaatgggaataaccttgcctggtaaaatgaggcttaagtgtagaatgctggctagtacagcattaagcacatagtaagcacacaataaattgtaaaacggaactttttaattgtttgggttctcctctagttagtctgtatatagcaaaagtggggatggtttgacttagaggtgctgactaaagacaaagggaagaacacgcacacacacgcactgtgcttcgtttctctcacctgtcctgaatgtttttggaaacatgacagcagaacctgtggacttatggcctgcactccgggacgaagagcctcttgattctcagaaacacaaactgctaaggtttactgaccttccggcccagggcaagtcccattcagtttggctgttcctaactgatcatagctttgttgagtaagatgaactgctttggttccttgtgatttgctaatggtcttatacttgtgcttgaaggcattctggccactttaaaaccacaaacaaataatttgcttccctttaggcctcttgcccgaacagtgaacactaatagatatcctaagcttacttttcttttttttttaaagggacacaaagatagttggagtcagtcatctgatttaaaatcagttttgtttggagattttatgaagcctgttggaatagaaatatcctgaatataacaataaaaatcaaagaaatgtttcatatagcagtctttcaaattttccctaaagagtaagaggacaaactaacctagttccgtttacaagaacaagacagtggaattcagctgtcacttgataatgtagactgaatgcaagaagtagacattatgacaggggaagaacaggagcgctatctgcaaattctgatactgaaaattaacaaacgcaaataatggaaagaaaaagtacatctgtgcatgtaaagctatttttaaaagattctattgccagtcttatgttaaagaaagcttacttgatcctcttcctcccgaattaagtgctacatattctcaaataggaattttattttaaatagcctttgagcagtacctgggtgctgtcttgcatttgcctatgatagatttgcctggaattaacaataggtgtttagggagtgaggctcctgaggtgtttgtcctggcatgtacattcattcctgtggaggggtcctgtagccttggagctctttgaggctgggggcctggggtatctatttcagtgatgattaacgtccagagtggtgagatagacacagataagcagagtgtgtttatttgttttaaaatgattgtgcctaagagcattttcttgacccagaaagcatatagtttcctaaccagtttcctaaccctgaatggagatggtattgctaactggttacatttaaggcctaaactgtgatcttcagaaaacaattaacaactcaaagtagcttaggctttctccagttttctgccttacccagggaggacagtcacttatttgttctgtaattcacggaatgatttcgaatatggatgtatttattgtcttcggcgtttggaaaggccttatttttaatggtttctatgagttaataaaatagagtttagtttacaggttcaaaataaaacagtacacctgtggaagcaggacatggtctagtgcaatcactacctccaaatgcgaactggaagaatggaagaagccttctctaagaccatgagaatacagaagctgtttatatcctttccagtcttgtaaaacttgaatggtaggggctgaattttctagctttcaaggcagaaacatggagaaacccaatgtcttcacagtctgtgagatgagcaatctgtagtatgagttcatactggaatgagagctctgaaaatatttcggtactccatactttcatttttttttttttgcacctggaaccttcatctaaggtaaagattgtgcttgagctgctgaaatccccaactgacagtgaggtcactgaggaagtatacaggttttttaaaaaattatttttgaatgtgtgacttagaaaagaattacgtgtgtgtgacaacttaaccttagctctgggttgaccctggcactggattagtttctggtcctgacttgtaaccatggaactgggagaaatttaggcagattcttattgagaccaggctccaaaaatatttgaaaattaagatgagatcaactgtttgaaaaaaagaggagaaaattgggttttgaattttcagtgaaaattggcagactcccttctttgatctgcagaaactgacttttgctaagcttcagaatttacctcaggtgtgtcaaccatgagtcaaggttgagaatccaaagatttggtttacccttgaggaaagtccttcctattcagtagtcttgctcagatggaactccaattgtaatcaattgaatcaaaatggttatggtaattaagaatatgtttatgtaccctgaatcatgtaaatatttgagctttctctaaaaatgagtatgagactatctggagaaagaatttatctcctgttagaggtttggctgccttgtctcaattttgagtcagttcttcattttatccaaactgtccacattgccctccctggaagtctgggccacccaatgggcccctgtgcctgccgcccctctttagcccacaattaattgccagcacattctttcttcttcctcttcttttttggtatttgacatgagctcaaattgctgagaaaggtgacaactgtgaaatgaagacagggcttggagacaccttaaaaaatacatgcaaaggccactaaatgacaagagcagactgccaggctctttcaaaacatcaccacgtctgttgactttccattccttgtccacagcacaaaattggaggtcaaagaatcataggagttagagatggaaaagacatttggggtcagccagttcattcctccgccttctcctgcccctgatttcaaatcattccttacattatattttctcccccagctcttgtacagttttcacggtcttcactcaaccctggctgtcacctttggggaatgatgctggaggttgtctccagtttctcctcagcaaagagagatattgcctgtgcccccagttgacattcatggacttctttgttggtggtctcagctgagaggctgaaggataactggatgcttctctgttgcctggtgatggggtgtttttagacagaattgaagagcatttagtgtatgatgatattgggcaagggatattgggcaagggctggggtgtagggtagccattgatgaatttgttcctagacttttgttgttcaagtctcttgacctggagggggattcgtatttgtatgaagtgtgtggtattgggacaggtgggcagggatgggaaattatagtgaataggagtttgataggaaccctaacttggagattggtagattaaacaaataagaaatactggtcttgtgaggtggtagaggattgttttaatagttacatgttaggggagaaatagagtggtggttactgtacagaagcttcagtttggagtcatattgaggagaacagatgggccggaagcaagtattttggattagggtacgctgttgattttgtggtctccccttgctttaagaaagtagagaaagagaagtcttatgctcactggctgtgtgggttggaagggggaatggtcatttttagaggcagctttggagggatacccccagctctcctgtctttttccagcagctgttgggagcagtccgaagggggtattatatttcttctggtaactctgccaagaatgagaggaaatccacaatctgtgggttttgtaggggggatgaggatggggtggcaggtgatgggacagggaaattaaattgttttatagtaaatatgttgagatacttttcctggaaagctgtttcactgaaaggaatgatatttcccctgctcactaaccctgtaatgagttcattctccttaaagaaaaggaaatagtctttgagtacttcttttccttttttccctgtagttccagctttgacctcccatgtttctttgagttttcctttagaaagtctacatcaaaaagttgaatcaaggttcagatatgggtggtatgtgtgtttgtcccctccagaagtgagttgctaagggagaacttcatcccttatcttggatgcagtttgactttatcataatggcctagaagctggagatgtaaaaacttgctgggtgacgtctggttcatattctcctcatcccttcattcaggctggaaggtcaccagggattttgaagtctggtcacttgggttgagaacctgttttgatgattaatatagaacacagtttcatgattaaaaacaataaaaaacaaccctgggaagcagagcagtgtaattatttctcacatttcagatgaggagtctagggaaaagtcattttgaaggtatgagaacaaagtctacctcttagtctgctagtgcctaattcatgactcacttagaggaaggcctgttcaccgctccctgccccccaaaaatccgcatctttcttgccattgttcatttttagaaagtactagatcagcctttccaaaagttgtattgtgggattcttgaaaaactaattctgtaatcaaatgagtggggaaaatgctgtgcgccacattccctctcttggggatcacaatgtccattggggattaaaggcactgacaagtcctgtgatagagggacctgtttacttttgtttcagccagcatcatgcaaaatgttttgaccataaaattctttttttcactgctaaatatctctttaacatcttgcagaacacacatactggtcaagtgccgtgcaaatacagaacctaaccaatgccaggaggaaaaggatgtgaacacagccaagttctgaatcttaagctcatgcacataaaggacccagggttatgcttagtgcttctgaaactgtttagacatttttgacatgtgggtgccatgttaagatactttatctgctcagatttcttcccttgagcctctctagaataagaatttagaggctttggttgaattcttgaagatgtggtatgttacacattttaaggaagggcctttggagctacgggtgttgttcaaagtgtgacttgccaaagggaggaccatgtttttggaaactcttgcttgagcagttcctaagcaatgtctatcaaaatacctattatgctaggaccatggttctcactttttgtgttaaagacatagttttgtataatgttagaatttttgatagtacattaaagaattaaaggtaaatgtcatttatttttaaaaaagcaagtttcagaaaattgaagaacctgttcgtgattatttacactattgttcaccctctggtgtgttactgtttgaacagtattgtttgcagccctgaccttgttctcttatatcctttgaggtaaagttcatatatgttcctctgaacatgcaatctttattttattttcagcaaattgtatcatgggcaatattttggcttagtgtctgataggaatccctgtaaaattgtggattgttagttgaacaaaaataaattctatatattgtttaaaatttgatggtgcacttattcagggttactgctataccacttgtctgcacagtgatggttgagagccacttttagaagcacaaagttgtttaagacttgatcctgtggaatttatgactaaattagccaaaaaagatgatgtatagctgtgaaaagctagcaatgcctaggtgtatggtaggttccatctaacagttcagatggcatgtttggaagagtcacagaagtagaggctttatctagattttaaagaatggatgaatttgactagtccccagaagtagcagtcaggggcaaaggtaggctggggctggcagtataggtgaaagtgtgggtatatgaatgaacgtggaagagattggcttggtgggagtccagttgcatagtgtgaagcatgaaaagtgagttgaatgggtaaagtgggttgacagctgggggtctttcaagggagctgtgggtcagttcagtcagctccatgccctctttgtgcatggtcttgtcctcatgctggcatgtttcctacagtttcccttcactctgaattttggggctattctctgttccttggccaaaaggataagcaatttaacatgatataaagattttttattaattttgtttgaaccttaattataaacctctgctactgaagctattggaagattcaggctaatgcaagtataaatgaaaagttagaaggttcttatctttggctgcttaaatactttacactaaagccaagttcttagcattgatagaagaactggtgagaacaggcaatctggggaaaaatctggagagaaagaagataagagaaatcaagagatagtgttaatataaaattccaagccccaaggcctggtgctgtggctcacaccagcactttgggaggccgaggcaggtggatcatttgaggtcagaagttcaagaccagcctggccaacatggtgaaaccccatctctattaaacatacaaaaattagctgggtaggccaggcgcagtggctcacgcctgtaatcccagcactttgggaggctaaggcgggtggatcacaaggtcaggagatcgagactatcctggctaacatggtgaaactctgtctctactaaaattacaaaaataaagtagccgggcatggtggcgggcgcctgtagtcccagctccttgggaggctgaggcaggagaatggcgtgaacctgggaggcggaggttgcagtgagccgagattgtgccattgcactccagcctgggcaacagagcaagactccatctaaaataaaaaattagctgggtaggagtggcatgtgcctgtaatcccagctacttgggaggctgaggcaggagaatcacttgagtctgggaggtggaggttgcgttgagcccagattgtgctactgcactccagtctgggtgacacagtgagaccctgtctcaaaaaaattaattaattaaaataaaataaaattccaagccccaagcattttgtgtaaccctgttttcccctccttggcctggtgccccttgacatggccttgttgtacacttggagacactttcctttcctgagtttccttccaaatcagcaggatgttatgcttatggaaatcatgccatccgtgcagttggtcagcattggtggcttccaggggaatcaagctgtgagatgggacagagagggaaattgatctgtgttccaggagttttctgatctcagagattatgttgtttaagacctcttcgatatacctacacttccccttccttccccccagccagttttcttcagactaggtttatttatttgcttttggttttggggtgtgagcaaggagaggggaaatgaaaggtcattctagataactgcctagattaatttctgtccctctggactcacttgccaagatttgaaggggccagatagcttactgtgggtgcatgttgtgttgtttttgtttaaaataggtcatatgcccaggaatgcaaactctaatggttactaagtgccggaaagctgagagagaaggggcctagtggaaaaatgagcctgaggcaagagaaggagggctgggaaaatggcagttcagccaggcccacggggccaggtcctctgtgcattaacatccacggagagatttatttacagggcactaatcatttttttgagaggagcaccctcactttacattagtaaccatatggagaaatggctggccagaggcctcttcaaggatgggagcaagggtccctggtgaattccaaggggtacctgctcctgtcttctcaggtacttttcttctgctgccttgttctcctgaccccctttgactggcagtgacacgttcccacagggatggagggatacctgttttcagagaaaggagatatattaaaaatttctttggatttttcaggtgctgaagccaataaaaatatagatatgatttggccaacagctagggaaactgtaaccatccaagatggttagacaaaagatatgaaaaagctgagttgttaaattgtttttaacaaagtagagctttttcaagtcaaagccaaattgaactttttttttttttcaaagtctaaatttgaaggactacagccaagtgttttgattatgatattcttcttgggagaggatgcctgcacctgctgtttggtagcagcttctaaagttcaactttgaaagtttcttggtgctatgatcaaaccctcaggggagtattttgacccctagtaaagtgtcacatggcagttaagtgaccagggaggtgagagaagtgctgtctttattccaattcaggaaatatatccattcttttactttcgttttcttcctgctatgatccagagtactccctttttagtttcatcaccactcattaattttagacctaattcaagagaagagatataactgtaaacagtttcttcctttatatctgggagggatttgcagatacgaggagcagacagggaagtctattttttttttcatttagatttcagttcctttggcccatcctgttaagtatcttttactgtcctcagcagtagtctggtagtgtaggtggctctatagtgatttaaaaccagggactacattcacccaacagaataattcagtaaaagattttagccttaacatgtgtatagccaagtcctaattgttcagcctgaaaaataacaaatgtttgatattggaggaacaatttctaatagttataactaaactaattagaagaaaaacgaatgattattagagtcacattagtgacaacaccattaatggatattatctactacctatacttatgtaaagataattaactttttttgtagtgatttataacatgtattgtacttcgttttaggtgtcattttaaaaaacaattgtgtgaaatattatccttattttataggtgaagaaatggataattggagaagttagttacctgggttgtataattagtaagcggtagaattgggatatagatcccagtttcctaagtctgccttctgtgctttttcagttttatttaatctgctctttagttaaaggtaaataggaagacataactgtcaacaattatgtgatatattttcaacaattgatcacttaataaagcaccatctattaacatctttagacctgttattattattattattattattattattattattattattttgagacggagtctcgctctgtcgcccaggctggagtgcagtggcgcgatctcagctcactgcaagcgctgcctcccgggttcatgccattctcctacctcagccttccgagtagctgggactacaggcgcccgccaccacgcctggctaattttttgtatttttagtagagacggggtttcactgcgttagccaggatggtctctgtctcctgacctcgtgatccgcctgcctcggcctcccaaagtgctgggattacaggcgtgagccaccgcgcccagcctagacctgttagtattattattattattattattattttttttttttgagacggagtttcgctcttgtcgcccaggctggagtgcaatggtgtaatctcggctcactgcaacctccacctgtcaggttcaagcaattctcttgccttagcctcccgagtagctgggattgcagacgcccactacaacgcctggctaatttttgtatttttagtagagacagggtttcaccatgttggccaggctggtctcaaactcctgacctcaggtggtccaccctccttggcctcccaaagtgctgggatcacagttgtgagccaccaagcccagcctagacctgttatttatggagacataattttatgtagtgtctccccacctctacctttataaatttaacttagttttaaaaataccattacttgctatagttgttgccaaaatgttttgcaatcctcacatttgtcatttctagtggcagtatattccattgcattagtatactattctcctccacagacagaccttcgggctatttccagattttagctctaatatatagctgcagctataaatatctttgtaaaaattttttcttttgaattatttcttcatgatacagtgctcaaagtagaaatgctagatcataagctgtcatttaatgacttttgtcttaacagaattcctttctgaaagactgtacctgctgaatgtgctataagcaacatgtaaccaaatccacactcttatatcaaattaaagctagtgtcagttttttctacttaatagatgtgaggtgtactttaaaaattgttttaatgtacatgcctgtaaactattcttgggggatgtttcctccaatgttttatattgtgaacactgtgactgtccttatcctctgttggacatggatgatatggtattggagacagggtgttatcttgatagatttttatcagctccctaaaagttttagagagaaaacttatatctacagtgttagttaaaatttttcccctactctgttgcttttaatcttttttcccttcctgtagcatttcaaatttaatagcattaaactcaaatactttataattgatacatttctattgcttcaatagaataatttctattatccccatttcaattgggaaattatctctgctcttcattgaaatatgtatatattttgttttcttctagttaaacttttaaattcaccctcatatttttggaatttattatattgtggtatgagatggcaatctaaatcagtttttttctctattgatattcaacaagttttatcaacagcatttattattactattttaatcagtatttgaatattactcagccataaaaaggaatgaaataatgacttttgtgcaacttggatggaattggaggccattatcctaaatgaagtaatgcaggagtgaaaaccaaatactacatgttctcacttataagtgggagctaaggcatgggtacacacaggcgtacagagtggtgtaatggacattggagattcagaagggaggaaggtgggggggtaagtgatagaaaaattacctactgggtacagtgtacgctattcaggtgactggcatactaaaagtccagacttcatcattgtacaattcatccatgtaaccaaaaaccatttgtacccctaaagctattgaaagtaaaaaaattttaaaaaggaaaaagaaaaattagaaaatatgtaaaagcataaaggagaaaataaaaacacccaaagttgactatccacagttaactatgggtgttttattttatccttccagtgttctttctagccatgcatattcttattccctctctcctttccttctcatgaagtcaacttgctatacaaacccaatagcactaattaaagtgatttatttccttagtttacaattttctgtttgttatatattaaattcatatcagtttgggccatttcttgctttctttttttaaaatcaaagacagttgcttattgcttatttccaattgaaaagaatatactttctagaaatataagaattataattgctctttatgagcacttactgatatgtgtaaggcattgggcaaatgaaaacagtgcctggcatattgtgagcaccacattaaatgttggttaaataaattacaattggaataatgatccagagagatttataacattctgtataatttaaaaatagtattcagctggccagatgcaggaggattgcttgaggccaggtgttggagaccagcctgggccaaggcaggaggattgcttgaggccaggtgttggagaccagcctgggcaacatgcatatatacttatctacagtgaatacatagttgcctctagagagggagagtcttggctaggggtttcgagaaagactcacttttcattgttaacctttcatactatctgtgtgtgtgtgtttttttatcctgtgcatttactactttattaaccaaaaataattattctatatgaataaataagtgaaataacaccaggaggcagaatattatttagctaaaagtgaattaggtatcttctttctgcctgccaaaaccattctttctaacctgtgtccattagaatcttgaaagctggacttgcttgctggcttttagtaaaatttggcaaatgtgacggtataagtagaggctcgaataaatgagtgtatctcgccgggcgcggtggctcatgcctgtaatcccagcactttgggaggctgaggtgggtggatcacgaggtcaggagatcgagaccatcctggctaacacggtgaaaccccgtctctactaaaaacagtaaaaaaaattagctgggtgtggtggtgggcacctgtaatcccagcttcttaggagactgaggcaggagagtgatgtgaacccgagaggcggagcttgcagtgagccgagatcgtgccactgcactccagcctgggtgacagagcgagactccgtctcaaaaaacaaacaaacaaaaaagaaattagtgtatctctccctggccagcaaatttccaggcagacatggcagttatcactcttgtcccaagcagtgtaccttgtatgggcagtggagcaagctaaggagacacaggagatatatgggaacctaaagtggaattttcaaattcttgctcatgatttcaaaattctcttcaaaggcgtactctgtaaggggcttagagctcttctccctattgcctattaacccatccccaaacagtgccattcctgtagcttgtgtgctctcttctcttattgctgttaactcagctcacccagaaagtactattgacactcgccctccaatgttttgaagaatttaaaactcagaaaagttgaatgaattgtaccatgaacactcatatatgcaccacctaggttctacaattaatatttggctgtatttgctttatcatgcattttaaaataagttacagatatcagtacatttatccctaaaggcttcagtgtgcatacatatcattgactagagtatattagtttatgggtttttttttttaagaaaaaaatatatacagtgaatttatatttgagtaaactgcacaaatcttgtgtatcatttgatgtatttcttttctctttttttttttttagagagggagtcttattctgttgcctaggctggagtgcagtggtggaatcactgctcactgtaacctcgaattcctgggctcaagtgatcctcccatcttggcctcccaaagtgttgagattacagttgtgagccactacatcctgcacatttggtccatttctgacaaatgcatataaacttgtataacccaaaccccctcaagacttaaatatagactattacctcaaagtttccatatgttctttcctagtcagtctccatccctatcctggtagtaatgactgttctgattttttcatcataggttagttgtctctcttctcaagcttcatgtaaatgaaatcatacactacgatttcttttgtgtaagatttatttcattcaacataatgtttctgtgattcatccacattatgttgtgtatcagtacttctttccttttttttgctgagtagtattccattatatgaacctaccctagtgtgtttatccactttcctgttgatggatgcctgggctgtttaccacttttggctattatgactgaaattcctatgaacattcttgtgtaagtctttttgtttctctaaggttattcctaggtcatagagtacacatatgtttagatttataataaactgccagaccttttcccaaaatggctgtaccattttgctttcccaccaacaatgtaggagagtttcttattggtcttctaaaaatatatgaacaaatacaaagaggacttcctcatcacggtacaaattcctgtcagatatacattctgtgaatcttttctcccagacgacggcttgtgtattcattttggtgagcagatgttttggatttgatgaagtctgatttactggatttttattttctgttattgctttctgtgtcctaagaaatctatgtctaccttcttagtctgagagatgtttttatatattttcttctgacagctttatagttttagattttaagtttatgatctgttttgaattacttttcctgtatggtgtgaggtaggggtcaggattcatttcatttttttttttttttttttttttttcccaatctggacatccagtggttccaggattgtcatgcattctccattagattgctttggcatcactgtgaacatttttgatagtttaaaggacaggcttttctccttggctttcttagtcaagtatggagagagaacagttactccttcctggtctcctaatctctttacttgtattctggatgctcctgaatcctgactcagtaagcccatgaaattttctgtggttggcaataagttgtagtgattggattatctgttctgtctggacataggatgaccagtgtcccagtgaaggaacgagtgaaggtgtctcagaactggagactggggcgctgccgagaggggattctgctgaagtggagatgcaggcaagtagcctcttgactttttaaaagctacttgggacataaaagcataatggaaagtaaaaaatctggtcctacatagaggctaatggggctatcttgggtgggtgggcactggtgagcctttgaataacacaaagggggcatcagaaggacaactttttcacattttaaagaagggaatacaagaaatgtactttaacaaatgactttttttatgattataaagaaatcaatgcttattttagaaatttgaagaaaaagaaaattctaaagaagaaaataaaactaacctgtaactccaccactcagaggtaacctctgttaacatatgccatcaaaggaaataaatcaaggtttcaattcatcttattttacaaatatttttatttaaatcttctactctatggagttacttcttcattcttggcttccctgagtcctctcccctactttattaaaaggcagggtaggatctaaaggtttggatatatatgttacaggagttagagcttagagcaagtataaggaaatttagaaaatgcctgtggcactgctaatgctaccaatttttatgcttcattggtgctaaatgatttcatagttattatttgactctctaccaaaaaattgctccttgttgattggttgcaatggatagggaacatcatgattccacattccagagtgacctgtacctgtgctgaagacacaggcggccctcttcatctgatgaacctttctttcctgcttgcatccagtttgcactggtttcactggcatcagatactgtgaataatgtggtattgggtagtggtggtgatgatggtaaagaaactacaggagagaaagacggatttttatgatgaaggactttaccctctgcttcccacatttgccttttggggctagtttcaagcagtttggcaaataaacacacagaacagttaccaggctgccctgggattctccactgttcacctggcatgaacctggtttcttgtcctaggcaaatggctgtttaccagatggctctaaacacaaaaattcccaccctctctgtttgctgcctacttgagtgtgccacacactcacgcaaggggatattgaagaggaatgtgcataatgagtgagagagcaggcatctgtacacactctacacatgttccatgtaatatatgcacacacttgtaaaaacctcatgagcagaaactcagttactacaaagtctaagctgcatttaatggcccgtcaagtcaatttgcagaacttttccacattcccatgacacttgtacgagtctggggaagaaacacagcccagtttactcagacaggcttgggaataggagatggtggctgttcttggggatgagtcagctgtccctgtgcttttcttgggacctggtaactccagaacccctatgtagaataggacaggtgggatgtccaccttgggaaaggggcttagtttccaccagagagcctagtatctgacagtcttctttcttcttaagtctcattccctgccacaggacttgtctgtggcttctagcctttcttcctcctgtcagattgcagagggaatctaactatttgtggatttctcttatcagttgcctgtgagagctgactttctctgtagcccctgaactgtagcagaatgctctggggctgtgtttttccattgccacacttactctctaatacagaaatgtagatatccctgtgaggatctaggtatctaatcagtacattagcatcctttcctaaatggcttcattcctttcacttataaatgaccccttagctctaacagaataagggaatggggcttccctaggtttattcttctcttttctccatcacaccttaactgatctattgcggaagaggtatgtatgggaatcctagaaccttgaaacttcccatttacacttcaaattaatgaggatgcagaatgaaagaaagttatttcacttggctagaagatttctttctttctttttttttttttttgagacagtctccctctgtcgcccaggctggagtgcagtggtgcgatctcggctcactgcaacctccgcctcccaggttcaagcgattctcctgcctcagcctctggagtagctgggattaccggcgtgtaccactatgcctgtctaattttgtatttttagtagagacggggttttatcatgttggtcaggctggtcttgaactcctggcctcaggtgatccacccaccttggcctcccaaagtgctaggattacaggtgtgagccactgtgcctggctgaagatttctttttgacccttctcaccccttgaccgttgaattttgtaagctctgcgtacccatgagaagtctaggtagccagtaattgaaatattaaatattctccaattaaaagtggtatttagttggtcttttaattttgagtctcttttacaaagtccagggaagtttagatcaccacaaggctcagttactctagttttctgaggatagctgatgggcaggtaattttgaaggagggtatcaagtatagataataagccttgttggttatccttactaagttggggattggtcagcttcttcaaagattggagttgagttttcatactgtatcttgatgacttttaaattttcttttccatcatttcagtcagatgccctggatgcagctagaggatgattctctgtacatatcccaggctaatttcatcctggcctaccagttccgtccagatggtgccagcttgaatcgtcggcctctgggagtctttgctgggcatgatgaggacgtttgccactttgtgctggccaactcgcatattgttagtgcaggagggtaagtgctataggtttctccttccacccttttccatcttatacttcggggacattctgcctgcctctgacttttctgtcttaactccaaagggatgaggagggagaccagaagggttttccatttaaagcagagagattttaccaaaaggagttaatagggttagctggagaaggaaaacaggaagagcttctaatgaaaagtgaagctggttttgatattctccaggggaaaatatattttttctctcagctctgttcagccccaggtgtgctgaagaagtaaaggtatctagaaagtcagcaccttactgggctgaattgtctaatgcttagcaaatttggatgtcactggagacttgggctgtttctggagagttgttctctttctacagaaagaataattggttcttgggggtcggctccttatttctctcctagggatgggaagattggcattcataagattcacagcaccttcactgtcaagtactcggctcatgaacaggaggtgaactgtgtggattgcaaagggggcatcattgtgagtggctccagggacaggacggccaaggtgaggtggtctcccccttacatactattactccctcctgtctatagggagggggtggatagatccctgagtctcaggattggctgagagtatcgtctggggacaggggagaaaacgacacaataaaggactcacttatgtgcctctggcatgcagcttgccatgccaggcgttgtccctgccagctggactgggaaaggagtggacagtggctgggaaggttgccactcacttgcaatgtggcgtgaactcaaaaacagaggacctggcagcctttcctccctgagttgcgtttcctcaagtttgtgggttgagttctgaccctaatattttattttaaaatctccctccttttgcctgctctctgtttagggaggttaatttttcaccaccttgtttataagcaatcaggctgataattaaaatgtgttttcactgcttctctggagagtgatgtggtcagtaagcagcagagacgatgagagaggggtgttgtttgttgcatctttgccaaattgcccggtccacagatatccaccaaggcataaaagaaagtaaggctgataaatagcatgacactggcttcatggactcatccacatctggatcaaataggcttccacctgtgagcagagaagtctttctccaggcttgtgcccaacagccctagccagggcctgcacaggcctggtcctttagggttgctgtgggaactttgctgacaattcagttggtggtgcaggaggcccaatagtgtcttgttatgtatttcctagcatctaggttccatagtgctaacaggaaaaaaatgcttgctggtgtgtcagcaaatgggcctctaaaacacatagggagaggactcaggagagggaaattgcaatctttactcagtaacttctctgactgcatgtaccctctggtgattacacctccatatagaaatattgctaatttatgtaaaaagaagggctaaatatgttcccttctttttatggaagtttctcctccctttactgttttctgccttactttgtactcacaccagcacaggaagcttgagaaaaatccagcatatcttttgaaccaacatggaaactgaatttcctgtcacttgcttcctattaccctacttcatacttacttcaggcttctgattggtcactgtctttgtaccattccttgaaaagattctggcctaaacctgttatactgctcaaaagtcaatttgcatagaaaccttttgtggcatgtgtgacctaggtactcctgtcttattctagccatcttcctgtcatggcttcaggcttactcaagttcctccttttcagtgacacctctttcttctattctctgtggtctgacacccagaacagtataaaactaagctttataaccataggtagcaatctgagggcatggattacttacagttgacgaagaatagcaagtttatttgagatactgggttaatttcatgtttaagtactgatttagccctatttagtatcttagatttttaaaaagatctaaaataagtgcttccttctaaaattgtcaccacagtccatcttcttccttctgaggatttcttttaggtcagtgacagaattctcttctctggtcctgcaagctggtcagctggtttgcagctcccctgtgacttctctgccaactcttctttcctggctttccggatgctgcctgggtttccctcctttctgttgttgtctttgcatccagccacctttgttatcctgagccatttctacattactattgtattcagtttgtcttttataactgaaacatcatttcttttcagtggcatctgaaattctacagctgcttctccaggcttctaatacacctgaaccttcataagaatttgcagtgatatttgcctgtaaccatctatttttggggagtttcccaaatatgtactgtattttaggaaagagatttattttatggggtaaagggaagtaaaacaatctctttgcaagacatctgagctagggactgtccaaagaaccctcttccttcccctccccacaagcccagtttcaggtttattgtgacttagcttggattgtgtctctgggctttagtggggccagccccatcctgagatgtgaacagctggtagcttatgttcttaatgagcctgggctggtactaaccattccttcatttccttctttatttctctattctttcttatgagtgcctactgtgtgtgaggcttggtacagaggcacctgggctcttcagaagtaagggagataaagcctcttatccttaggatgagaagagatgtgcgtacctggccagggagctgattggaagtggctaggactgtggagtataaagctctagggcaagagccagaaagtgtagagggtggagagatcagatcacatctggcttagaagggaagatttattgtaataagaatcaccattattgtttgcctgatacctgccaaatactttgctgctgtgctagatgccttatacttatctccacttttccacactataaccctgagataggcatcatttcccatttaacacatgtggacacggaagctaagaagttaccattaagatcaaagataataagtagcaactggggttcaaatccagattgatcagatgccaaagcctatgcatgctttctctgcaattgcatgctgcagggaatattttaccatttaggtttttcttttgttttaggattattttctttaggatagattttcagcaacaaaattactgagttaaagcctgtggtcattttaaaagttgtgatgcgtatcaccagtctgctttttaaaagaactgtataaatgtccactcccggccgggcgcggtggctcacacctgtaatcccaggactttgggaggctgaggcgggtagatcatgaggtcaggagatcgagaccatcctggctaacacagcaaaaccccgtgtctactaaaaatacaaaaaaattagccaggcatggtggcaggcgcctgtagacccagctactcgggaggctgaggcaggagaatggcatgaacccaggaggcggagcttgcagtgagctgatattgcaccactgcactccagcctgggcaacagagcaagactccatctcaaaaaaaaaaaaaagtccactcccactgaatcttttccagggatggatctgttttgaatttggccatggagggcaaagataggatcagcatattgttgtcaactcttgtccctcaggtgccaggatggaatctcatgtttctggagggtgatgtgctgctgggccaagccaggagggccactttcctaagatcttgctcagaattggtggcatgcttcctcagccgctcctggagaccaagaaccttgttctgtggtttgcagaatctaggaatcaaccttccctttccgtggaggacattagtgaattcaggcctaggccttccccatagattttgtaatcagagtccttagtgtttcctcaccccctaagaaagaatctgcctcccagggagtttgtgtcagggaaaaggcaaagctgtctttttagctgggctgcctaaaagagtacattggaaatgtatctagttattgccaaagaggactgactatggagtccaaagagtaggccagaatcatggcactcaggaaaagttgtggtgtttacctttgttttctgcccctcctcatttaggatcctcttagtatgtttattttcttttcactgtgttgggaaaagtaactcacacaatcctcccatcccccacccccatcatacacacaaactctaaaaaacactttctccttttatagggaagagttatcatgtgactcttaagaaggcaggaccacccctactccatcacctaccctttaaactcaaggaatgtttcctttaaagttcttccatctaaggtcctgcctgagttttgtgtgttccccttatagcactgctgggaccttaagaggtcactgatccatctggctgcctctggatccctctgttgctgctgtcttgggatagccctgtacgtctgagatttcctttctgtttggttaggggcttatgtccctgtgtgtgtcatctagggtagggtgaagtgaggggggagccctgtgcttaatgggagatgtctaaatgcactgactgctgagagggctctgtgagtgttgattagagttaagcccagagtggctgctaatgtacattcctgactgatagagaccagataatgtgctccaagcaatatttttaacctgtaggagatatggaagcttaaaagagttaagcttttctgctacttttggtgacactaggtgttaaattccctgctgacgtgaatagtattggatcctgggcattatcaacaaacaaacaacaacacaccaccttcccacttggaagtctctcttcttcttccattctttccttcccttgcatgtttctttttacttctctccctaattctattgctgtccccctatactatgccttgatcttcttccctctccctacttctccaaagtaaaatcttggtgagagatgggagaaaggaaaatccacaaatacaggaaagctgtcaaaagaggcaagccccacccacccacttcttctcagtcaagtctccgctgaggaatgtggaacttctgattccccaatgtaaagttggctggtaagtaagggctgtcagtggaagtaaaagagggtagttaggatggagagctagggcctatctgcgggggtaggtgagccagaagctgcaggggcccctctgctgatacctgagctctgtgtgtgcagggcataaaggattccccatttctccacctccaacagtcacctctcccggagcacctctcctccccactgatcccaggcaatgccaacgagagcatctcctctcctgtttctaggtgtggcctttggcctcaggccggctggggcagtgcttacacaccatccagactgaagaccgagtctggtccattgctatcagcccattactcaggtaagggagacatatttggatgtggttttgtcctgtataataatgcttttattttactagatcaggtgagctagaaaatcttcctgttgtgtattctaggttgctttgagtcactgtcttggagattttttaatcctccagagatttgagttatttaggccacttcatatatgcgtgggattgagataaccttctaaatgcgaatttcctaagcatctaacctcagaaatgttaaggaaagagtactatatgagaatataactaagagtccagctgttagccagaagtgtcccttctggaacagttgtcctctggggtcattctcaaagcagaggcctctcaccacctctcggaggtgacagcaccagccaacctgctcttacaactcacatgtctgctttgttccccttggaaaatgtcctctggagtatcccttacagtcttaagtcatcaggagaggcttggggcccagatccagctgggtcctcaaacaaagacatgtatgtgaagtagtaacattgattattgtagcaaaagtgtgaaattttgatgatggctttactgtaccctttggtctgattgttacttctcttttttattattatttattttattttatatttagaaatggggtgtttggtttttttttttttttgagacggagtctcgctctgtcacccagcctggagtgcagtggtgccatctcagctcactgcaagctctgcctcccaggttcacaccattcccctgcctcagcctcccgagtagctgggactacaggcacctgccaccacgcccagctaattttttgtatttttagtagagacggagtttcactgtgttagccaggatggtctcgatcacctgacctcgtgatccgcctgcctcggcctcccaaagtgctgggattacagttgtgagccaccgtgcccagccctagaaatggggtggtttttttttcgttctttttttgtttctgttgtttttttgttttagaaatggggtgtttctatattgaccaggctggtttcaaactcctggcctcaagtgatcctcccatcttggcctcccaaagtgcatgagccactgcacctggccctgactgttatatctctaactttacctatggacaagtgaggtttgcatcccgacttctgctttcgaggctctctggaaccaagacagaatccctctcctccccagcagagtacatagactctcctgtacctgttctatcacaacattttcctaggatcttcgtccacttccttcaccctactcacatggaaatgtgaaagctgtagggctgccaccctccaacattaggtttaagtcagttgcttattttataagagacttggtcctacccacttcgtttagtcccttcagcttctttctcctcaccccatggagcctgcacccctcctcctactcccttccacaactccctttcaattttttttctttctaagaattagagccgattagccacgtcattaattcttcaatttgacggctgatatagcaggacctgaaacacattgctgaccccggagaatggagaccccattccttagcatattgacgatgagagaagttaattaaaattccacagagcagaggtgtcggctaacctataaacctgtcgctgttcaaaacaaatcattctagcaatcgtaggaaagagggaaggaaagaccagcagggagtggagaggctaagtgtgtgggagcggagagtggaaaatggagccattgagctttgtctcctcctcagtttcttcctaatgctgcccttttaaaagccagttagccagacctgggtatccgtgggctgaatagaaggaaagtgctatggccagtgagaaatgacaagtgtgctggtgactttgccttaatggttgcttgtggacttctgctggttttgggagactggagtggaggtggtggtagagagaagctctcagggccggagatggtctgtgcgcttccttcatatggattgaagccaaagaacacaaacaggctctgccctgcatccctacccaacatttctctattccagcctcctcctccggaatgtgttaggctacctcttaacagaatagggcacaacaactattgaagatggtgtcaataaaagaggttgaggacagagtctgccctcatcattaagaagcatttaagattacagtaaactgattttgggttttttggccacaacttggagactgactttggggaagggcctagctttctggcattattactgctactacatgactgccactactactagcagctaacatttagtagtcatctgctctgtgccagaccctctgctaaggcctcgatgtgtctcatctttggtgaagacctaggccttatgttttcttcccattcatcttcagggtcttcctgtcctcttcttggccctgggatgattttttgagaggggtctcacagtgttacccaggctggtcttgaactcctgggctcaagccatcttcccacctcagccttgggatgattctttcactctgtcagctcctgaccaacagtttttaagatggtcttcccctaactccagaattgaggtcttggagtcttttaaaaaatagtttgtgtttgagattctgtctttacactagatgaccagagtgtatgccggtgttatctctgcctctttttctcttacccaaagaatatactgggatagggtctttttacctcattattagatccatttcttctcaatgtgaccttgaatttgaacctttcaataaactcagccattttctcagtcttgagagacactgcctcccagcctcagggtctgttctttaaagcagtctgggagatgagttctgttttgccttcaactagcagtgtggcctcaggcaagtcattcccgctcccagcctcagtttcatcatattaaatatgaatactatttcctttacagaccttactagaatattgtgaagatgacctgaaataatctatatgaaaatattaatactctgaaaagctaaaagggctgtaatatatgtgttatgcatattgagacagggtttcactttatcacccatgctgattatgaactcctggcctcaagtgatcctcaaaaagggctataatgtaatgtcaaccagaatcctttcttgcctggtgtagcatttgcttagtggcttcaactgctgtcaagtctgtacccttttcctgggctccttctggccccaggaagtttccctgctcttttgcagtcttcttgaggtggggactcagtaggaatctctcttccccctgtagtgttcctgccctcaatgaccatcttcagttcccctccctgccaccattcctgttgagtatggttgtcagtgtcactaatatgatatgaccctggactcctcatggagaatatgaggggatgtggcagccagtgtactggccctagggcaggtactcctggtttacctgccaatttctcaaccctttgttgctcccttatgcagttaggaggaacctggacagttaggagacctagcacagctcttttctcaatttatctctttcttctatttaaaataatttgtcagatatattaatcttatttatctctgatgctgggacttttctaccttatcttcttatgtatgtactcaggcacttgtatgaaacatgaaacctcaatccagaggcttaatttgaggtcctcatgactgagagaaagcaagtatctgtctgtgttcaaatgtcttctttcctttcttcctttactttgagttcttgatttgtaaagagtcatggaggatcatatttagtactggttatgtgcttagagccatgtgtagtcagtcaaaaaacacagaaggagaaccagcaggctccaaaggaaagtggcaggcaaggaccttttcttctgcctctcgcatacccttctacccatcttattgttcaacaccggtaatcctgtttttaagattcatgacctggaaaagaagcccttctcctgtagaggaggtctcacctggagttgttggatgattgatagaaggacaggttaagatggcccaggaatgagatgctggaggcgtgcctggggtggaggggcatatgtctgagtataattatggggcaggaataccttcagctcacaggcctcagagatacaacctcctgaggtcacatggaattctgagcaacttcccaagagtaacacagaagggcagactcttttttttttttttgagacagggtcttgcctggagtgcagtggcacaattatatatcacttgaactattgggttcaagtgatcctcccaccttggccttctgaagttctgagattacaggtgtgagcagctatgcctggccaaaaagcagattttaaaaaatgtgtaatatgttttattgccatttaaaaattatttccagctgaatacagtaaatactaaagtatgaggaaatgtagaaatactaaacacttaacttcattccctttgactttccatctcttcccttctcaccctttcacctcactccttgtgtatttactgaacacttgatacgtgtcagcttccccaaggatcttattcagtggtggggagatgataggcacatggctgtaatgattgccagattatactaagtgccttaacctaggctgtccctggttggggaggaagggggagtgtcattctcttctggggaaaggcaaaaattgaggcccagggaagatcaatgcagggccacatgtggaatggggcagaagaggagtagtttgtacccagttccctagcctgttcccatgtcctgtgtgctgagggacaagcaggccttttgtcattgctgtgccttattcaccagcatcttggatggtagccgtggcccataaaaggctctgtggggacctgtgaacattctctcttcctgaaggccagagttgagacagggagtggtgggagaaggcagcatatgattgaggcttgggctcactcaggtagctgtgaatgcttgcaccattccaggagtgtgaatgcatatagatcttcagctttcagggtcccctccaagccacccatggggggcatgtggtgaagtgaatctacagatctacataccctgtttgcctgggaggggaagggagaggcgcccacagctcctcgtccctctgcagacaccatatgtattgccctccaagaaaaaaaaggtgcttagcaaaaccctttccctgtctccaaaggacacttgctatcgtgtgagagagtgtggtcaggaaggcttcccatgacacttgggttttaatcccttctctcccgcttctgtcattagggaaatatatgagtggtataggtgtagaaacttgacttagctgtgttattaaatatacaatataattttgtgtaactttgcttgctgtggtggcctgtttgtttttgaggggattagtccaagtctgcatgaaatgtaccgattcaaatttgtaaagtgagttgcagcctctggggggttttgatggaggagctgccccttcttgcttcatttctcccagaggtgagggagcgtctggaaggaaagcaatcactgtgtactgttcggtaagcgggtgggttttggggaaaggagggtgtttgttcccagtagctacagggtttactgtgtgttgtgtgtgtggtagatgcatattcagcggcctgttgaaatacatctttctttagtgaaaggtaattgcatctggagttttctctgacagagaggtttgaaagattggaaaaggaggcagccaacttgcagttcagattcttttggttgccagtggtgccgcagtcctttggccctggacttcataactcgctgagtacttctaggggaagaagaatcaaaagtaaagattgtgcctctgagtttttctttttctggctggctgtggacagctgggtgtaaaggggatgcttgaccttgataactcgaggaaaaactcaggtggatgactatagtgctctgcattgtagctggtcctcctgatggcgtggactgtagctgacttggggacctctctcttctcctttcccagggtcaggggcagagtgggtagtttcttctgggtcttgtctagggaaagaagacctgaagagctagtcaaagagtggcttggtgtccccctttgcgaaactgcagagtagagaagggagcttcttgcctgtggtgccctggatgagagagttgcagggacaaagacaccatggagggcccagggctggcatggctagaaggggcgtcatgacacccggagaaagatggaagctccaggtaattctaggtgggcccactggttcaactggcagcaagctaaaattggaaagggatcagtgtggggatgtcattgatttggagtcaggtcctgctaaatctcagtacagtgccctccaccctggagttcattgcccatgcatatgcaagcctctcagacagtcatatccatcagtagcaaggaccaaataccacaggggtgggtttcaattcctcaagaccctggatttctgccattacccagggcaggataggcacagggaggctcatgtgctgagctgctgggctgagaccagcactctccgagccctggctggcccagaacccatttgtgggagcagctccttccttggccagcacgattggcccacttgtcaagagccgacttacatgaaaccctacaagtagaagcagaggctcctgcagacggctgaatactgtggatacagagttgatgtgtccagacttggccccctgctaacagggatgcatttctatccctcagtctagtgtttaaattctttctttctccatctctgtctctgtctttctttctctctcccttcctcctcaatacccaccttccactctctgtctttctctcttcagatactccttaagcattaccatgttctggtcactagagagacaacagtgaactagacagcatagtctgatgggagagaccgacaagtaaaataggtagtagagtgtggtaagttctcagatgaggttgagacagggccttgggagcacgctggacggatcagtcatctttctcttcctcccactgcctacacctcctggctccagtccctacctgcaccactctttcttccactctgctcatcaggaagggaaatgggaattttcctgctttagctgctgctgacttttctgggttgtgtgtgcaacgtgcctgtgtttttccacctttgatcaccgttctgccaacagataatttagcaatcacatcccaaagtggaagcatggagttaatgttaaaattagttttcttttttttctgtctttaaatttcagtgggtgatgaggcagagagggaggcgggagggtgaaggggagccataaattctgtggctggtgtagctgttctctgagcagccgggaagcctctgatgtctccacagcactttcattaacatttaaattaagggtttgtttttcagtctgttttataggcagggacctttcatggcctgtcacatgcagcacccaccccccctcccaacccaacttcccaagcaagtgtgtaattgtagccactgctgtatcctaatctgtgttgcagtcggaggttcaaagggaattcctggagctggagttttggaggtacaagatgtaatagtcaggatgtcggtgttactcctcaaatgaaggtgctgtgtaggagctctttctcctcttatctgacctgtgctttctcagctcttcaagggacacacacttcaatctgactccgacccctcccgcccttccttcctttgggccatggggcaggtaggaaagggtgcagtccattcaagtgatttctccttatattacaagttagggccggggacagactattctaagatacagatttccatgcttatcttcctccttttgattattattattatattttagcctcacaaatacttccacctaccccactgactcttggagaagtaataaaataaatgggattaccatctgagaatttgtaattacagtagggtcctttggtcctaaaaagtgtattctaacatggatatgtgtatgcataccatacatactagctctgcatgtaccttgttggaaatagcttactgattgaatttgataaagctattctcccagatctatgtattcagaagaaactctactacaacctcaggtttctgagcttcctttcacacagaaatatttggcagcatttggggaggttttgaaaagacatccctgctctggtctccttcccatcagcaccctgttgatctgtagatgacaagaatgtgtactagacacacatgaagcatctcattgcttcataacctctgagggcttagttttcccaccgctggtctctaggtagctttcttctctggacagtgaagagaggagcattgggacctttctctctttctgttcagaggctgagagtttcctttcccttggagcctggactttactgcacgagtcactgcatctttcctccttcctccactaagccactcaaaccatccatgacttatctgcagggttcaagatggctgagtgttttgcccttctatgccaggtaaccttgtgaacaggtggacaccctcatgccctggggtcttgccgaaggggagtgagggaggtgctggggcaacccctctgcaggtgctgcttgggctcagattgcatgctggtgtccaggcccctcctggtggtgattaatctgggacacgggccgacagaggcccagccagggctgctttggtccctcactgtgaagacctttggcttggagactgaactgatctctatagcctgcttcggcttggggtttgatctgtcaaggctaaagaggaacctgatggtagagcggaaacttgtagccctgtctgacttatggcactgatccgttccagtggccttgtcatgataatactcgtatatttaagaagatttccccacctgttagctgtaacactcagatcagtcaaaagagggatcttcatgaaaaatctgtgcttttagttttttgagccaatggagcttactcttgtaagtagactaggggctgggtaggggtttctaatgagaatgagtaaaaaaggcaataatgaggttgtggctggattagtaacagaatgtatgtttttatgtggagggggtcatatcacaggtagaaggatcactccatcctcctgcaattaggtggctctcaggccacttggagcagattttcagatttcagtatctagaatcaagtcttaccttcctcattttctttttcatttcaaaccattcccccctgccacccagacgaagtcttgcactgttgcccaggctggagtgcagtggcgcgatctcggctcactgcaacttccgcctcctgggttcaagcaattgtcctgcctcagcctcctgagtagctgggattacaggcgcatgccaccacgcctggctaatttttgtatttttagtagagacggggtttcaccatgttgggcaggctggtcttgaactcctgaccttatgatccacctgccttggcctcccaaagtgctgggattatagatgtgcgccaccatgcccggcctcaaaccattttttttatttttaaataggcctccctctccctttctatgtaccagagtcctggtccccaggacttccaagcggcagtacatggtgccagctatatttcttctctgagttcaggacaatcacacgtggctccacttgataatgggcttaaggcccaagaataggaattctgttgcccatgacagtttctctgaatcagtgagtcttagtgagtttcatcattacggtagtgccatttggcagttagaagcttgggattaagagctagggaattttcctcataccatggagaaagagaataggcaccatgttgtacactagtagaatatgttgatactgttgatgtgggaagctggctatagagaccctatgaatcataaaggttgtgttgatactgaattttgctttgctgactagaattttacacatgatgacaatgaagaatacatgcatcagcagatcaatgaatatttttggctcttccttcagactagtactaaaaggtctctgactacggattggacatctgctaatccctgtgcctctctagcagtttcttgaacaagactctttagaagtttcagatagtgagctttttttttttttttttttttttttgagacagagtctcgctgtgttgcccaggctggactacagtggcgtgatgatgatctcagctcactgcaacttccacctccccggttcaagtgattctcttgcctcagccccccaagtagctggtactacaggcaagcatcaccacacccagctaatttttgtatttttaatagagatggggtttcaccatgttggccaggctggtttcgaactcctgacctcaggtgatgccatccaccttggcctcccaaagtgttgggattacaggcatgagccaccgtgcctggccagatagtgagcttttggaagtaggcgttttatttcttgtctcatgtaagagttatgtgcttgtgtgcctcagacgaaatccctctgcctctggggtgccctagtaaaatgattacccaagacccttgcctcatttccaagcttgttcttactcctctcttgggccaggacattttccacagggagtaatgggtaacatggtctgtgggatcctgtcatataggcttggctcaggcctatctgaggtgctgacaagggcgggaggattggagggaggagggaagtgactatgtgcatgcagaagccatggtaattgcaaagggaatattagtccaggagctgctggcccaggaaattgctttctgtagaagctttccttttcatggttttcaatgcaaattgaaaacataaatgggcacagaaaagtgtaggggggacaggtggggtgccagttgggatgtgataacatccaaaatcttcagcagggtcttaatttgcagaagagaatttcaagtaacaagagacaaccttataggatattaaaataatgttagagcatgttttgctgtgaccttcccacccccatgttttccatgtacttgtgtttaggctcgtctctgggcctgcttagcttgccctgctgcctcttcctccgctccttcccacagcaaagccataatccagcttttagaacaatggccatggtagtcatggcatagtattttggttttcacagcaggctgggaaacagtagccccatccaaagtcagtgtgctttagaaaatgtacacattggtcctggggactggagcctccatatgtgggctaaagaacatgcctcttgaaggcaggagcttgcctgctttgagaaggtgttaaagccaaggctcatttatgtgttctctcttaagatcagcgggtaggcttgatgaagtagaatgtgaggccaccaggcctttttcctctctcgatttcccacacctctagagaggtgtgactttctggttccaggctggagacacttatgtctgtgttgcctctggatgctttggggatactggccaataggataagcatggggtgaccaccactttgattatgttggcatagcaagtgatcaggtgagaagcttcagactggtttctttctagctgctgagctagacaagaagacacaaaaacaggccaaaaggcagtgtggagggtgagcttttccagtgtaaatatacccaagtagtagagaatactatggaactgtgggggcttcttcgcttcctttgtgtggggtttcagtgcgcaggtgacatgcattggctgaagaaaaagctgagatgtgtgaggtaaagtgaaatgtaccctttctgcctgtccccaccatgagtgttccttcctcgcttcttcattgattggggaattttgaaagagaaattagcttgattcttgccctgggtccaagctgtggtgcctggtcagaacttgagtttcaggagcagtctcccactaggatgctgtccagatgtaatcagccactgcttagcacatgctcctcatcccagacttacggcatcatggcccttccgggctggagagggtccagtccagagcacgagactcactgtctctttctcccaaggactcgactcatgcagggtgtttccttctcctgctattttccaccttgttgcagctgcagctttagctgtcctagagaaacctgggtctttcctcctgtgcctgaatgagaagagaacaagtgagtgattagggtggggtcctatggtaaatgacctaagagaagggtcagctgggcatgatggtgagatttgtaacatttggcaaagaggaagacacacatgtgttaatgcctttgaagtgttctttccctgccagttggactcttactagtatccagggtgagctgtggttgagaatttacaaaaattaataggaaaaaaaaccacaaattattcaaaggattcttccagttgttagaagtctttggtccggaaaatccttctttgcaggctgataaggatgagttcaagaataaaaagaggaaaagttagagtttttaaattgcattaggttgtcaatgagtatcaaaattaaaacatgaaaaccttttgacacagaaattccacttctaggaattcattgtaaggcaataaccagacaattctgcaagatatatgtacaaagacttatattaagaacacataaataggccaggcatggtggcacacacctgtcatcccagcactttgggaggctgaggtaggaggttcacttgaacccaagagctcaagaccagcttgggcaacagagtgagaccccatttccacaaaaaaatctaaaaacaaaattagccaggcatggtgacatgctcctgtagtcccagctactcaagaggctgaggtggggggactgcttgagcccaggagattgaggctgcagtcagctgagatcgtgccactgcactctagccttggtgacagagcaagagtctgtctcaaaaaagtaacaaaaccaaaagaaaccataaatatccatgagtagggttctgataaaatattttatactatgttccctcaataaaatgctatgtagccattaaaaggatgacacagatgtacatttatggacccaaaagatgtcatagcagattgtggaatgaaaaaaggtcagaaaatagtatgacagtttatttaaatatctcttcagggttttttcttatatggtggatttctgttgatatttacttactttttacttttaatgtatttaaattttttataatggtcctattttataattagaaaaaagaaattacatttaaatgtctattttaatatcaggcagctatggagagaatactccctttttttcttacataatttttaaaattaaggatatatagacctacatttactttctatttttaaatagccttattgaagtagaatttatatatcataaaatttacccatttaaaatgtacaatttaagtgtacaattccatgatttttagaaaatttataaagttgtgcaactatcaccacaattccatttgagaacatttctaacactttcagaagatcttcccttacatttgcttttgtatcattaaacatggtttcatgcttgggaccttttttggggaaagaaataagtaaacatactagaattttttaaaaggataatataagctttggattttttttttttttttttttaagacggagtctcgctctgtcgccggtctggagtgcagtggtgcaatctcggctcactgcaacttccgcctccagggttcaagtgattctcctgcctcagcctcccaagtagctgggattacagatgcatgccaccacacctggctaatttttgcatttttagtagagatggggtttgaccatgttggccaggatggtctcgatctcttgacctcgtgatccacctgccttggcctcctaaagtgctgggattacagtcgtgagccactgcgcctggccccgagtgcctgtcttatggatgtattgaatgctgctgtgtgcaagatcacatgggaagtatgaaacacaagagactgtttgtttttaccgtgtaggagcttatagtgcaattgcggaaacaatgcatgtactgaaacgataatttatttggttatatatgcagtgtaagtgctagcaactactggggttattgacaggaaatcagaggaaagctgtagccttgttattaagtcagaagagcttcatggatgacatggaagttgaagtgggacttacatgatgcctgtattgaaattgcataagggaacttcaagcaaggggactggtctgagcaaaggcatacaaagagatggggaagctaaaggtaggtttgggagttcagagtggacaagtctggctcgctggaggggaaatttggagtctagttttggagggtgttgaagagcagagtttgactttaacttgaggaaaatagggaactttggaccgttttgggccagattgaagcagttaaatggtttatgttgtgctacagcatataggattctttggaggagagagacaggctgttcttttccaggaatacactttgttagcaggaagggaccagactcgtagggacagtgggaagacaactttcattcaggaaaactatgtaggaaaaaatcagtagtcagacatgactgcacgtcagggagagagggaagagacgagtacctctgtgagcctgatgatggaggaggcactgggtttgagaagactgaattttgttttatgggacagtcaggtggcaatggccagagacagcccaggaatggttgcctggaactcacacgtggggttgagatgtagaaggcctcagcatagggacaacagttgaaataatgtgagggattagcaccaaaggacaattcagaaataaagacagtggagcaaggagaaacaaagagccaacatgtccaatcagaggcaggaggaaaactaggagcctggagaagagtagatcagccagccagagtagatggtggacaaatgagtaattcgggggcaacttacataaatgaatttatctctgccttgcttattatgccttttccctattctgattgatagataccaccaataaggtaaaaatgtatacccctaatgttgatgcatggagatttataagcattttcttttccttgcttgattttagcattttgttttcaaactataataaatttgccttttttttctagttctttcctctggctcttgttgtgttttctattgttctaccctgtcgttattattatttttttcttcttgagggttgcctactttgggcttggtaatttttcccccctcagctcacaaaaccaggcagtgggatttggagggtcagcaactgagctagagatggtaagtgacaaagtgagggaatatcgtggatcccagttgttcctccatgtgtactggtatccagggcgaagcaagagagactgatttagaatcaagaaaaaagctactgaccacggatgttgccatttggagtggtttagcatcagagccataggagctgctcaggttcagggcttgcttgggcagctatggctgtctgaaaacttttttttttttaaagagatataactaaaaactttcaagtcctcggattttgggggtagtaattccacagggcttgtcatttgtgtttgaagctggtggtgaggagggcggagtgaggagaagcgagggggtggagatgggaagcaaagaaggaatcagagagagaaattttattgagggagagtttgctgggtttatgggagggaatctctcccctcctccccattcggatttgaaagggccggtgaatctttgattaggtgcaggtcaaaagaatttacacattgtgaccttaataactagaggtgattggcaggcgggctgcagggagagggccgcggccccctttcatctcacttagcacagaggagagacaatgggccagccgattttccttgttgtcccttgtttgaaaaggtctggtgtctctactaggtacctgtgacatgggggtcttgattggggtctcataaaggcccctgtcagtatgtccaaaggccaagagtacaaaagcaagcagtgggtgggggtctcagctgaccactgaagaagggaggggagggcccgggaggcagtggagggagaagcaacccccgatgggagcccttatagagggagggaaggaggggggcagagaagggccatttttgtccctaactcatcaagcacatctgcagaattgtccaagctgctgcctcctggtttcaaaagaaaaaaatgattgtttgataaaccgtccctgattcaccactttctcacaacggtgggagacccagccctgacctctgtatgatttcacgtcaggaccaggctttcttttcccacccccaaattgctagagaaactttgaaatgtatcctgtggctttctctcccttctttcaccccccacccatttcccaccctctccaccccactggcctctgttttctctctgggcgctccagagtgtaggcgagtaattagtcccctctttctggggcacaatgaagccagggtgtttggcgggccccttcccaccgctcacagagctggggcctggggggaaggaccaggtggcatgtgcagtgtgttccaggcctgtacaatccctgggggacagagctgggggctcagagactggtgtgctcctgtttctcgaaggaatgtgcagaggcgcatgcattaatggtccccacacaatgcttgcattttttttccaggcagaggcatcttccccgtgaaaaggctgccgaactcagggcccaggcgggagatttgccggcatagtggcgttatttcccaccctgcgcttagtcacttggagctaacatgggagaccaacaggccgcgtctctcgagagcccgatctttgtatccgatgtgtgctccccctctgccctgtcagttttgtgtgttcacggagtgttgattttaatgcgggcctgtgttgggctgggaggccaggctggggggcctcaagtctttgtcttgcagggctttttcttcttggagggtcttcggccctagaggctggtggcagatttgagaggtaggatgagatgccaactctggctggcaaaggattcccccatccatgtgtctgtcacagaccactgtggggtgcctagaaaacaagagcaccttgggatgctcgagcacacacttgcttggcaccccaccaccccttgaggggggcggttagttctaccccatagggctgccagcttgaagtgagttaaaccccccttgtgactgggtctggcaggagcacagattgtgagcctcagggagccaaagcagggccttgcttgcagggctctgagggaggtgggggcaggcaggaggggtgctagagcacaggtcagctgcagagactactctgcaatcattaagggacaggagagaatagagaccagacagaaaagaggcagagtgtctggggaagcttcaggaaatcacaaatgctcatctcaggcagttgaaggggaatgtccctaggaactagggcctaagtggaggcattttccccagtgaggagaactggacatggtcacaggtagagccaccaaggaccaatgagcaggctgtcttctgtctttaccactcaccttgctgcagtatagccttgtgccaggagcttggggatgggttctgggtgggtaccttatctcaaaccctgagtcttgctgtgagacaagatgcctatgcatgactcaaggagaaggagactctggggagcctcagcctgggtgtggtctgctctgcttctggggagagcaaaacttcgagtacctggagtcaggaagtcagtggatgaaggcctccaggcccccaaccatggccaggctgtagctctggcatccatgtggtcctggggctgggggccatcatctggaatcaggcttttagaaaggggctgtgtcttcactttccatatggatcggaaggcagagatgcaggctggccgctgagatgaggtggccctggggaggcatcccgccaaggttcaccaagcacaggggctcctctgtgctgctgttggcatccttcagactgtcttgggaattggcgccagtcacactgccaggcctgacaaggagaaagaagctggagctccaaggtctttgaggggcctaaatcccaaaggaacccatcagtaagaagcagcttctgctttgggtcactctgtttcagaggacatttctttcattgggaaataggcactcccagcaatacccacccctcctttttccttttactgttcttttttttccttaatatttccaaatgttgttcctccctttccttctcttccattttgtggacagctcataaaaagcctgagagaaacagagtttatgtgtatggatgtgataatggtgggtggggcatgtcagagatggttaggctggggctcccggattgtagaaagcactgtgacttccctgggctgccctgccaaggcctggctgggagggcaatggcacatcataacctttaaatgcaaacttgatggaggagagagatgaaatcatagaaacaaattagatgtatctatagggggtgttcaactggagaaaatgagcatttcttactaattggagttcagcatgcttcattattagcttcattacaagaggaagagtacagcagcctctttggggattccctgggctgccttttttcctttaaaaatataattgtatttatggtggaggaagaagcaggaattgctcttggtaactttgtggagcacccagggatttaaagcagagtttggagcatggtagaggagagggagagatggactagtgagagggcacttagaagcctcattccttgatgataaaaaggaggtgggaaaagctctggtggggatgggaacctcccttctcagactaagattgaggaattgggaatgacaggaacaatactgatcggaaaacctgactttctgggagatctgatatttgactattttaacttttgtattaaaagggtaaaatggtggaatgcagacacagggtaaaggtctgacaaaacttgttttccagcatacacaggatcttctcctcatgggccggggaaaggctggggtgagtgtggccttaattgggcctggttggatgcacattaacttctgtccaggcaaggcgctggttctgtccatgaaagattatcgactgagataatgaacttggctgtacagttctgactccttttcttgttgccactgctgcagccccggagctcatgttcaaagtaaaatcagtccccagaaaactctgatccagggtgcttgctcaaggaagtgacttacctaagttctgtctagtcaatcaaatcatctggtatttagtgttctcaggaaagctgagaaaagatactgttttgtgatgggagagtttatacccaagagcagggggtagaaaatctcaatcatctcaaatcaatgcttgttgtgacttcatcaaaggcccagaatttttgcttttttcctcccaacctgtcctttgctttcactacaagtctatgcttagtccaaccttcctgaggtacctaggactttaaatatacaggataaaaacaggaaaaaacaaacaaacaaaaaaacccaaatcgcaggatatcttcttctggttggtagacctcatccctaatggaggcctaatccctttgcctagtggacagggacctccctggtgattgggtgacctgtgatttatgaactcactgagcacctataggaggcagctcatttttatctccctccctgcagattccgagcaagttatcatcagggtctaagctctttggcttttccacagagggatagcagaatattgggggtgggatgggaagttggttttctctagtaactggacttgcaggtacctcaagtcagcagctagcagttgtctagcacctggcacaggtactgtggagaaatgaaagcctgaagtaagatgggtcacccagccattaaatcaggaatatataccactgtcaagtgtatttgcaaatttgtgacctttcttatcattcttctgaaaggtttgtatcccatcccaagtggcttagtgggaaagaaaggaagcttccaatgaaatgactttttggtcattttttggtgtcctactatttttccaaagagaaaaatcttcatggttttacagtttgggatttcagaaatgcaagacaaaaacatgccattgggggaaaaaaaatcgattccaaagcaagtgttggtgtggtgtgagtgggtggaactacacttgaggttggatgggatgggcaggcagctgcctagggaagggattcccaggctttagcaactccttaagtgcctatgtgtaaaactctcctacttcaaagaactacccagcaagtagttcctcccctcatctctctaaggtggtagtcacccaaggaaggtacagggtcagcactctgaggcctggtggaaaagagctgatgggggcagaacgacctgtgggtgagagatccattccctagaactaatgagaggaacagataaattaaggtcaccattggaatctcctcacattgtaggcatccctgcccaggcctgggacccagaaaacatgattcttgagaataagtgggttctggcagcctccattgggaaagccagacatacacatgactagcagtactgcatgggtgtgtgaagacttggggaacttgaggtcctagagttttgtggtatcgctgactgaagccatgcttgcaccccattcctaaccaccaccacccaccccgccaggcgatagaaaacctccctccagcctcttgagaccaactccggctccactgggactttaaatctcagaagaggaataatgggtattagaagctgtgggatcactgtaggctatttatgatctaagtcctgggtttgaaattaattggattattttttcaaaccaactaaataccccaaaaccaaaatgtaaaacccccaaacctttcatccttctccctctccctgtggctttatttgctgggtagtgaaaagtgctctctccagcctcctttgggttactgtgctgaacaaagtgagaaacccagggaagaaggaagctggtgccaaaagggctggccgctgcccctcccagctctgcgtcccctggccttcccggctgcctcacagtctgggccccagcccaagcaagcaaaggcgccttgaccagcaacaagccccggctttgttgctcctgtgggggaaatgctttctggagcccagggatctcctctgagaaccacctgtgcctctcggcctcctgcctagcctgggccttctggcacagggacccctgcatttcagccagcaggctaatggtagggagtgagggttgggagacagctaagggggctgtggtcagtttgagggggctcaaattccagtctgcccctttaaggcccctggttggctcagaatctcctgaggccctggccaggttaaatttgtcctgtctgtcattagccttgactgtagctttctaaagtggtctacagaatagaatagggacaggggacccaaggcctcacttcttaccccatactgcaggggaacagtataggttccctttactaggccatttccttgatcaagaatcccaattgatgctctatggcctggccagtgatgatcacaataatgacaagagtgattagcacttgtagagtgctgatgaagtgccaggcactatgctgaccactttataccttatttaatccccccagataggtaccatcatcatcctcagtttacaaaaggaaactgagacccaagagaggctaactaaacagccagagtcacatctctcatagccaacacagccagtgttggagtcctggcatctgactccaaaggtcatgctttttcacttccgtgctactctgtctgcttgcctgtcctgtgctgagctctctcatttggaattagaacttgttgattatcttgaattgtttccaactttaaaaaaaatgaattcaagacttgattctctggttggaccttaagctgcctaagggcaagcctatatgaatttggtttttcttgaacaccccagcgtctatcacaaggctggcttggggaacccctgggtacttattgaaggaatgaagccctgtctttgtctgttccccgctcagggattgcccaggcaaaatcttgttttgtgaaaggggtgatgagtcccagagcaggaccttccatttgtcccagggaggcagcctgtgtgtgtctgaggaaaaggtgacggggagagggtgtcctgtacaagtgagacacaggactgacacaggggcacaggaagatgggaagacagaatccaggccaaatgggactggggagccaagccagttgttctgagcaaaccgtttcatgaatcttcatgggcctctcatcttgtaggcctgcttgtctcaggcaggttgttggactgggcttccccccaaaaagaagaggctgttccatgccgcaggggtgtcagggcagggtctggcttcacatctgaactgtgggtattgagactagccacccttttctttgtagattctgctatagagaatgactctgaaactcttgcaaaggcttgaggtgggggtgagggtgtggacagtagttcttagcagccagcccaggccattgaaggagcaggctggggtagcacatcatagtgcagtagttttcatggctagatctcaatgccgagcaaacaggcaaaaagtgtgacctgaccaccacctacaaaccatgtgccaaactgctcctacagcccatggccatgattgcccctgaatatagctcacctaggctgtcagagactcctctgtatgtggtgaggttttgggtggcaaatgggggtatgatctcatttttgttggcatgactggagggcagggctgtagagcagtggcctgtgctatgggcagctcagctgtgtaccttttcatcagtcctgggttctgctggatcataatgttattagcagagtagcattggagagtgcctggttttggagtttctagacagggctctgaaaggtctgtggcatttctgggagaatctttttccctgaagcttcctgactgagttgcccatgaaggcccaaaatatgatgtgagctccagccccaggccctctggagagagcagagcagatccagcactgtggccaccctgctgcatagccacctcccttggcccatggctgctcaggttcagtttgccatctttttcctattccttgcttcataaatgcagggctgtggtgctaagtacaagtcaattgtcttgagtgtctccacttcccagaaagctatttggcctactgaccctgtttggaagatgcagattgggaggatgacaatgtaggtaatagatggcagcaccttctttcccttgcccaggccccagtcccagctgcccccaccagtcctgctctggctcaccacggggcccaattcagagtcctcttttgtttggcttgcacagagcagctccagctcaccgttcccacatgccaaagtttccccaccattcactggaaaggctgaaaagccctcagctaattgagttgggctgaaaattaccatttccctgtgttcccctgctgctgaggacatttgtgtcactgctgtatttagggggaacaaaggccccctgtggggagagcccaggtacgaatgtgggatggggggaataattgcagtctctccaggtgaaagcccctgttaaacttcagtaagtcaattaggctttgcggggagggcagagacccccacaataaactgttcccaccaagcaattaaagaaaatcattttagctttgaggagagaaactgcttattagaaattttgtgggcccccccacttccctaccccaggcccccttagggatgaaacaacaaaacgccttcctcaatagaagtgtttctcctccttccactcattgtgtggcctgaaagcacttaccgtgggagggaagagggagggacagagactggcctaagggggagaaaactgcaggggcttaacacctgggctagtgcaaaatcacaactgcccagtaagtttaggtaaagagacccctgtgggcacagtgtgtctacaggatctgtgtggagtttccttgtgtgggacatgtgtgcccacagaccgctatctgctccttagcacaagtggagatgtaatgcaaagcgtgcacatgcctgcggcatcctgggtgccctcttaccgaagggagcaaacgcggctgcatgtatgtgtgtgtgtgccttctcagcaaaggatggcaaggtcaggacaacccagagggcatgtacctcttcccaaggctgtgactaggcccatgttctctctcttcccaggggccaaatcccagcacctgggagttgagccatagcacagctttccaccttggacagttggcaactgaaggctcaatggccagcagccacctactgggcctgggctaggagtgatgtgtggggaattgaagggtagatacgctaatcattacaatcttgctcccatgttgtttggatgaggtgaggtgtggagactcagcagtaaaggaatcagtggcctgggcggacacatgctttcttggtctctagtttggctgatgtggctcatgagagtctcctgttggcaaagccctgccttctcctatttctgaggagtagcacaagttggaaagataaggtgaccttattttatattatttggggaggatggcagggagggaagttgacctgtgcatcagtagtctataatttggtagtttacaggtatgtatgtatgtgcgtacccccagatcacaggtagtgtaggcatcacgcccagccctgccctaaatcttggcactttaaaggagggcctggtggcgctgatggtgggcatggcattgattcaggcactgccctggccccagtgctcccctgtggctcatgatgtgtttggcctttattccaatgttccaaagaggtgaaattaaacatcgaggggcagacttttcccagaaagcaaatatgctgtgttatttgcctaccaaggaggcttcggaggtagaatttggtgcctacagactggcagtggggaggtgtgtgggctgttgacaaagtcctgagcaggaggatggaggggaggttttatagagagtaagagctgcttggaatttggaagtcccagaggggtgttgtagcttggagaggagcaggaaggggcagctcactgtggcaggctctgcatagtggctgcctgtaaggagatgggacttcagaggaacctgaggctcagatacttgtcatgttttttttttaattaaaaaaaaaatagagatagggtcccgctatgttggccaggttggtcttgaactcttggcctcaagcaatcctcctgcctcggcttcccaaagtgctaggattacagatgtgagccactgtgcctggccacttgtcatgttttgcttcaatttttaaatgtgtatatattcatagacatatatcctaaacacatacacatgtgtggactattttattttattttacttttttgagatagagtctcactctgttgcccaagctggagtgcaatggcacagtctcggctcactgcaacctctgcctctcaggttcaagcatttctcctgcctcagcctcccaagcagttgagatcacaggcgtgtgccaccacttatggctaattttgtaattttagtagagacggggtttcaccatgttgataaggctggtctcaaactcctgacctcaggtgacccacccgcctcagcctcccaaagtgctgagattactagtgtgaaccactgtgcctgtgcctggccacatgtgtgtctattgatatactatacagtgatatgtttatagagttcttatgtaacatctcatatattattttgatacacaataatgtgattttccataaataagctttggtttcctcgtacctaatttctgatttacaacttcaaatgtctttctgatctggggccaggttcattaaaaaaaaagagagtgagagggtttggggggacacacttaaggtgtatgtgtattgttttgttttgtttttttttgagaaaaaatcttacatgcactatgtgaattttctgcttggtttctcttgtgttttgtgtttgtgtgcacatgtcactcagagggattcagaagtagaatatttgagtttgctcctatagtcagatttatttttcccttagtttttgggtcatttgtaccaggtcagggtggagaagagataaaagaagttgtaacaaaggagttgcttggggttacaaagaaagatcacagtcaattggttttgattgtggatgtgtatttttaaactttaattctgaaaattttcaaagataaagagaaaaatagtaaaattaacccctgtgttttccatcaccatcttaattattttatgcatgctttttttccttttttccccctcaaagattctcctatccaattgtgcatgcttttaattaaaattagatgaatacgtggaaaatatatttaaattatctatctcttaaatgcctggcattatggttgttgaaaatggaagggttggctgggcgcggtggctcatgcctgtaatcccagcactttgggaggccgaggtgggtggatcacctgaggtcaggagttcgacaccagcctggccaacatggtgaaaccccatctctactaaaaatacaaaaattagctgggtgtggtggcgggtgccagtaatcccagctactcgggaggctgaggcagaagaattgcttgaacctgggaggtggaggttgcagtgagccaagatcacaccattgtactccagcctgagcgacagagtgagacttggtctcaaaaaaggcgggggtgggggaaggaagagtctaggttgggcagggtggctcatacctgtaatcccaacactttgggaggccgaggcaggtggatcacttgaggccaggagcgtgagaccagccaggagtttgagaccatttgagaccaatacagcaaaacccaatctctacttaaaaaaaaaaaaaaaaattagctggggatggtagcacatgcctgtaatcccatctatttgggaggctaagacacaagaatcgcttgaacccaggaagcagaggttgcagtgagccaagatcatgccactgcactccagcctgggcaacagagtgagactctctctctcaaaaaaaaaaaaaaaaaaaaaaagagaaagaaagaaagaaaagaaaagaaaatggaagggtttgagagtaaaccaaactctgccccattagaatgagtcatgtggtttccagtagaacattcagtctcatcagtccataaaaagggattcaagggaccaaatctctgaagatcagggccttgtcccttgaagactagactcccatccctcaagcagcatccttgttattttctgttgtccagaccatctcctcaccccctactgggagtgggcaggtagatttttcctggcactgttcttaggcattggtataagagaacacctcatctcctttctgaagttccaggccagcctgtgtggttctgtttcatctgctctcctagaagacctaccaggtattaattttgtggttgaagtatcttcttaggccccaaggtgtccagtagaggcctggcaaagccctttgctcatctctcagtgaggacattcagttgggtgagaagccgagcagttactgaacagaggctctatattactcaggacacatttattgtaagtgacagaaaccaaattcaaattcacataaataaaacagaatatttggctcatgaaatccaagggaaaaggtgaaaaaccaagccaaaggcagaactgaaatacacccttgggactagctgaaccagaggccatagtgctgccatggctttatccttctggggtgctcatctctttctttatggttcttagctccttcctttctccaagctgaccagcttattccatgaggctgccaagtgctcctgagtttggcagctcatggcttaaatcagagagagtgactggcttccaaaaatcccaggccagttttgggtcagctgcgcatctcttgattaattaactgtggccagggagggaaagtcatgtaagaacatggtggatctctcaggaatcacatatatggagggagaatgtgggcacacagaacaataggtgtctactagttggataaaggccaaatgactccatgatgtccagtcccaaagtgtctatgtgaatggtgactgagctcagagaccttggctaccaactcttaaacaaagtgaagagtctgataggaactgttgtacagcctttgacctcctccccctcacattattactagtcagcaaataaggattcctcctttgtaagctgttgatggtgtccttagcaaaacccgccatattctaatgtgacatgcacagagaaagaacctggttgcagacacctgaggttgtatgaatgagcagtggcctagcaccctccctgaggggcagagagagactggaaccaagtcctgggatggcacaggtctggcctgcccaggcttcctccaaaggaaaatgattagcaagctgcatgatttgggattaaactgcagggagttgacacgtgcaccagggcttgctgctggcactcctctacaaatggagcactcctttcttgtgagggataggctttacctattgtgtacatagatacagtagctcttattgtcatggatcctacttctgtagtcctactgtgtataattcatgacgcatagcatctctttacaaacagagtggttatgaagcagaagtttgggggaaagcactgtcagagctgccggaaaactggaattctcataggcagctgttcccaggctttcaccactcagaaagccatcgaggtaaagggtctctgtcaagtcccggatggagccaagatatcatgtggtttgtgcaataatcagaatcacatttaattcagtgtgctactaatatgcaacacatctttcaggtaacttcaaaatgagtattttgattaccattcttttaatttcttaatttctgttttgttgttttatacataagtgatacataaatatgttctaattgtaaaaattcaaacaatttaaaatatatagaatagaaaggaaaaatctccttcagtgacctgtgtcccctcccgttatcctactcttttttttttttttttgcaggacatccagtatgtgtcattccagatcttttcatttgaagcaaatagcagatatcatatagtttcatcaatatgtgtacatatatagatatatggttctgctttgttttaggctcacattatacatttgttctgcagcttgaatttctcatctccctacgaggcttggaggtcctttcatgtcagagcaccccatcctaccatgttctttttgactgcagcattctagttccacgccttacaaaccacagtttgtaaccatccttctactgatggacacgtaggttatttccagtgtcttgctgttacaaacagtcctttgggaaacatctgtgtacttgcctatttttacatatggtcaggtatctttccaggaaagacacttagaaagatcatgctggattgaggaggaagcgcaccaaaaagtttttagacaccaccacattgccttccagttagaccgtatcaggttctatacccgcaaacagtgtgtacaattacccatttcctcttatcagtactgggtaatatccgttttttgaaaaattttgccactctgataggtaaaaaatgatatttaatttggggagtgagtataaaatagtgattacggggtcgactttgcagaccacacggctggggtcaaatcatcagtccctttcctactagctgtgtaatgttggtgagttacctctctattcctcatcttccttatctctaaaaggaggagggtaattttggctatacaaacctcatagtgacctttttttttttttttttttttgagacaggatcttgctttgtcacccaggctggagtacagtgccatgatcttggctcactgcaacctctgcctcccacaattctcatgcctcagcctcccaagtagatgggattacaggcatgcaccaccacacctggctaatttttgtatttttagtagagatggggtttcaccatgttggccacactggtcttgaactcctagcctcaagtgatctgcccgccttggtctcccaaagtgctgggattacaggcatgagccactatgcctggctcatggtggctttttttttttttttttttttttttgagacggagtctcactctgtcgcccaggctggagtgcagtggcacgatctcggctcactgcaagctccgcctcccaggttcacaccattctcctgcctcagcctcccaagtagctgggactacaggtgcccaccaccacgcccagctaatttttttttttttttgtatttttagtagagatggggtttcaccatgttagccaggatggtcttgatctcctgacctcgtgatctgcccgcctcagcctcccaaagtgctgggattgcaaatgtgagccaccgtgcccggcccatggtggctttttaaaaatgtttttataacggaaattttcaaaatatacaaaagtagaataattaccaactcttggctaaccttgctccattaatccctacacactttcccgtcccatattattttgaagcaaatatcagacatacaatttcatctataaatatttcagtctgtactctaaaagatagtgatactttttaaatgtaatcctgggctgggtgcagtggctcatgcctgtaatcccagcactttgggaggccgaagcaggtggatcacctgaggtcaggagttcgggaccagcctgaccaacatggtgaaaccccgtctctactaaaaacacaaaaaattagccaggtgtggtggcaggcacctgtaatcccagctactcaggaggctggggcagaagaattgcttgattccgggaggcagaggttgcagagagccgagattgcaccattacactccagcctgggcaacaagagcgagactccatctttaaaaaaaaaaaaaaagatagtaatcataataccattatcatacctagaaaaatattatcaaatatgtaggaatgtcttgagggttaagtgaactaattgatagaaagtgcttagaacagcacttgggcacacattaaatactatgtgtgtttgtaattatctttgttttttctctaatttgcaattcttttttgttttttttttttccgttgttttgttttgtttttgttttttggttctttttttgagatggagtcttgctctctcacccaggctggagtgcagtggctcaatctcaatcttggctcaccacaacctttgcctcctgggttcaagcaattctcctgtctcagcctcctgagtagttaggtggtgcacgccaccacccccagctaattttctttttttgtatttttagcagagatggggtttcaccatgttggccaggctggtctcgaactcctgacctcaactgatccgcccacctcagcctcccaaaatgctgggattacaggtgtgaaccaccacgcctggcctaatttgcaattcttactagaggcttaacattatttcatatgtatttggccatgtatattttttcataaattacttgttcaagttttcactcatttatctacctttttgcctgtgatttataagatcgctcttccctccgcccgcccccccagggtagggaggaagtgggctccaaggcaggatgctggaggggtgcccctccatctctctttttttttttttttctgagaccgggtcttgctctgttgcccaggttggagtacagtggtgtaatcataactcactgcagccttgacctcctgggctcaagggatcagatcctcccacctcaccctcctgtgtaattggaactaaaggtgcatgccaccacactcagctaatttttttcatattttgtaaagacagggtcttactttgttgcccaggcttgtcttgaactcctgggctcaagcaatctgcctgccttggcctcccaaaatgctgagattacaggcatgagccaccacttctggcctcccatcacctcttttaatattctcagtattaatcttttgactatatatcagcagtccccaacatatttggcaccagggactggtttcatggaagacagttttcaatttttccatagcctcgggggtgggaggggggtgagtcagggtttgggatgattcaagtgcattacatttattgtgtactttatttctattattattatattgtaatatataatgaaataattatacaactcaccataatgtagaatcagtgggagccttgagcttgttttcatgcaactaaatggtcctatctgggggtgatgagagacagtgacagatcctcaggcattagattttcaaaaggagccacaatctagatcccttgcatgtgcagttcacaatagggtttgtgctcctatgagaatctaatgctacccctgatctaacaggaggtggaactcaaggtggtaatgccagtgatgggaagtggctgtaaattcagttgaagtttgcttgcccaccacttacctcctactgtgcgtcctggttgctaacaggccatggactggtacaggtctgtggcctgggggttggagacccctgctgtatatggtaattcctttcagcttgttgtttttgatgtcttctgttgtgtagaagtttttgttatttgtaggttaggtctgtctgatcactaccttcatggcttcagaattttgtgtttatcttaagaatgtctttccaagattataaaactattttcctatatttttttcttagacctttatgggttttcatacagtttaaaaatgtttatctccttaatccatctgagattgatatctgctgggaggtaggcttctaattttttttttcaaatgtgtattcagtggaccctataccatttattgattagttcattctttactctcttaaagaccacacttaggatctattgattttctacaagtagataggtgtggctttggattcgttattctgatccactgatctattcacctatttcagcatgaatatcatacaaagtatgttttgatccggtagaacaacttctttcttattgttctttttcagatatttctgggttattcttgtggttttcctcttctagatgaattttagaatcaattgattaagtaaaaatcttgtgtagatgggactgtattgaatttatagattaattgggggagaactgacagttttataatcaggatttcacatctgggaatatgatgtttccaaacttattcaacaattctattttctttagtaaagttttatatttttatatggatcttttctagtgatttttgtttatttgttcatttttctcttgttttttttgttagatttattcttagatattctacagtttttaaattcttttcatgaatggatttttattttatttttattttatttatttattttttgagacggagtcttgctctgttacccaggctggagtgcagtggtgcgatcttggctcactacaacctccctctcccagtttcaagtgattctcctgcctcagcctcctgagtagctgagattacaggtgcccaccaccacgcctggctaatttatatatatatattttttagtagagacagggtttcaccatgttggaccaggctgaactcctgaacttgggtgatccacccccctcagcctcctaaagtgctgggattacaggtgtaagccaccacgcccagcctggatttttaattacattttggttgcaattggttattgctagtatataataacagtttgttattgctgatatataataacacttggttattgctggtatataataacacttggttattgctggtatataataacacttggttattgctggtatataataataactaacatccgtgggtgtgtgctatgtgtatatactgttctaagcatcttttcccatataatctttttttattatactttaagttctggggtacatgtacagaacgtgcgggtttgttacataggtgtacatgtgccatgatggtttgctgtacccatccacccatcatctacattaggtatttctcctaatgctatccctcccctaacccactaccccctaacaggccctggtgtgtgatgttcccctccctgtgtccatgtgttctcattgttcagctcccagttatgagaacatgcagtgtttggttttctgttcttgtgttagtttgctgagaatgatggtttccagcttcattgatgtcccctttatagtagaatgatttataatcctttgggtatatacccagtaatgggattgctaggtcaaatggtatttctggttctagatccttgaggaatcgccacactgtcttccacaatggttgaactaatttatacttcccatataatttttataacaagccaatgcctaggtactattactatttctgtcttatgaagaagaaacagggctgtagagaggttgaataactcactctggatcacatgattactaggtggcagagccaggggtccacacctgcacccctttctactgttgtatgcaacatgccagctacctcatctgaccctggtattaattgtgatagttttttggttgagtcttttggattttctaggcagacaattatattgtctgcaagtaattaccatgtatagcttgtctttttgcatgcttcttgttgggtacctcattttgtgaatattgtatcatcatttctcaggaagtctgaaccggtcagtttttgctttagtacagggacaccttgccatttctttattttaggagcacatggaacagttgtttaaggggccatgtagatggaaatccagtttagaaactcttctccctgcagctcccaacaccttattaaattcaataggatgaatgaacttatgttattccactgtactgagagtttttgttttttatttccttattttttcccctctctattaattctgtgctcccattgctcaagtttataagtttctgattcttgagtgaatcagaaacctcaggcttccttttgtctagcctgggctaggctctcctatccttggttaggctgaccttgtacccttcgttaaaatagagaataatcattttgtgtttctctgtaggcattctctggctgtaggaatgcactcctccgcagaaaccctgctttgctggcccttatttgttggagttgcagttggggggcagggagcaagcagtaagagctccagcctctggacactatccagagcctgacctaggcacctacttgcaccatcctgccctgatgcacttgggttgagagagggttgcgtgtgtgtgtgtgtgtgtagagaatatgtgtggtatgtgtactgggagaggtgtcccagacctctgccagctgtggcctaattgggagaaagaggccagtggggcacctcccttctgatctggagcttcttggcctaaccttaagctactgatcagtcccatcacttcagggcaaggtgtaccagggccatggttgctaacactagctgtaccaggtcgctcaccttcaggtctgcctgcccttggccctgagtcatggacaggagtgttatgttgtcttttctcttataaaatgtaaataatggctgggcacggtggctcacgcctataatcccagcactttgggaggccaaggtgggtggatcacaaggtcaggagatcaagaccatcctggctaacacggcgaaaccccatctctactaaaaatacaaaaaattagccaggcgtggtggcatgcgcctatattcccagctacttgggaggctgaggcagaagaattgcttgaacctgggagacggaagttgcagtgagccgagattgcgccactgcactccagcctaggcgacagagcgagactctgtctcaaaaaaaaaaaaaaaagtaaataatgtgtttttccctttaaaaaacagcacatgctcattaaataatatttggaaaatgaagaaaatttaaaagaagaaagaattgcttatcattctactgcccagacacaatcacttttaacattttagttttcttccactctttccttttctctgcataggctcttttttttagtagttgtaacagtgctgtttgtaccctgcttttttctcttataatagtatatcataagtctcttgcttgtattatttgggaacatcatttaaaaggactgtataatattccattaagtagatggaccatcatttatttaacatgctttggtctttaccccttgaaggcaaggcatatcctcctttccctattaacccattatggttcagtcatccgtgaagttggctaagcttttgaatttaaattttctgtctgcactgtctctttgaggtaatggtatgccagttgctgtgtgaaatgaaacttctttttatttgctttaaactttattaattcaagctttagctaggcatcttgttcttattcggctttagtttgataaaaaaaaaaagttgtgtttatcttcccctgcctggtcttgcagctttggtcctagggcctcccttccttctttcgaaacagatgccactgtggatggtaggttccacaagcatggccctgtccactcatcacagatgtgactcgagcagcttctggagctgcgctctagagggcattcaggtggatgtttccccacctgcaaggtgggatgtttgctggacagataacaagatttgcctgtttttttccccttcccatcacatctatttccttatccctttggtgacccagggtgccctgttggctggatcttaggaactggttgtctcacactttcacctgccccctgcctgtgtctttccccttcctgacttctgttgacctcctgttcccactctactggtctctccctcacagtgctgtcactgcagctatgctcctggcttcccctcaccgagtgagtttttgtgaccttcgcactgtattcatgctttgggacttactgctgtaatgatgtcagtggcggaggttagcagatggcggcagcagcaatgagacctgacatgttctaatgactccctccttcctacccttgctggctgagccaatggagggacagaggtttccttgaggtatttaaggagggggccaagggaaatcggggggcccccaggtgccaatgaggcctgtgacctttgctgctataatatcagtgtttcacaagcagggcggttcgggagcccacttgcagcccatcaaaaattgatttaattgcaatttttcctccaattaggagcactggagcctgactaattggagtaatagagagtaataaggctcagataaaaagccttcctcggctgcctttgtatctcgtgtcagtgcctgtcagaggtcagagagcttgcatattctattaggcagcctggccttcatttgtacaaattagtttacccaacagtaattaaaatgccaatgcgggttgaagagaactgaatacacttgatgggcatgttggtgaatgatgtgacagctctggtggcctcccttgccaaagtgtgtcagcccaggctcagaggctgctggggcctgggccagctgggcggctctaggccagccacggggcacagctgctgagcacgccacttgtgctgccctgcctcagagccactcagttgcttctttcttcttccaggtggagtcatttgttcatttgtccattcattcattcattcaatcaataagcatttgagttttcaatatgtgtcaggcattatactagatgctggagattcaaacaagactaactcttgaagtgtagcccacatgagaacttctgggcgaggggtggtataataacttgggtctggaatcaagactgactgggttccaattccagtccactagttgctacctgtgtgagctagagcaaattaattacctcccaaagcctcagtctcctcatgtgtaaaatagggaaagtggggctgggtgcggtggctcatgcgtctaatcccagaactttgcgaggccaaggtaggtggatcacttgaggtcaggagttcgagaccagcctggccaacctggggaaaccctctctctactaaaaatacaaaaattagccaggcgtggtggtgcgcacctgttaactcagctactgggggtgctgaggcaggagaatggcatgaacctgggagatagaggttgcatgagctgagattgcaccactgcactccagcctgggcgacagagcaagactctgtctcaaaaaaaaaaagggaaagtggtacctactgcatagtgttatgaggattacataggataatgcttttgaaacatgtgctcagcacctggcacatagtaagtgctcagtaaattactagtgttattaagagggcctaagctaatgcagaagcaggaggaatctacctgcctttcaggctgtccgtgcccaactaatttcccttcttaccttgctttcctcttttctatgtcttgttatttttaatctctcaacttgaatacacaaactctaactccctggcatcttcctctggtgagacaggcccctatgtctacttctggagcctgatgatagtctgcatgatgccaggtttgcctgagctagggccaggggacgagtaaggcaggttgaagatctggttaatgtctgggacagggtgagaaattatagaaggctggcttctggtaagggctttctgttccaaaaagagcttatggagtcaaaatgacttttagaccctctagctaagaggggatatgtgtacttgcatgagtgtgcctgactgtgtgtgttttgatgttaatttttaggtgttggtacctctcatctcttacctggttgtggtgcttatgagggacttctcactctcctgatactgtatgcctgtgtcatgtgtcattcaagtttgagcctttggtatttgggaattattcctttaggaagcagagggaccaacttcacagtgcacatgactagctttcccagctgtgtaggctttgggctctggaaggccctcttagttcagttccacaaatttttattgagtgccttctctgggccaggcactgtgctagacagtacagtacccaagagcctctaaaggattctgatctcaaaggggagatgggaagataaaccaaaaatgccatttgtcccatgagtatggaaaggactagaaggatggtcagcctacctggggagccaccagctcttgcctctgtctgttcagcacagatttgatgtccttgtccctggaatacccctgagggaagagatgggactgagggcaaaagccgtttgaattttctttcttttctgagccgagctgggtttttcatcactttcaaacccaaaattgaagttatagcaaaggcctttagtggggaaaagtcactgagcaatcccttgggaggagccacggagggaatgatacacgttttcatttcattgatctccaagtatttattgagagcctttgacacgcctagcacaggagccagcaccgtgagggatgtgacgagaatctggttgaagacatctcgcggattcaaatcgaacaggttatcagagcacagcattttgtttgggttaaatcacctgggttagagaactgaggccagtgagactgcctgtgatgcacagatcccaccccaccagccccttttcaaagcactttatcccgtgagtctcaagggaggagtctgagtgtgggggtaacaggtcctgtgtgcagccacagtattttaagtccattcatggaagcttggcctttgcttcatattcactttctgcacaatgggaataataatatctatcttgtgggctcattgtgagatgtgaagcaccctttgggtgctggagagtagtgaattccttttcttcctctgctccttgtatctgttgtaccctgagattgcatgtgcgcacgccctttctaatcttctgactttgagtgtggctggtctgtagcttttgctcattcttcctaatgaccatgggaataagggagtggggtggggggcaagaatggctgcaggtagtggggagtagttgaaggtgtgcaaaactgtgtctgcacccagcctgacccccaagagtcctgggcaggccccatggtttgggtgtgagtcctggtgagtgtttgctcaaaatctgcttgactattgatggttttttactgagtgttaaatttgattaaactcttaagtcctcctaagtgccaggaagacactctgctttctctccctcttttttctccttgattcatagtggttaggtgagagaaaagggcagcttttggaaagaaacatttatagatgtcacatctaggcagttaagaaagcacttcacaggaggctgagcgccagtggttcacacctgtaatcctagcactttgggaggctgaggcaggtggatcaacttgagcccaggagctcaagaccagcctgggcaacatagtgagacccctgtctctatttaaaaaaaaaaaaaaaaaaaaggccctgtacagggtatgaaggtgaggggcactcctcctggtggcagatgatcagggccagatgtgggtgggccagaatagaggaggataggagtccctgggaaggggatttacatccccacaccaccctcatccctgccactcccacagctctgatctccagcaggattaaagttgctcccctctctattgatttaccttgatgctaatttaggcctgtggccagtcagaggcctgccataggccttaagagatgcctggccgggcgcgttggctcacgcctgtaattccagcactttcggaggccaaggtgggcggatcacgaggtcaagaaatcgagaccagactggcgagcatggtgaaaccctgtctctactaaatatacaaaaattagctgggtgtggtggtgcatgcccgtagtcccagcaactcgggaggctgaggcaggggaactgcttgaacccaggaggtggaggttgcagtgagccaagattgcaccactgcactccagcctggtgacagagggagattcctctcaaaaaaaaaagagatgcctgtgtctgtgctggcgcccttcacctggcccccactcctcaaatctggagagtccaattgcctgctcgaatgatttccaagtggctattatgtttccagcccaaggtaattggctttaccagttattaatggattaccctaaatagaaaaatgtttggggagggaggagagggcaacacctcctgactttgtagtttggttcttcagtatccactggctgcttcccaggctggcagtcacttggggcatggcacagtgactgttttggcactcccactctatagtttagtggctgctggcagccttgaagaagctaggatgatggggcatgtccctggaggaagtcttggcttgagtcatgaaagccccaggatagctcgtatggcctttttatcagcctagggctgaagagcagacacctgccctgcaatttttattgtaaatcagtggtttggccagtgcctgccctaacatctcccccatcagcaactggcaggccaacctccccaccccagccaaagccactggcttctccagggccctctctgtggaaatccatctcctcactgacatgcttgggatcagaggagccacaggtgctgggctgggccacagcagatgggctgttgcccccacattgctaatgtgttattagtatgtccagtcttccttcccccccatgaaagacatgcagggacatggcccattcctaacaccactgctttcaacttgcttgcttgctgtttaagtttcaagcccaggtttcctgaaggcttcccctctccaccctaccaaatcctctaacaagagttgtctggctcataggttcaagttctaggccagcactacagccagcctggcccactgcgtggatcctttataccaggcttgtgcctccatttaaagtgagactctgcagattgtatatgttgaggtttttagggctctaaagggacactctgggcaacagggtcagcctgctccttctcgtgtgcctctcggcgttgtttgttattggcctcagaggactctggcggactcccatcccactctccagaagccctggctgcctggcttctggggactccgccccacctatgtagtagcatatacccatccaagggattcactcatctttcatattttttccttttctcattttggtgcctttatacctgccctgtgcttataccacattaccagattcccccagctcttaaaaccttcaggaatgcccctcagctgctcctacttctgaccacgggcagcaccttccagccccagcaacctgttccctggagcccttttctgtgccctgccattgtgctcttgggattcctaaacaggagcccgacaggctcgctctctcctgggctcaaacttgtcacgtctagagatctgtttttatggtgtgcagagaccactcaacctagtctgtgcagcaggcccagctgtggctgagctcgtgggtcttctggccaggcaccactgggggctacacccctcacagtgctccaagatgtcttcccacagctcctctgatggctcccttggccacttctctcattctggcttaacccacaatcccctagggaatgagcacggcatttcccattgttagccatttccaccacaggttctgacaagccagatctgactttgttctccttttgtttggcagctcttttgtgacagggacggcttgttgcgggcacttctcacccctgagaatctgggacctcaacaggtaagagattcatgagcccatgctggcttccagtccaggaggtgagggaaagcttgctgagccagcctctgcctcagttggctgagtggtccaggagaaggctgggaagtggtctagtaggaggcctctgctgtggtgccttctcacatggaatcattcagggttagctggaggagactgctgaagtaatttataataggtaaatagtttcatgtagaatttatgataacaacaacaatttggatttatgatactctttctctgaggaatgcctatgtggctatataaaatcccatctatccccagagatgattttgctaaaataaagaaattttgaaggtggcctacggacctataaaaagaattatacagaacagtgaaaatacatgcaggttttattcacaattctctgccttggcaggcttgacatattcccatctgattatctgccattctggttttttttttttttttaactttctaattttgaaataattatagattcacaggaagttacaaaaataagatggaaaggtgtttgtgtaacatcttacataatatgtaataatcaaaccaggaaatagaccctggtaccatccatggacctttattcagattgcactctgtgtgtgtgtgtgtgtgtgtgtgtgtgtctgtctgtgtctatgtgtgtctagtcctttgcaattgtatcacgtgtagattcagataaccatcaccacaattgaggtacagaactgtttgttccatcagcacaaaaattcctcatttaccccttggtagtcacacccatccttctcccctcctcctcttcccattgtccctgattcctggcaacttcttatgtgttctccatctctataattttgtcattttgcaaatgttacataaatggaatcatacaatatgtcactttttgaaactggctttttaaaaacccagcataattcccttgagacccacagatgttgctgcatgtatcaatagtgcattcctctttattgctgagtagtattccatggtatggatataccaaagtttcttttccccattgaaggatgtttgggctgttttcaattttttgactattgcaactaaagctattacaacacgtacaggtttttgtgtgggcatacattttcatttctctgggataaatgccaaggagtacaaatgctgtgttgtttggtaagtgtatgcttagtttttttacctgccaagctattttttggagtatctttatcattttacattcccaccaccaatgtatgagagatccaatttcttcacatcctcaccagcatttggtatttcactatttttttttcttttttaaaatctatatttatttatgttttttagagatacaggttctcattatattgccaaggctggtcttgaacttctggcctcaagcaatcctcccatctcagcctccctagtagctgggactacaggtgtgtgccaccatgcccagctaattttttgtgtgttttttggagatgggtttgccatcgtgcccaggctagtcctgggctcaagcgatctgtctgcctaggcctcccaaagtgctaggattacaggcatgagccatgatgcctggattcactatttttaaactattctaaaggtgttatatttcatcatgttttaatttgaatttccctaatagctaattatgttaatatattgtcatgtgtttatttgccatatatttcatatatgaatattctctttggcgaaacgtctgttcatgtcttttgcctgctggattgttttcttttaatggaacacttcatgtatttgcatgtcattcttgcataagagccatgccagtcttctctgtatcatttccattttggtatatgtgctgccgaggcaagcagtttgcttttttttaccattgagttttgacagttctttctgtattctagatattagtcctttgtcaaatatgtgatttgcaaatatctacccccaatctgtagcttgtctttttttttttttttttttttttgagatgaagtctcactatgtcgcccaggctggagtgcagtggcgtgatctcagctcactgcaagctctgcctcctgagttcacgccattctcctgcctcagactcccaagtagctgggactacaggtacctgccaccacacctggctaattttttgtatcttttagtagagacaggatttcactgtgttagccaggatggtctcgatctcctgacctcgtgatcagcctgcctcggcctcccaaagtgctgggattacaggcgtgagccaccgcacccggctgcttgtctttttatcctcttaacagggtcttttgaagagcaaatgtttaaaattttgatggaatctaaattattgactttttcttttattgactgtgcctttggtgtcaagtctaagaactcttcaccttgccctaggccccacatgtggtctgtgtcttaaatgccacatttgacagcactggcgaagatgctcttctcacctgcttcctcagttgctgtagctttgtcttctccatttttctccatctctgtaggaaagcattagccatagcttttttttttttttttgaaaaatccattctatagtcagtcttttcaaaatttttaaaacaacatgagatgttttaatcaatgaatcatggtttttttccttcaacattctcttttgatagtcatccaagaacagggatgggaaactccctacttccccaaacaaccattccgtcttttggtagctctgtgagtgagaatgcccaccctttatcatggattgatttgctccctgaagctgtgatcctagacaagagacaagcaagttgaacctctctcctgaagaacagacttttaaatatctgaaaaccttggttctgctcttccagggcctcctcttcttcaggccaaaagttctaggtccttcagttgtttctcattaacatagtagataagttagccataacttatctgtgcctcttgctgtgatctggggccctctgagcttcagtttcctcatttgtaaagtggaaattaattatccctacctaacagaactggtatgaacaaaattatcgtgaaagagtttcccatacagtgcctgtcaccttggaggcattcaactaatgcaagctgtctctttcctgctcttccttcccacccaaactagtacctcggagtttgtggaagcttctttttttcttgagagacagggacttgctctgtcacccaggctggagtgcagtggcatcatcacggctcaccgcagccttgaactcctgggctcaaatggtccttctgcctcagcctcccaagtagttaggactatagacatgccccaccatgcttggctaacttttaaatttttttgtagagacaaggtctcgctatgttgcccaggctggtctcgaactcgttggctcaagtgatcctcccaccttggcctcccaaagttgtgggattataggtgtaagccattgtgcctggcttgtggaggcttttaattcttaaaatatccgtgtcttagtgactagtggaggcggaggtgaacctgctgaactcctggcacagggaaggctcttgacaatgggctgtgggtcacaaagatgggcattctgatgaaagtttttacttggttacatagctgggccttgtgtttggcatcatcacctgcctgggcccaggatgacacacaagccgggtggcgggctgggtacaccactgtgacccagcatcatctcaaatgttgggtaatctttgaatggcctcttctgcctatggttgccttggtgaagggtactcttcggtacagatttatggtcaggatggagttctaaggcaccatttatttgactgttattctcttatgaaacccctagatctcattaaccccaaacactgggtctttattgaaaccagaatggactctaatgagaataggtatgagacagtgattagccaggcatggtggctcatgcctggaatccgagcactttgagagactgaggcagtaggatcgcttgagctcaggagtttgagagtagcctgggcaatatggtgagaccttgtttcttatcaaaaaaaaattaaaaacagaacaaaacaaacaactatggcctcagttcttcctggagcctgagaagaaacagccctgcccgctctggccagcctgtgggctctgctgcttgtggcagggttgccctgggcaccacttggcagtgccttctctccagccccaggttcatccactgggaggaaccaggctttgtttaaacatctgtcctgtccccagagaagcttggaggaccaagtggtacagcgattgaggaaagatgccctggtggaggcatttgcttttggtgggaggaaatggatggacaggatgactctctagagctgtctttcccagagaagcccaagtagataataaagccatgtagaaaataggattaaggtaatgaacaggcaggacaaagtttgatctttcagtaacaccaaagcctgactgacaggccaatccgagaggtggagcagcattgccggcaggacttggggttgggcggtgagcggtgctggatggattctttgcttttaacctgtcactgctgcaacttgaggagcgcctggattttctcttttatgtatgtgctggggcttgggcagagagcggggagtactggaggggcagtttgccctaagcattgctataccctggatgatggtgggggctgggacacattcaaagctgtagccacccactgggcaccagcgctcccatcaggggagccatcacccacgtctatgtgtgtctctcagctactcaccctcagacagccaatgctgcttctcacagaacctggacccctttcagggtcaccattgttccctcagcccctcattccatcaagaccactagagactgttctccttgcaggctgggctggaacagggatggaggggcagttgctagctggagcacacaggtcagaaggcagccacaggcacacagccgttgcctaaatggcaaggagcttggctgtccccttcccccttcctcttctttttttttttttttgagacagagtcttgctctattacccagggtggagtacagtggtgctatctcggctcactgcaaactccgcctcccgggttcacgccatcctcctgcctcagcctcccgagtagctgggactacaggtgcctgccaccgcgcctggctaattttttgtatttttagtagagacagggtttacaccgtcttagccaggatggtctcgatctcctgacctcgtgatccacctgcctcggcctcccaaagtgctgggattacaggtgtgagccactgcgcctggactttttctgcctttctgtcttctggaactgggtaccatggggttaggcccaaggacagaggattactatctaaacgagaaagagtccttcacccaacctcaaagtgccagaatatttctgcttctgatggtaggtggtcttcaagcccattccctaactcccaagtgccaggaattccggtatcttcatcttgattgaccaaccactgaagtatccctagctaggccctgtgatcccatcaggccctgaggaactatgccaaagccatcctgcccgagcctggagtttggaggaatcaaggctcatcttgtgttctctatgtttgagcaggacccttccttggctaggccccagggaaggtgccttgtgttgactgtctggggcccagctcctggcagctggaaggcccaagtgggtctgactggcctgacatcacaaatacccccttcctccatgggcttcctcttgctgtgggttttttttttctgccaaggggcatttgagatggacctagcactggtgccctgagcacagggcacagctgggcccctgatagcctgtgggcaggtgggcttcaggatggagagccctttaatcccagacctgaaggtgtcatagtaggtccagccacagtcacagccctaagccccactgggattgtggggtggggaaaggggtggggaggtggttggtgacctggctgctcctagggtattgagtccttggccaggtcctgtgctgccctgtgtgtgtggcaagccctgcacacatcccattgattccccttcccctttgggccagggtcatccctggtcccatgttacacctccacttccacctcaaagctcccaagttccccttttctcaacaaaggcaggggcagaataggcttctcacccatcctaacagatgccctagatttttctcctctgagcctgtgctcaagccaaccccatgcccagaataccccctctgtgcctaatgaaaccctgctcgctcttcaatataaacagcacctccaccacgaagctctccttgatcctgacccctgtggctggagttggtggccctttccactgaacacagtgttggaacactgataagggccacctggtcagccatggctgtggcctggtagaactctccctctgagctgggaactgaccttggtatcctgaactgagcacaggatatgagtgagtatcagggcatctaatgacatttggaataaatggtaagggacatttggctggagccccttctgtctggagaaggaagccgtgtcctgcacacaggctgggccactctgagagcactgttagtgcccatcctgcccaggtgtggctttgtctgccctggccctctgcccccaccttgtgcaggggcctggcccacagtcagggtgattacgggaactgcccctctttaaagtacctcccttctcctttgaaagcattactgatagctttttttcattctcttttttctttacctctttaaggaaccctgtaatttctttctttctttctccccccttaactttttctttcttgtctcctctgtccccctgaactctttgaaattggctctctgcctgctgacaccaaactgatactttgcgtttcacttctccttatccctttatggcaacagatgttgaaattttgtatccttttatctacgcggctgccccttcctgtaattatggcccccttgttagcagtacaaagtgggctgcctggcctttgagccattgtgtctgaacacatgtgcgtgggtgggtgctgggggtgtgtgcacacagacacatgcatgtgagaggctgtatgcttgagaaggcccttccttctcacctgatggggctgaggcaagtgaagcttccatagctcctccattgttaatgtttagaacctatctgtccccttgattctctcactacctccaccagagggcaagcctctgggcatctgtgaggtggaaaagcctgcaaagagctggaaagggctggaggtgaccctgggtaactcttggggcaagtcctgaggatgttgaggggccagtgatggagtggctgcattgtctgtgaaggtggggagtgccaccaccctgaagcatatagatctaagatttactaggtgcgtgacccctgcgccttcattttctcatctgtaaaatggggttaagaaacttacctccaaagcctgttgtgaggattaaatgggctgatacgagtaaaacactcagcacgttgcctggtacacagtatggactcaggatatgtgagctgttgctgcggtggctactctgccaccaggtaacctaagcagccgtctcatctggctccagcagacacaaagagaacaacaggcccttcagcttacttccctctgttcccgtcatcctgaaagctgctaccagacgggatttccaggagctctgcctttatcatggattcaggctctgcctttccttgctatacgacattgtcactttttgtctgtgactcttggtttccttatctacaatcggggcctggactaggacaatcactgtttgttcaaaagcctcatggctgtctgccactcacggagtttgtgccaggtgagggatgtgcaccctaaggcccactgtggcctggaggccagaccctgccagcacactcccaagcctccaaccaaaccagattgccagctgccgccaaaacagcctggttgccctagtgctgcacctttgttgttgctgctcctgccacctgggccatctccctatcttgtcattgcctatgacagccctgtctgtcagtgaagaatcagtcaacacccccagccagaaatgcttgcttttcttagctgcccccttgtagaactttccgttgttctctgtggtacctaccaactcacattttgatttgttagttggatatatgttgcagacttctttctctccctggattgaatactccttgaaggcagggacaaagtcttcttgatcaagtcacagcttacatctccctgtagtttccattaagcacaatgctttgtatacagaagatgctcgactgaaggaaggagatagaagggaggaaaaacctcccattctctttgcagccatgttgggcccagcttataccttcaagccatctgtcccctaggcagcagagatggaaggtggtcaactcttttgtcacccttccctcctctctctctctccaaaagccattgttgcatttcaaggtagcacatggcagacaggtgcacaggtaggcacagactcaaacagatgcaggaatgagcatctgggtctccagagcataggtctctggagcatagggtctccagagaacagcatcaggaattcagtatgttaaaaatgactgaaaaatggtgtgggagccacggacatgctgagctgtgggttgggaggtggaggaggtggtgactcaggagtgctctagtacaggcggctgttggggaggctgggagaagtgcagcagggcaccaggcttcctagctctgcagacttggtgggcaggggtagggtgccagggactgccccctgtgcccagtccagcttagcactcagggcctgtccctggcgggctatccaggtttttagggccagcccctaccatcagttagctgcccccacaaagatggtgatgggtgtcagcatttcatgtaaatgtccctcctctctgactggcaggaagttctctccctccagctgcagtagagtcacctgggcagcaggatggtttgggccagggggccctgacctctcaggggtgtggccgcactctgcttgcttcttcttgtccaggtagtggggttcccaggagcagcctgcacacggtcagagccaaggaaacaggtctcccccaggttgcccctcctcagcctgtgtctcattcatcaggctcacacagatggccccatctgtctttatgtttccctgggtggagagagaattgctggacttgactcggcggaggctagggtgtggaggcccccagcccttagtggatcctggaggcctgggctttgtccacgggagttggaagggaatggactttttgtctggccctctatagtgacaggctggcccttgctcccgtcttggcctggggctctgagcagcagccctgttcccacacaagctgtgcaacagccaaggctctgcacccccctctcgccccccacagtgagaggccgagaagcattcttaacattctttccagagaaaaggggtgaaatgtctgaatttggggggtcaccacgttatacaaattgcaatctaatcgtttttataagaacacacttgcagtaagaaaagagcccaggaggaggggatgaggagacagacagcttgttttgtccccttttcccccaaagtttggggctattgtcgggccaatctctccctctaccagagcagttgagctagagttttctagttaaataggtcttggggtgggggccgagaagggcccacggtgccatttctgtttgttttcccaaatcaaagccccagcagggctcctgtggcactgctgggttgctattagaagagatgggccttttcccagagcctggcgtgtcagtttatgctctgaacttaacctcacgggcaccacacaacagagccttgagggtcctgggcccaggggcaaaagaaattgtatcttttcattggcccatttaaagtgtgtgtggccattttagagaaccagagaacagcacagcagaaagaaacttctcagcccctgccaggctgtgcgggcagagcaggggctctcaggacttgtgctggcctccagggcctggtgctcactgggcccttggctctccccccgagggcagggaccccttgggctgtcctgtatttctgactgcagatacttacggccatgacattttccagtggtggcatgaatgctggggtaggggcccagcttggcagcccagtctgggtgggccttttatactgctgtccctgtgcagccccatgagtgcccagctctccttccctctgaacccagggaccagggtgggcaggtagagccatgctgggcttcagtcctcccaacccccactgcctttcatcttctatttcaaacaaacatgaaattacttctatagattaaaggggagagctcctcaatcattccttaaggcctcactaatggagggggcagggcccccaaatctggaagagggaggagaactgtggagccaaacagcccctacccagcatgcacccagtatacctgtgaaagagagagaatgactcccctacagggctctggcctgcccagggtggctgaatcttggctggtggcccatctgggaaggcagggcttctctgggagccaaggttagcagtctctaagggatgctgatctggggagaaggccttctgcctgatccctctcaggagccccccaacagacagaggcttgccatcttctccccgcaggcccagctctgggctactgagaggaagaccagaacttccctgaggaggctggtagcaggggtgctgccttggggattaattcccccctggcagcagcagtgctcctggccagggcccactgcccagggctcaaaggggaaaggtggaaggggcagaaaggaacccccagtctcctcctttgattccttcggccttcgggaagatggcagctctgttggggagaagggaggttgtgggtcagggtctcagtgaggtggaaggacgagagctgacatctgcattcagacatgtggctggctgccttgtctgcctcaagccctttgctgacatgctacttgggccaaaagggctggtgagccatgaagtcccctcactccatgccagggcctcttacctggacatccctgtgaagtgtccacggccttgtttctcctgtcatggcatggggaaagcccagcgtctcacgggtaaaggaagctaaggcatcaggcctggagggcgccccttttccttcatttcccccagtcattctgtggaaactccatacttgcacccatcccctggctgcagggattagcgggtgcacttgatgttgaggggtagttgctagggacaggaggcccccctacatagttgctaggggtctggcatcagggcaaagggtctgcccactgccgcggtcacggagggaattacacagtcacaaagaaattgttctcagtaatctgctctcggcccccgggtggggtgagggtggggggagcaggctggagccccacaggctgggggctgtgatcacggaggcgtgctagccccgggctgggggccagctagaccaggaacaccagggacagctcgctaagctgctttctcagcgatttttctccccagacacaaaggtgtttacttgttttaacatctcctgggactccccttctccctttgtgtggtctttatccccaatgaggtttgagccccagattacaggcaggaattaaggcattggactcaggcagctcagaactgcatgacctgcaggatcaagatgtataaagtaaccaagtgtgtgtgtgtgtgtgcatgtgcatgtgaatgtgaggggggccgaccccttcagcaagcccccccattcattgtcctgaggaggagtggctgggtgggtggcagccggcacgcaggtgtgatggaggggctgctgagggctgggatgctgggggaggggtggggcctgggactggttgcagaggcctcatggcaggggtgaggtgggtaggaattgggcatctcctccctgagcccccttccttgagtctcattctagctgaggaaagagaacatttccccaaggtctgatgccttctgaaggtggaacgaatgtgtatgacccacgtggagcagcctctcactccgtccttcccttcccagtgggcagctgatgacacacttgggcagtgactttcccccaggggctggggtgctggatgtcatgtatgagtcccctttcacactgctgtcctgtggctatgacacctatgttcgctactgggacctccgcaccagcgtccggtgagtgtgctgggcagggaggacaggtggtgggggccctgcaccaatcctggtccttcctccagtcctgggttggcccatgggagagggcacagagactccatgtcagggctgggaaggaagaggcctgcaaggtcactagacttcctacatttgggcagccctggtcccagtggcttggctatagccaacaggccttggcaaaggcaggcgtttcccagagcctctggagccgtcagggtactgtcactcaatattctctcccagcctttcttgaggcctgtgttacttcaacctttcttgagtccagtgacaagtagctggccatgtgaaaacagaagtgcaggcataatctgctgtgtcgtctgggccatggcgagagccctctacagaagatgctttctcccatgaagttcggtttttgatgaatctgatgatttaggcttctttctcttccatcccggaatggctccttaacgctcccctcagccactctaggcccaagaaagctggggtagaggtggagggtaccctaaacctccctctgcttctcctcttcctggacaggaaatgtgtcatggagtgggaggagccccacgacagcaccctgtactgcctgcagacagatggcaaccacctgctggccacaggttcctcctactacggtgttgtacggctgtgggaccggcgtcaaagggcctgcctgcacgtaagtgtcctgcccacctcttctccagcatgccaggactcatgattatgggctgcatttgggagagggtgaggtagccaaggacgtgcctagaaagggttggaagaagcctacaatggcacacgtccctcttcccctgggcctggggatcctgggttagggcacacccatgtcccacttggaaagctcttaccacttcctgtgccctcccttccaggccttcccgctgacgtcgactcccctcagcagccctgtgtactgcctgcgtctcaccaccaagcatctctatgctgccctgtcttacaacctccacgtcctggattttcaaaacccatgaccgtcagggccacccctgcctctgggccagggaaaccagctactcagggacttctcttgcctggagggtgcagtgatagctcctcctcactgccccactgtgctcctgggcctgtgaccccagtgctcaggcaccttgcactagaggcttctgactcctgggactttggagcttaccagagatgcagtccctcccaggaacctgttggagaggcaggacctgctgctttagagtgcggctgaacccgggccttgcgtccctgtttggccagagcaaggatctggcctggagaggcccatcctataccccttattagagccatgacagcctacagagtgaggtgaggtgctcccaccttcccagatggttcctttctgccccttcctggaaggaaaggtgaggctgccaatagcctcctggcaccagccagacctcacccttgaccaacctctcggggctgggggttcattcctggggcactgtggcctggttttgctttgaaaccaagaaagagcaaagggaacccagcagttctgagtgagttctgagccagccctacctcaggctggctgttgagacatgctacaattttcatttttgtaaaaataaagcttgattgttcacagatctggttcctcactggctgagtagtcctagcaggctccaggagaagggaacagcagacccaagctcagggttgtatgtgctgctgaaacgacaagaccagcctcatggctctgtgtcccaaagaacaaaggtttctttttttcaggaagagttcccattgatgacctatcccttaccctttggggtatggagggtcacctgtgggtttggagaggggactgtggaaagggtacaggctgctggaagctcagttgttgcctgtggtgacccctaccccaacacacacccttggcaaaattatgaccctgattctggctttttacccacaatgccttaacatcctgtgttctacttccaaggtttctgttttgttttttgtttttgtttttttgttttgttttgttttgagacggagtcttgctctgttgcccaagctagagtgcagtggcatgatcttggctcactgcaacctccgcctcccaggttgaagcgattctcctgcctcagcctcccgagtagctggaattacaggcatgcgccaccatggccggctaatttttgtgtttttagtagagacagggtttcaccatgttggccaggctggtcttgaactattgacctcaggtgagccgcccgtctcgtcctcccaaagtgctgggattaagacgtgagccactgcgcctggccggtttctgcatttttaaaacttttcccttgcccacacatcttcaggagtttcctctgagccacttctgcaagctacggtagcacagggtccctccagcctggtcttcctctgagtttgtgtaaacaggttgcagggaaaggccagccctgccctgctagggccatgtgctcccaccctattctccctttttgtggaaagctttatgttgtaggtctccgggatagagaaaggaatgtcatcacaccctcccgagggaggccagtggggtctggggccaggcagcatacagaggggaacaagagggcagtccctgtgcagtaagtaactcagaatgactttactcaggaaatatgaccatgactcactggctaggagtgccccatgcccagttcttagagacccttgatagctcctagaagacaggaggctgccgtggtcaagaagggccaagccttgaagtctcacggcaccccctgtggtggaggtataaggctcaggggccaactactgggtcttgcagtccccatcgttgctgtgggctgtcttcaccttctttagttccttctgtagctcagactcggccaccacaacctcctttggcttctggtactgtggatgcagccaggaataagaaaataattcagtcactgtcccatctccttccacacacacttggggccccttctccttctgatccccttatttgcacgagaaaattgaggcctgtaggattgaatgatttgctcaaggtcatgtgcctgagtaggagcagaccttggaccagaagaacccaagttcagcaatttccaccgcttccctttcaccctctaccctcttctagctgtgaattatatggtcaggctccttcctgagccccctccctgctctcccccatgctgaattagagatgcctattctcccacaagcataccctagggcttggggctagaactgaggactcttatgggatgggaagtgggcagggaaagaggaagactctccctgatgcagtgtccaagaagtctgggtgaatcttacagagatgatcagggtgcagttggcgtgggcaaagctcagcaaggcgtcatccagaggtagctggtgtctatctagatcaggaatggagaacttcttgtagtacctgtggggacaccgagaggccattggggcactcggcaaggtgacccaacagccaggcgtcaggccctctgctgcctagcttctacctagttcttccacaccttccacacacgcagagagggagaagggaaaccagttagaacaccagtatttcagagctcagtggccctggaaagcatagaatgcaagccttatgtccagtccagtggcagaagagcagaacctagttataattctgtgattagaccaggggttgtagtgactcacatctcagagctgggtctcccaaagacaggcagaagaagcctggaacacacaaatagctcaagcagcttgggactcctctacccccaaagcctcatggagacaccagaaaaatgggacgtgttctaacaaaggacagagtaaggacattcagatctgtctcccaaagctggggccctactgttaccatttacatgggaggtccactgaaggcctcaactacctcttcctcttttggggcctttcaaggccttgttagcctggccttgtaggccagagggaaaagtatatctactaggagaaatctctttgagaggacgaaccatgttactcatcacggaagctggacctctggactacttggctggccccaagtccctactcctccatttttacatatcacacatggtccttatcatctgcaggtgccggttcagcgattaatgatgccttttaattaaaaaaaaaaatagaacagatggcaacacccagtctgtaatgtgtataactagactttgcaggaaatttgaccccccttacctaaaagggaactcgggctcagagagatgaaatatcttgccttgtttcacggccagttgtcggtagggatgggagtcaagattagagtaagattccttgtccttggtctgatccttactacaccaaagcacaatgaatggcctcctcatctctaacagtacaccaatttggcattttccttggtggaaatgtggcttaggctctggccaggggctgctagacctgtcacttgggcaaggcatcactttctgctgcagaggttgtatgggctgtgaagggaaacacctcaggcaggtacaaacaaactcaagtgagaggcctggggaggatggggcttttagtacttcagaggggcctggtccttgtggtgacagctaccctgagtccacttcaaaagcccctatgccctggggactcagagagttgacatcaatgcagcacttctgcccccgtcctccctgcccaaatccctccgttcaacagaggctctcggggcccctctcctcccaggttccccactccccaccaaggtactgggacccatggcaggaaaagaatgtttacttaaaggctgacagttcaaaaggagtgggggctgggggatcctaatggcattgcaagttgctttattttccaaagctctgccccagggaaaggcgatccatctgcctgcaaaccggggatggaatgcctgcctcatcctcttcctagccagctcaggctgagggctcttcctggggcctttggtctggccagcaaaggtggcagacactgataataggggagagtcaaaggttaaacagcagagattagatgaacacaaagacttgttaggaagtgttaacatcttccctgcaaatatacacaaaaagcagaaccaggagggaagcagcccagcagaaccattcccccaggctggggcagtgggaccggaaaatgaatcccagggcttggccacaacagcaaggacaggatcagagggaactttaggtgcatagcttgcacctgctttccttgaactactcctaccaccaggcaagaggaatggaggcagagcaggtggaggctcagcttggttttgagtctcttgtaatagatttagtttattggtcgaggttaaccaacttcttagaagctcccgataggctcaagggagtagggagcatctgccttttctcctcctggggaagcccacccccttctcacacccattcccccagacatagggtttttccatgataggtactgtacttgactttctcaccagcacctggacaagagagagacccactgtgcttctggaagggtcataacgttcagcctcaggcagctgtaggtaggcagcaaacatttattgggcatcaactgtgtcccagaccttgagctgtgagctggggatttaaggatgaagaagagggcgggcctggtgactcatgcctgtaatcccagcactttgggaggctgaggtgggaggatcacttgaggccaggagttcaagaccagcctgggcaacatagcgagaccctgtctctacaaaaaattaaaagaaaaggatgaagaagaaacaaggcctccagatgcagtggctcacttctgtaatcccagcattttgggaggccgaggtaggcagatcacttgaggccaggagttcaagaccagcctggccaacatggtgaaaccctgtctctactaaaagcacaaaacttagccaggcgtggtagcagcacctgtagtcctagctacttgggaggctgaggcaggagagtcacttgaacccagggggcggaggttgcagtgagccaagatcgtgccactgcactccagcctgggcaacagagccagactcaatctcaaaaaaaggaacaaggccatatccctgctgatcagaccttgttttgtttctgctaaaagatgaacccttacagcaggatagttccctggcttcctgcagatgccccgctctcccccattcccacctcccttcaatgttctatttcagccatacaatgaaagatgacattttaagagcttattctgtgccaggttctaaacacatttaattgtcaaaacaactctctcaggttggttacttctattatccacttttaaacaaaaggaaactgaggcccagaaaagttagatatcttgcccaactcacaaagctggtaaacagagaagcccgtattaaagtgagaattccccaaatctcctgacacctccatgtctccacattctcaccacaaagtaatagcccgccatagtctagattatttgcatttgtccaatgatggggcagatattgaggtgggaggtggggatgttcaacaatgaacaggttgtctcccctggggtccgaacactctgcgggtcccctgggtactctctccaacacatcagtggccttcctttctgaatgtcaaaagtcttcaaaagatgtatgtggaagtaaaggcttgtagcagaactcctggccctgccttgtgaccccggacaggtcacttaatttctgggcctcagtttccacattccttcttcgaataaaagagctgcactagatgaacttgaagtcaatgtcaaagggcccagaacaggccaactctgtacctgtcttctccctgtttgacagacgactcctccattttgactatttcagtaatgatctattgcctcccaccactctctactgtatcccctccccaatccagcctttcaacccaaaagggcaccagaggccaggccctcagagggagagagactctggaggctgaaggcaggagcagggctgctgtggacaatcacttgggtcatgcctcacatacctcagagggggtgccatgcacacctgcacaccgcatggccagaggggtccagagaagcctccaaccagtccgcctttagaaaagcagcaagcaaatcttcttaaacatcaaggctctgggcaaacttggcacccccacccacagtcgccccctgctagacagtcacaatcacacacacatactaaaggctctcggccccaccaaagagaagcctgtttaatccagagtttcttaaatttatttaaccacagaatccttttttctagtgaagcctattaacacctcccacagtgttactatcaccgatgtcaaatcagccaagctctcctcagattccaatttccaaagaactgttgaggacctgcttcaggccagccgttgtgctggcctgtacatatatgatttcatcaaattccccaaaatctgtgaagtagctgtgagtcttctctgatagatgaggaaaccttgcctaaattctacagctaacagtggcagaggccagatttaacccaacaacttctcactcctgcaccctggctcattccacctacagcggccaacttccaggctgaggctaggagccctctttctgcacaaacgttatcaggaatagatggtccaacactgggatcctggaaaagcacttttttccttccctgattcatccctcactaatatgtgaggccaaggacatgatacactgcaatcaattccttcaagtaaagtcaccaacccagctcttcagagacaaggcaagtatgggtaaagaaactctggctttggttagtaaccacattccagaatattagaactggggcaggttatggaacctccaggtgaaggaagaggtcaaatcagagagaaatgccatgatgtgcatttctgaagtgcagatgtctgagtatcaggagagacagtcactaactttcagcaagctggttcatcatgctgactttatatatacatttatataatcatctataacacaagaataaaagtatggatcctgtccacctcctgacagaatgatgatcagaaaacagattttaaatgtactatatccttaaaaagctaaacactgtggaagggagtagccattgagtttttggcttctggccagaggccacacttccccacctgccagaatggccaccctggtctgggtgtggtggctcatgcttgtaatctcagcacttcaggaggccaaggcaggaggatcacttgagcccaggattttgagagcagcttgggcaaaatggagagaccctcaacgctataaaaaattgtttaaacttggccagattgggtggtatgcgcctatagtcccagcttctcaggaggatgaggcgggaggatcccttgagcccaggagttcaaagctacagtgagctatgattgcaagaagtggactctagcctgggcaatagggcaagactccatctctttttttttttttgagatggagtctcactctgtcacccaggctggagtgcaatggcatgatcttggctcactgcaacctctacctcctgggttcaagcgattctccttcctcagcctcccgagtagctgggactacaggcatgcaccaccacgcctggctaatttttgtatttttagagagacagggtttcgccatgttggccaggctggtctcaaactcctgacctcagatgatccacctgccttggcttcccagagtgctgggattacaggcgtgagccaccgcgcccagccaagactccatctcttaaaaaaaaaataaataaataaaaataaaaataaaaaagaatgtctatgcaggctgtaacccctgatgagaaataaatctctcccttccaaattaataataataataaaggaatacccattgagttctatataattaatgggagtaaaggtataaaatacattcttccaggtagaaggtaaaaatgccactaggttcgggaacgatctggctaagggttcagcggcctctaggttacctcccaacagagagacctgaggagggcagggatgagccaggctgggacactggaccagaggctcagtgtgggttccaaagtgggccctgaaacactcctctgtcctctatgggaatccaaccctcagccctgcccctccaggggcatcactcccatcccacctggcctcacccatcatttcaaaaatgtccaacaacccctgcttgccttgagagctagcctgggcctccagccatggagctcctggccaacagcgccacctatggctggatgtgcgcaggagatgggacccagaggatatgctggcagatgaattttttggtgagctagctagcctctttcctcactccctggtaatcacatttctgtctgatatctgtattcgacagtgacctctgggggacaaaaaagaggcagcagccagcttcacaaagtgctgggctgcagattcaagtgctatcagaagcacttttgttcccagtttggacccaaggcctcttccaccaaggaatgcttgctgaagcatggagtttgttctcctacaggcaatttctctgttgtctgaaattgctaaattccactttaggcagtgactcctgttaatgatgagaacaataacgggaataaactgcctcttatctgagggcttcaaagtgctttataaacacaaacccttattattatgactttatatttatagacaaggcccactgcaggggctgctggctgcatgtacagcaataatcctgaaattaattcatccatctccaccctttcccctgtcctcttaaccctgccaaagcaatgggatatgggggtcacaagaggatggcagcacccagggctgcgatgggggagtctgggagctaccctgcttccctgtgggcctcgtgagcctgagggagatggaaggggagactggcaccacatcacctgaggagatgcacaaggagctgtgtccccattactgcatgtaaagcaagagatgggtgggggcatccccatgaggcatgttgaatggcttcacagcttgcagacaggtaacttataaaacctcccatctcaatgcccaaatctattttgtgggagttgtccctagactgtattctctctagcccaggtcaagattgattcatttcagggtcattcccttcaggcctcacacagggcattgttctcctgtgatcagtcagggctccagaaacctaaatgagatcaatgcatttccaaaatggaaatgcactgtggccaccttctgtcctttcaacccctgcagtttgcctcccctctaggggaccacaaagggaagttgagtaccccttttgaagcattatgcaagagacttccaagcggcccaagcatctgccccactgtcagtctggggagggattaggtttactgctgcccagtctgctttaaactgctgtcaagtactgctttaaaggactgtcactcccacttcagacaggggtgccttccaagctatggctccctgccagctctgacagtgatgtcaccaggccacccttaccaaggcctggctccagtcaggagaccaaggtcataataacctttcagcagaaccacctgagaccacaagttaatggtcctgtgatttccctcatcatctcattcattcaacaaatatttactgagcccctatctatgccaggtactatactagatactcattcaagtttctcttccccgatggagctgattacattattcaggccggtcctgcagagaggaagcccttccaatacctgtaagcagaagggcttcctctctgcaggaccggcctgaataatgatcctaacgccagatcaaaccccaccctacaccccgctcatacacaagcacacagggtgccttccacgctactcacttcttgttggttgttctgacaatgatgcagcgctccttctggtccacagagacactatagacatccttaggataggggaggtttcgaatccgccactggaaactcatcttggtgtccttgcgcatgaagataggctgcagaaggcaaatccaactcgaggactgttcctggggaagggaaggctccaccctcatcagagcgctaccccggggcacaacaagaccctcagctcttctccactgctcccctctgacgctgctattgctacagcactccaggccctgagcccccgccctgggacgatcaagccaaaatgtctgtattcattcaaacaaacatttatagagtgctgtgtccaggtggcacactggaggcgaggaggtgaacaagacatggtccctgccctcaagagccagcagcccacagcccacccccacctcagtccgtgcaagacacctggacagatggacgtacattggcattgctttccttgatgagttcaggccccaggttccctgctcctaggggcgctgggtctcctacttcaagctgccactggcccatggctcccagggcacttttcacacgccactttctcactggggagagaagcaagcatcgggatgagaagcaagcatcaggatgagagtgaagagagggtctctgctcttttctgctgaatcaccggcaccacactaggtaactagcacaagatgaaagtgggagtgttgggcctttactctcagctttgttaatctaaggagggacctcacaacttc

SEQ ID NO: 765 - DNA, 2297 bp, Homo sapiens
ggggcaaggcggaagaggaagcggggcggaagggaagcccgggccgcagacggcgaaggaggcagccgggccgggggctgacgcgggagcgagggcatgcccaagggaggaagcagagggaggcagaagcgtggaggaaggggcgagaggcatcgtcaagggagtcgaggggagcgcaggggccgggaaggaggcacaaggaagagagtatgggaagaaggaggaatggagggtcagggctaggcggcgggagggcgccaggccgggaagagcacagggacgagggggtcaggcttgggccgacatcgcggggacaggggtggccatggcggcggcggccggggaggaggaggaggaggaggaggcggctcgggagtcggctgcccgcccggccgcggggcctgcgctctggcgcctgccggaggagctgctgctgctcatctgctcctacctggacatgcgggccctcggccgcctggcccaggtgtgccgctggctgcggcgcttcaccagctgcgatctgctctggcgccggatagcccgggcctcgctcaactccggcttcacgcggctcggcaccgacctgatgaccagtgtcccagtgaaggaacgagtgaaggtgtctcagaactggagactggggcgctgccgagaggggattctgctgaagtggagatgcaggcaaatgccctggatgcagctagaggatgattctctgtacatatcccaggctaatttcatcctggcctaccagttccgtccagatggtgccagcttgaatcgtcggcctctgggagtctttgctgggcatgatgaggacgtttgccactttgtgctggccaactcgcatattgttagtgcaggaggggatgggaagattggcattcataagattcacagcaccttcactgtcaagtactcggctcatgaacaggaggtgaactgtgtggattgcaaagggggcatcattgtgagtggctccagggacaggacggccaaggtgtggcctttggcctcaggccggctggggcagtgcttacacaccatccagactgaagaccgagtctggtccattgctatcagcccattactcagctcttttgtgacagggacggcttgttgcgggcacttctcacccctgagaatctgggacctcaacagtgggcagctgatgacacacttgggcagtgactttcccccaggggctggggtgctggatgtcatgtatgagtcccctttcacactgctgtcctgtggctatgacacctatgttcgctactgggacctccgcaccagcgtccggaaatgtgtcatggagtgggaggagccccacgacagcaccctgtactgcctgcagacagatggcaaccacctgctggccacaggttcctcctactacggtgttgtacggctgtgggaccggcgtcaaagggcctgcctgcacgccttcccgctgacgtcgactcccctcagcagccctgtgtactgcctgcgtctcaccaccaagcatctctatgctgccctgtcttacaacctccacgtcctggattttcaaaacccatgaccgtcagggccacccctgcctctgggccagggaaaccagctactcagggacttctcttgcctggagggtgcagtgatagctcctcctcactgccccactgtgctcctgggcctgtgaccccagtgctcaggcaccttgcactagaggcttctgactcctgggactttggagcttaccagagatgcagtccctcccaggaacctgttggagaggcaggacctgctgctttagagtgcggctgaacccgggccttgcgtccctgtttggccagagcaaggatctggcctggagaggcccatcctataccccttattagagccatgacagcctacagagtgaggtgaggtgctcccaccttcccagatggttcctttctgccccttcctggaaggaaaggtgaggctgccaatagcctcctggcaccagccagacctcacccttgaccaacctctcggggctgggggttcattcctggggcactgtggcctggttttgctttgaaaccaagaaagagcaaagggaacccagcagttctgagtgagttctgagccagccctacctcaggctggctgttgagacatgctacaattttcatttttgtaaaaataaagcttgattgttcacagatctggttcctcactggctgagtagtcctagcaggctccaggagaagggaacagcagacccaagctcagggttgtatgtgctgctgaaacgacaagaccagcctcat

SEQ ID NO: 766 - protein, 412 aa, Homo sapiens
MAAAAGEEEEEEEAARESAARPAAGPALWRLPEELLLLICSYLDMRALGRLAQVCRWLRRFTSCDLLWRRIARASLNSGFTRLGTDLMTSVPVKERVKVSQNWRLGRCREGILLKWRCRQMPWMQLEDDSLYISQANFILAYQFRPDGASLNRRPLGVFAGHDEDVCHFVLANSHIVSAGGDGKIGIHKIHSTFTVKYSAHEQEVNCVDCKGGIIVSGSRDRTAKVWPLASGRLGQCLHTIQTEDRVWSIAISPLLSSFVTGTACCGHFSPLRIWDLNSGQLMTHLGSDFPPGAGVLDVMYESPFTLLSCGYDTYVRYWDLRTSVRKCVMEWEEPHDSTLYCLQTDGNHLLATGSSYYGVVRLWDRRQRACLHAFPLTSTPLSSPVYCLRLTTKHLYAALSYNLHVLDFQNP

SEQ ID NO: 767 - DNA, 2343 bp, Homo sapiens
cgagggggaagcgaaggaaggggaaggggaagggaaaagcgagagcggggcaaggcggaagaggaagcggggcggaagggaagcccgggccgcagacggcgaaggaggcagccgggccgggggctgacgcgggagcgagggcatgcccaagggaggaagcagagggaggcagaagcgtggaggaaggggcgagaggcatcgtcaagggagtcgaggggagcgcaggggccgggaaggaggcacaaggaagagagtatgggaagaaggaggaatggagggtcagggctaggcggcgggagggcgccaggccgggaagagcacagggacgagggggtcaggcttgggccgacatcgcggggacaggggtggccatggcggcggcggccggggaggaggaggaggaggaggaggcggctcgggagtcggctgcccgcccggccgcggggcctgcgctctggcgcctgccggaggagctgctgctgctcatctgctcctacctggacatgcgggccctcggccgcctggcccaggtgtgccgctggctgcggcgcttcaccagctgcgatctgctctggcgccggatagcccgggcctcgctcaactccggcttcacgcggctcggcaccgacctgatgaccagtgtcccagtgaaggaacgagtgaaggtgtctcagaactggagactggggcgctgccgagaggggattctgctgaagtggagatgcaggcaaatgccctggatgcagctagaggatgattctctgtacatatcccaggctaatttcatcctggcctaccagttccgtccagatggtgccagcttgaatcgtcggcctctgggagtctttgctgggcatgatgaggacgtttgccactttgtgctggccaactcgcatattgttagtgcaggaggggatgggaagattggcattcataagattcacagcaccttcactgtcaagtactcggctcatgaacaggaggtgaactgtgtggattgcaaagggggcatcattgtgagtggctccagggacaggacggccaaggtgtggcctttggcctcaggccggctggggcagtgcttacacaccatccagactgaagaccgagtctggtccattgctatcagcccattactcagctcttttgtgacagggacggcttgttgcgggcacttctcacccctgagaatctgggacctcaacagtgggcagctgatgacacacttgggcagtgactttcccccaggggctggggtgctggatgtcatgtatgagtcccctttcacactgctgtcctgtggctatgacacctatgttcgctactgggacctccgcaccagcgtccggaaatgtgtcatggagtgggaggagccccacgacagcaccctgtactgcctgcagacagatggcaaccacctgctggccacaggttcctcctactacggtgttgtacggctgtgggaccggcgtcaaagggcctgcctgcacgccttcccgctgacgtcgactcccctcagcagccctgtgtactgcctgcgtctcaccaccaagcatctctatgctgccctgtcttacaacctccacgtcctggattttcaaaacccatgaccgtcagggccacccctgcctctgggccagggaaaccagctactcagggacttctcttgcctggagggtgcagtgatagctcctcctcactgccccactgtgctcctgggcctgtgaccccagtgctcaggcaccttgcactagaggcttctgactcctgggactttggagcttaccagagatgcagtccctcccaggaacctgttggagaggcaggacctgctgctttagagtgcggctgaacccgggccttgcgtccctgtttggccagagcaaggatctggcctggagaggcccatcctataccccttattagagccatgacagcctacagagtgaggtgaggtgctcccaccttcccagatggttcctttctgccccttcctggaaggaaaggtgaggctgccaatagcctcctggcaccagccagacctcacccttgaccaacctctcggggctgggggttcattcctggggcactgtggcctggttttgctttgaaaccaagaaagagcaaagggaacccagcagttctgagtgagttctgagccagccctacctcaggctggctgttgagacatgctacaattttcatttttgtaaaaataaagcttgattgttcacagatctggttcctcactggctgagtagtcctagcaggctccaggagaagggaacagcagacccaagctcagggttgtatgtgctgctgaaacgacaagaccagcctcat

SEQ ID NO: 768 - protein, 412 aa, Homo sapiens; identical to SEQ ID NO: 766

SEQ ID NO: 769 - DNA, 56116 bp, Mus musculus
  misc_feature (1)...(56116): n = A, C, G or T/U
taatatgtgctatgagtttcccaattgttaagtccctggtaacagtgaatatatactagtagattctatattaatagctatgatactggggcattgggtgaagagtaaggagtaacttcactacaaaaggctattagatatctgagtatctggcatgtcatcttccgtgagtcatccatccaacagaaatattaacatatctctctctctctctctctctctctctctctctcttttttctttgagacagggtttctctgtatagtcctggctgtcctggaacttactttgtagaccaggctggcctcgaactcagaaatctgcctgcctctgcctcccaaatgctgggattaaaggcgtgcatcaccacacccggctatattaacatctcttaagtcaggcccaaggcataaaaatagtagactcggttcaaataaaactaggatatgcacataaaagaccaaattagataaacttggtgcagtggtgcatgcctttaatcccagcactttgggaagaatcaggcagatctctatgagttccaggctatctctgtctacatagtgagttccagatcagccagggctacacagtgagactctgtctcaagaaagaaaggaagaaaaaagaagaaaggatggaaaaaggacaaaagagtttatcacccaatgacatcagagctacctgccaaacaagggaattctcaaaacattgataagcagaaaggacagtaaattagactccaatgtaattccactgctccttgaacaattattagaatacttatttgttatcttgtgtgtcttttgtccctgttcaaatttatgtgtacctgcgtgttcagatgctcgtggaggccagagtacattggatcccctggaactggaacaacaggaggttgtgaaccacctgatgtggattctggatccggatccaaacctggctccttttcaagagcaataagcacacttcaccactgaaccatctctccagcccctgaacaatttttttttaagttaaaatttgttctgtcatccctcatgctgtcagaatatagaaaaaaattatgtcattagatagcttgtgatggagttaggggcccaggtccacaccccagcagaaccagcaaagcactggaatgtgagaggctggcagtggtagggatgctctggatgagtgccagccagagggatggatgctcaggggtgagtgccagccagagggatggatgctcaggggtgagtgccagccagagggatggatgctcaggggtgagtgccagccagagggatggatgctcaggggtgagtgccagccagcatagctggaatgatctcactgggagactggcttggtttgggcctggtaaaatctgtatatagagaaatacagacaagagagtgtggttcctaggtaggggccagcctgactaggtgtgttccctctggttctgtaaactctccttcttttaacggttctctctctctctctctctctctctctctctctctctctctctctctcacacacacacacacacacacacacacacacacacttacatgtttaatcaccagggacagagcagctgttccccatcaggctaatataacactaaacactactgcaaataatatcaccgcagtcaatctgctctttaaaggtgtcagcgtaatagcagttcattcttccgcaagtgctttgttaattaagctctggaatgtgctgtctttagcaccatttgggagttaattttttcctttgattgaaagagtccttgggagaagcaaaattttcttctgttacccaacttgatgttaaggattgtgacatcacagctatttgagcctgtgggcacctgtcaatcagtaaagaaagaggccggatggcgctgcctctcttctcttgaattacgtatgctactatgaaaactatctattcctctaagtgatagtaacacaaaatgtggggtctttttttttttttaaatcataaccactgatggttagtgaccaaattgaaatcactttccagtggggtttttttttttttaaaaaattatctacttatttattatatataagtacactgtagctatctttagacacaccagaaggggacatcagatcttattacagatggtcgttagacaccatgtagttgctgagatttgaactcatgacctctggaagagtagtcagtgctcttaactgctgagccatctctccaggcccctagcacagggcaattctgcgtggctttgtactttatataaatagaatcatgggctgtacgtgccctctgttacttaccatagcgtttgtgagatctgggaaatggtcattttaaaaatgcttggtattaagcaatatatcaaaaaagtctccctgtctcgaaaaaccaaaaaaaaaaaaataaataaaaaaggcccataagttaggattaccttaaaataggacatgtgtccatgaacaattcatttgcccaacattataagctttttgtcaatgctttacctatagagagaaattctgatttcgtttttggcatttttcttaatcactttattctggcctgcttataattattaacctaagttctgcactgcttagtgtttatccagcctcaaattctttctagtgtgtgcagcaacattatcataagataaatataagagttaggtgtttctcagctggtgacttcattatagctggtaacctttagtgacgtaggggtgtggccagctctggccctgtaggggcatctgtcagagaaaccctgtctgacttcatcacaaaagggtgtgtacatgtaacccatctatctcataaactactgtcatgacgggaacctctgccttcggcaacaggcagccagagtctatggtttaaatgttcactgtaaaacccaggtgacagtcatggaagtttacctgccaccatagcccagccatgctcagcatggctgtgggagaactgtttaaaaatctcttcttgttaaaattgtacaggtttttttagtcctcaccttaggtcaccaccggccaggtcgctgcagactcttcactccctctgccatcaccaatctcaggtcacttctgccagcctcaccctgggccttttacacacatcccattccccactcacctcccacccctcatcacccatccccacccccattcctcactgacccgcaccccaacnnnnnnnnnnnnnnnnnnnnnnnnnnnnnnnnnnnnnnnnnntcttcccactaaccccatcttcacctccctctgaccgacccgcctttcttcgtcctgcttttgcctcctctgcactggtttctaaactctctctttttataaagctgtgtctggcaagtctgagtttgggcttctttttcttggcataattcaaggaatcctaaaccctgccaaagccaccacctaagtgggttctaaatccacacacagagatgacagccagtgggatcacgacgttttggctagttttatttttccaggtttctgtcttagggaacttttgctgccccaggttaaaggacatcaataactatttgtttctctgacataggcatcaggttcctagtcaggacaattactgcatcatttatgacgaaggtgaatcctcaaacagctggggaagaagaacctaaaccaaaaagttccactatggtttttcatcctcgatgttcttttcaacatttaaaattgtgacctatcacatataacgtaaaacattgcaggcacatgcagccgtgcccagcttttatgtaggtgccggtgatttgaactccggtcctcgtgcttgtgcatctaacattcttacccattaaagccttggtccatcccccaaaatagactttaagataagtccccttgtttgaggtgaaacgggacttttcataccacaaagagttaatatattaggaagatataaccggtgaatgtgcactgaagaactaagctcaaaataggagaggtgaaactgaggccagttgaagaagtgagagcgagttaccgtcctctgatccctaaactcaggtccccaccctgcactgccaagataccctcttcattcttcatattgtgatcatgtgtttgtgtgtctggctcgccagagcctttattcttgctatatgccaagcgtttaacacttttttttgttctgtgtccctgaacatacagaacagttatttttgtagctcctaagtgattggcacctcaatcacttaggcagaaggggaggagaaaaggacagcttgatacatcccagaaaccgtaagctccagatgccggcagtgtgttctcccttccgaattcactgaagtgctgctttgagagctaagctctacccactcagcccctctctcagctcttctcggtggcactgagtttgactctccttactggatttaaatccaaacttatttagccaggcttccctcaatactgtgagcaaagtctcctcagatcagcattcggagatgccagctgcagtgtggctcggtcatgggcaccatgggagatgaatctagaggagtcatggccgggctgggaacggactgacatgaaatgcagaagagaaagccaggctttattctgccttccacataaagccactgggagatttgcattttatgaagagcatctgtgttgtcctgtaaaggatgacacagagggaggcgggatgggctggaggcacaggagctggttagaaggtgacttcagcaatccaggctttgaaagcctggattcatccaggccatgacaataagaacagagagagagagagagagagagagagagagagagagagcgctaagttagagaacacactttaaaagtgggattgatgggttcgtgactaattgcatctcaaagtgatagagggtgaggtgcctttgaagtctcccagccttctgagttagaaaataggcagatggggttgacattcaccttggtagggaggagagagacagaatgggcgtgatgagcagtcacagggaagactgtggtgccaggagagtccatcggaaattggcatgtggggctcgggcagagctcttggctagatgtaaggcgttgagagtcactggaatcttgacctggttgagtcctaagcttgaatgaggctcctcagtgtgcctagggtgagacaggctggattctgtaagagataagcagtagacaagaataatgcagagacagggaggtctgagggaacccagaaaggatgcggtcaggagtcaaaggtcaggagagaactcaatgtccaatgctagaaaaaaaaaaggcaactacagtggggttgtgctgacagggagagcagccttcgcccttgagaatttgaatataactgcagacgttaggagagcaactgcagtgaagtgggaggctggggtggggccacctgaagcttaaagtgtgtgccattgtgttgggatgaactggacagccaccatcaggaagtgtccacggagagcatccaggactccttcaaggaactcagctctgaaaggaggctgtgagcccctaggtagagatgaaagggtggaggtcttcagagaagccattttttccaaagaggatacatgctggaaagaggggagagggatggagggagggaaggagaaagagaaaaggaaggagaggaagaggcagggaggaaaggaaacagagaaagggagaagaggaacaaggaaggagaaagaaggggaaagaggaagaggaaagagaggaggagggagggagaaaaagagaactcagagcccacaggacagaattatgtagggggacatatgtaggggaacaggtgacatagatgaaggccactgaaagaggtcccgaatatcttattttaactccttgaccatcagttggtcaatatccctaaaatacaatttttaggaattgatgcagttcattgagtagagaacacatttttacatatttttgaggtatgacagatatggcaggtagacctataattcatttgttattgttgttttacatttatttattcattatttaggaaaaggtggggcatacatccacaagtcaaaggtcaacttctgtttggaccctgaagactgaactcaggtggtcaggcttggtggcaagtaccctcaacgactcagttctcagttgccccactattttgatttgttaaatcattgccctggtctaaagcagctccttcgcatcatttctggggtgttaggctggacatttattcaagctttcagaaccttgctcgaagccgggcagtgatggcgcatacctttaatcctagcacttgggaggcagaggcaggcagatttctgagttccaggccagcctggtctacaaagtgagttccaggacagccagagctacacagagaaaccctgtcttgaaaaaaaaaaaaaaaaaaaaaaaaaaaaaaaagaaagaaagaaaagaaaaaaaaaacaaaaacaaaaaacaaaacagaaccttgctcgaatcctgacctcactgccttctgcagcaaggctgtcgggttgacttgctcacaaacccatcttgttcacgacccaccagtttgcttggacttgctttctgcctacctcctattgcacagtggccacactcccccactctttactgttcctagaacacagaactactttgaggctgtgccctgagacggccatgcttgtcttgactaccgcctggaacgatcttttctattttcttttcattttcttcctttcttttttttttttttcaagagaggacctggctgtcctggaactcactttgtagaccaggctggctctgcctcctgagtgttgggatgaaaggcctgctccaccacttctggctcacgatctctccttagtacttggtgcccctgactccttagccccagatctccgtcatcatctcatctggtgagaacagatcccatacatgagacacaaacatagcgcttcctatgtcctccagaacagtgacagttgtcgttattttattcactttcctttgtccattgtttctctgtcctctcatggaacagaatctccatgaggacccatctcacccccctcacatcttgtctccctccttccctgtatccaggatacggcttgacaggagctttggaaatttgcttcatcgataaaggaaaggtcagctcctcctttttgttgttgttgtttgtttgtttgattgtttgttttttcgagacagggtttctccgtatagccctggctgtcttggaactcactctgtagaccaggctggcctcgaactcagaaatccgcctgcctctacctccagagtgctgggattaaaggcgtgcaccaccacgcccggctttttttttttttttaaacccagtttgaattccacatcctcggtgaatccaaacaatagttcatctgtactgtgcttgctttgttctggctgttactatacctcattatttcatttactggtagctgtgactatactgcattatctcatttaatgagccccctccattaatctcccatgactcatagagaaacattctaccattgagctacaccctagcccttgctttatcgtttaattgatcacatgcatcattctttcaccccagtgacatcttagttttcctacacacacatgcatcattctttcaccccagtgacatcttagtttacacaaacacacacacacacacacacacacacacacacacacacacgcagggctcagaggatactagggaaatgaagatgccctctgggcaagttgtcattattatatcaaagcttgacattacacagcttgacattagctaaaacagtgaaaacagattatgttcagtaaccatccacaagaagaaaaagtggggttcaatcagtgagaatttttaaaagaaaaaaatgagggagtagagaccgtggaatggagtcagggcttgagcagtcagtgaagtgagaattggaggaagtgtgaagggagttttaaccgcagtgaaactaatctaagtgtgttaactgttccctatggtattcaggctccgcccctcctccagaggctgggggatggctccctgtggttgggtgtttgctatagcaaacaattcttctgtaggctggagttctctgggggcacttcacggggaactaggtccaggaatgtgccgagcggctgttataaattctgtcagcacttgctcagatctttatagaccaaggttgcctagttgagggtcgaagagcctgactaaggtctgatcaggagggaaatcttgaacaattctaaacttcaaaaagaaaaatcatgggcaggtagagaaaaccctgttatctttgtaaagatggagatcacaaagcatactcgtttgcctatttaagacatacagttcaaactcgctgttttccgaagaatttgctggaaccttagctttctggaaagaatgatactatctgtcaaaaaaaaaaaaaaaagtctataaaatttgttatttggcaccaagttgccaaaagaaagggctcctagcattgacttttaaaatatcgatcggccttgaatgttgtagggtgttgtgctggtcctgcggggttgaagatttcaggatcgtccaggaaggcttggagtctgggagttctacaagagggaggctgagatctttacaaagctccatgcaaacccctcaatctggaattctacagctcaccctcagcttcgttaccatctactcctcaggtctggggctcagatcaagaggcacactcccctctaaagagtcctccatcactgtaaaagatgacatcaggggagtctgcttctatttataccacaaggcgtggccctcccccaggttggcagtaaacccagagtccagcgctctagccctgagagctctgagcgtcatttctgaaaatacctcaacttctgaggacagcggagactggtccctggactccaccctggcgcagaggtgtgcagtcctgagaatgtcacccaacctgtctttctctacctgacaggtgaattggaagcatccatcctactatgtttccttgggagagaacctcttctagtagagagggattgggtttacacagatcttaaactccacgggcccagccattctgtgccacagagtctgggagacactgtccgctccttctgtggccagggcagtaactgaaagccatggttctaatgacacccagtttccatcccagcccttctctgatagtttagcaatgatctctttggcctcctgcctcttttgccgctggagtgagtgacctgccctctcctaggcgtgtgagtccctgtgagtagggaaaaacgtctttatttatatgggtggagacagtggagacagggctccaaggaggtggccatggtttatacaagaattgtcagtctctcaagagttaaaggcacaacatcctggaggaaacctcataggggtggtttccgttagagacaagacctctcattctctcggggcctcaggtttagagcagaacatctgcaagcgagactgtagcatccctacgatgtcaggggatcattaccagctgtgaagaaacagtaaaataccccattgcctaatttcgttgtttgttgctttaatcagtcaagacaaccccctgccctacttttatttttttttttttttttttttttcttttttccggagctgaggaccgaacccagggccttgggcttgctaggcaagcactttaccactgagctaaatccccaacccctccctgccctacttttaaaaaagaaaatttaagtttgatcccgtcccaatttcctggaaccgtctgagggaatcggagtgacaaatgtgacatggaaggcgggatttgagcagcaggaattcccgggctggctcgggaatctccgagattaggagagcccccaagagcctgcgcagggtgtatgtagaccgggaaggcggcgtgggcggaaccgatacgtggggtgggcgtggccttgaggaggacgtcgggggcgtggcctcagcgggagtggctggcggtagctaggcgcgggtggcgggaaggaaatacgccggcgggagtgtgctcgcttccttctcgcaaccggaactggttcggcaatcttggctggctgctcctgcttcgggagaagttgtaaactgctctgatttctgcctctttttcctttcctccgctcttcccagaggtgaaaggtcgaagcttggatagacacaccttcagggcccccaaagtccacggccacagggactctctccattactctccggattcactcgttaaaactcctttttggggtacgcctgtgtgtatggttatcctcaaagtggagaattagtatttaggggatgtagctcagttgttggagagcacttgcctagcctgcacgaaaccttgcatgaagccctgcgttccatccccagcactgtataaaccaggtctgatgggacatgccagtaatcccagtactggaggatcactagttcaaagccatcctccactacatagctagattaagatcagccggggctatctgagacctcgtctgaaaagaaaatttggtgtttaactgattctcagttggtatttcgtccgaaggagcctcatacaaggactttgccatctgctaggcatgaagtttgacagggtcctgaacccctgtgttaccctcctaagacttctggatgaccgttacccacactaaacaccctaaaaccttatttttgttttcttttgtagagtcttggctctgggttagcagatgccacagccctgcctcttgatggagtgtgaatccagtccaagggaagaggagatcccgcccctcttttggggtctggatcctgtgtttctagcctttgcaaaactctacatcaaggatatcctggagatgaaggagtcccaacaagtgccaggtatgtggcctgtcagcttaacggacgccctgtgctgcaccctgaccctcaaagatacagaaagccggaggcttagggcatctaaagagccctgtctgaaagttatctagcctcaaccttggaaagagtttattactgtgatttttgtgcaaattaaagacaacctaagaatttgaagttgatcaaactttgagctttgcattgagctctttctcccaacctgtacataaccagattccaacgctcggatgatggaaatagagacgatgaagggttcaaagccagcctgggctacataagagcttttctcaataaaatacataactaaaaccacatgtgcttaaggtattccatactttaaaatacctaggctccttttgggagcctgtttttgagtggactagataggcaggctcccaaagtcttaatgtgggacttacctttctggttatgtgactcactttctgcaaagtgtccgtgtcctctcagtaaacatgtgggggttggttttagtttgagttaatctcgaagtaatagaaactcctgggaggaaggacgtcacctagcttatttgtgagttatgacagcatctgcttgcagtaggtgggcccttgagaaactccagtggaaactgtaaagcgttgtttagcacatgtgcgtatactagtacatgctcatgggagtctcatgtttgcacctttaggtgtcttactcgatttttcactttttttttaagatttatttatttattttatgtatatgagtaccctgtagctgttcagatggttgtgagccaccatgtggttgctgggattagaactcaggacctttggatgagcagtcggtgctcttaaccgctgagccatctctccagcccgatttttcactttctaaattttgttttttacatattttttattttgtgtgtctggatgttttgtcgtgtactatgtctgtggaggggtcctcagagggaaaaagaggggttccccagaactgggattacagatggttttaagctaccaaatgggttctgggaattgaaccctggtcctctggaagagcagccagtgctcttaaccattgagccatttctccagcccttcaccttatggggcaggcgaggaggggcatgcaagttgagataaagtttctctgtgtaaccctggctgtcctaaaactcattgtagaccatgctggcctcgaacacttgcctctgcctccccaagtgctgggattaaaggtgcacctcactaggctgactggccaatgagcttgaaagatcttttcatgtctgcttgatcccatacagggttacaagtatatgcagacaagctgggcttttctgtgagggccggtggtcagaatttaggccactctgcgagtgccacaggtgttttactaactgaaccatctcctcagccacaattttaaaaattaaagtattggttactagagatatgattattatacctgaaagtttaacaaatatatagattggaataatttaggtggctgtgggtagtcctctgggagtttactgtgttttgtgagaactttggttaaaccccttgcaattttgtgaagtttccattcagggaccttctgaacaacgagctttgagtcaaaaaaaaaaaaaaaaaaaaaaagtcaggctatcaaatattcccagtttgaatgaaaagaggtttatgtggtccattttatgtgcttggatgaccttctaaagccgtttgtacagaagtcttttcctacacctttgctccctaccaactgttgaacttagtctgtggatttttttttcctttcacttggaaggcagccagcctcctccagaattttccagaattatctggtgttctttatagctcatctccttgggaggaaattaattcacaccaaatgccagtctttcttcaaagatctgtgagtaaggaagcaagcaagtcccaggggcatccctgtgggcaaaaggatgtgatgatgtgttaaaagcagtgagacccagccctgtggtcctttccctctctggggagactgtctcagatgttcatttgtaagaggaaatctcatggatgaagctaacatcttattcttatgctgttgaattccaagagcataggaaaccccattactctaggttttttttttttttttttttgcttgggcttctgtcttaggtcaccataaagagaattcttgtgagccagatgtggattacacagctgtaatcccagcgctcaggaggtggaagcagatcaggacttcagggtcttccattctcagccacatccaaggccagcctggtctacgtgacactgaggctctaaaaacaagacaagagagatgtggtgatgtttgcctgtaatcccagggtttgacaggctgcagaagccaggagatctctgtcagatcaaggccagaaaacaacaaaacaaaaaccaaccaaacaaacaaaaccaaacaagatacttatgactccataaaacttagaaatttttaatgccagagtatctgaaacaaccaaccaaacaaataaacaaaaatagaggttaacaactacagaagacaaaaaacggtgccctgtaatgaatgtgcttgccttttgaacttggccctgggcaatagtctctcaatctttggaatttcctgagaaaaggagtgtctttgtactggaggtggggaccacaccttagtttatcgtaatggagcatgttatcagaatggacctatctatacccaattaattgagggttgggaatcaaagagagaccctatccacctgatcttagagggtgaggccatatgaccagtgaatccatcatacctacaccatgaaacccatgaaaagccccgatgctgagccttgcatgagctgacctggttagttaagtgtactgtgtcagagggtgatgtgtccccgagtctcaccttggagccctccacaccttcctctgcactttatgtagcctactgatttgtcccctttcttataaattgtaatcattatatatgaccccttcctgcgttctggctaagcatcaaagctgcaggagtcacataaacagcagtgtaacgggccaggcagagggtcccagcaaggctggagtctggaagctgaaaaggggccatcttagtggagagtcagccctaaacctgtgaaattttgcctgactgggtactgcttggcttgccttgtaaaacaccatctccatacacctgacctttgggtttcaccggtagaaatgtgaagtatgtagtatttagttgtgtggtttattgttttgcttgttcactgtcttatgcctttaaagctttgcaggataccttccctgaagataggatttctctaggtagccctagctgaccaccatgcagatatactcaccatgtagaccagcctggatctgaatggtttttgatcttgtttcttgagatggatctctttagaagtactatttttaattattttattttgtttttatgcagagaggagttttgcctgcatgtatggctgcacatcataagcgtgcagtaccctcagaggccagaagagggcgtgggattcccctggaactggagctactgtgtgggtgctaggaattgaactcaggtccccggctagtgctcttgccatctctccagcccttaaaagtactatttaaggaaagaaaacagaaatatcttcctggggttgtggatgttcatcaacagtagcttaaaatctgagtcaaatttgccaatgaccttggctcttttttttttttttaattttactttatttttatttaatgtgtatggattttaaaaattaattaattttttgcaaagataaaactttatttttttaaattgaatattattttctttatttatattttaaatgttattccctttcctggctgcccccacacataaacccccaagaccccctatcccatccccctctcccctgcttctatgagggtgctccccaatcaccaactcccacctccctgccctggcattctcctacagtggggcatcaagccttcacaggaccaagggcctctcttcccattgattcctgacaaggccatcctctgctacatatgtggctggagctgtgggtccctccatgtgtgctctttgattggtggtttagtccctgggagctctggttggttgatattgttgttcttcctatggggttgcagaccccttcagctccttcagtcctttctctagctcctccactgggggaccctgagctcggtccaatggttgactttgagcatccgcctctgtatttgtcaggccctggcagagcctctcaggagacagctatatcaggctcctgtcagcaagcacttcttggcatccacaatagtgtctgggtttggtgactattatgggatggattcccaggtggggcagtcagtctctggatggcctttccttcagtctctgctccacactttgtctcctcccatgagtattttcttcccccttctaagaaggaccaaagcatccacactttggttttccttcttgagcttcatgtggcctgtgaattgcatcttgggtagcccagcttttgggccaatatccacttatcagcaagtgcaccttggctctttacaccctttacagggtggcttccttttcttaagcccagatacccgggatatcctaggctgtagtgggctctgtgggaaaggctggcccatgggcttgctgttagcctgtctgttggatcattacttcctccatggacagagctgcacccttgggctccagaagagcagctcgctgtggtagaaggaagtggttctcttttgcagtgttgtaagccatcgtctcgaggcctggcttcttaccctgtggtttgtgtcttaatatgcccggagacgtttcttctgtgtttttaaagcggtgcatttcttcctcagccagtttcctcagagtttaccccccatccccaccccactggccccccaattcaaaccatctgctgcttgtttgtttctgtagttctctattgtcctgtgatgttttcaagattgacttctgctgagtcctttgggactggaaggattttcttgcagcctcaagtgactgctcttgaaagtgggccattgttaattcccaagacacacattcgtgaggtccatgtttaatccttttcaaggaggtatagtgcgttgtcaagtgagaatgtgttcagatgtggtttgtcggacgaagatcggtgactcagggacactggcttatgtgttagttcagtcttctttctgccgttgggacagatttgtttagccagcccctcgccccatcttcagggtcataacgtttcagctgttgactgtagatccttgtcatacccagtcagcctgtgtgttggtgaataggagcagctgtcattcaggggtaacactgtgtcctgggctccctccttcaggggaccttgccatcatcagcttctggcctcctaggttgccctaacgatagttctcccatctaccagctcctccttagaagtccacctgcccacaagagagggaccagctcagactgaagttcactgcgcttttctctgcaagccacacccactctcctatatccctctgtgagaaccgtccatcaatccatcagcagtggtcagtgtgaaaattcaggccgcagtctcctaatggattgaaattcagaggtctggccagctgcgctgattaaaaaaaaagaaaagaaaaaaaaaagtgtggacaaatgcctgaagtaatcatggcttcttagtttacaatccatatttatttacaaaggaaaaggccattttgaaaatataacgatggggctagagagatggcttagtattcgagtgctgttcgttcagaggacccaaatttggttcccagtgcccagttgggtaactgataacccactgcctctaagttcatctccgtggaatgtaacaccgtcttctcatccacatccatacaaataagcaataatattaaaaaaaaataatgtattgccctcaaagtagaaaagtaaaataaataaaaaaatgaaagtatatatatatatatatccttcgcatctgaagataaagactgcaggtgcggcagggggctgaaggcggagagactactacttgggaacctgtgtgtgatctaagttgatggcagaagctgacgcaggagcctcactgggatatggactctgggtgagaagctctgaggcaggcagccaggaagtcctgggaatgaaagtggaattaggagctgatggcttctaaaaaatcacaactgttttcacatatgaaaaagaaaaatctctgtgtgccagtggcagccccccccccccctcggatttccccactggcagaaacttgcctccggcatccatgtagcctgggctttgcaaacagggttttaaaaagtgcttgagcagcagtcagctggccccagtgggcagtgtgtgtatctttttgttgttttgttttgttttgttttttttgtttttcgagacagggtttctttgtgtagccctggctgtcctggaactcactttgtagacagggctggcctcgaactcagaaatccgcctgcctctgcctcctgatctgctgagattaaaggcgtgcgtcatcacgcccagcacagtgtgtgtatcttttcctcactggttcatacaaatgatgacttaggaaagttgtggttttagaaagtcatggagctggagagagggctcacgatcaagagcatttgctcttgcagggaaccctgcttcaattcccagtacccatatggtggctcacagtatccataccccagtttcgggagacccagcaggcatgcatatggtgcacatatattcgtgcatacgggcaaaacattcatatttgtaaagtacaataaatcaatctaaaaaaaaaacttaaaaaaaaaagaaaagccatagcttcccgtgcagtcaaccgggttcggtgatttgctcacatcaagtgatggctgtgttcagccctgcgggccgtgttcacagagcacagtcctattcacagtggaatgggaagctaaccaaccttcgagagtaaccctgctcttccctgctgtgctagttcaggcctctcaagagcctgcttttctgatttctgctccttaaaaggaccacttaccttcttggagcctgccacttgccaaggactgactcttttttgttttgttttcgagaccgggttcctctatgtagctctggctgtcttggaactcattctgtagaccgagctggcctcaaactcagaaatctacctgcctctgcctcccgagtgctgggattaaaggcgtgcgccaccactgcccagcataggactgactcttaaggctggattttgagcacacagctcaccagtgacttgtgacaccttatgcccgagagacatttaatgcaagcaaatgtggttgtgtcgtatgatctccttcttcttgatttttaggtacatatttttacaacgggcatccaataaggcgggtagatatcatgggagctgtcatcagcgtgaaagaaagagagactttctacagctacggaggtaagagcgatcctctgaaactgtttgtccccactcagatgcaagttgagttttcagcagccctcatgcttgtgagcatccagggccacacacacacacacacacacacacacacacaaaaaacaagcgctctcttgagaggctggtggagtcctgtatcagctggaagcaaaggaggccacaggtaagagtgacacagatgggtgcggtgaggcactgctgcggggggtggaggggggatggggggtgccgtggaagaattgaaatgcagccgtgtagggtcaccgatggtcaggggagacacctgacacctgccacacagccgtgcagagccaaggactggagtgagtggttacggcgatccctttgaaaagaggccccgtaaacgtaaaaatagaggtatttagataacaatcgttttaaaagatttatatccagagcagttaggggagaggaaaaaaaaaaaaaaacagtttgttacttaaggtgtaaatatccgttatcagacttgcctgtctctcgtgttgaaaactaagcacagagcctccgtatcttagacactagacaattgctggaatgggctttagtatggtgtgtcttgctttttccagtgtgtggtcatgtgcctgtgagtccaggtgcacaaggaggcaagaagagggtgtcaggtcccctggagttagagttctaagcggctgtgagccacccagtgtgacgctgagcagtctctccgacgctaatgcaagcaacttggtttgtcacatcgccacacgagtggagcagctccaagactgtgggggagaaaccgggatagacgttggcggggagggggttaccactgaactgctgacctttactctgactgacaccatcacgtgtgtggcattgtctgcagtgtgctttcttgctgtgtgtggggaaaggtaggagttgacctttatgtccacgaacatttggttgacactgtcaggatcactgcatctctacctcgacctatttcctgaaggtgattgtccctgtgcttataaagaacatgctggagatgagatctctccctctgcgtgttctctctctctctctctctctctcctctatgtgtgtgtgtatttaaaatcttgccctggctctttgctttatcttaccaaagacgttggtcttggttttctccgtctcagcaagcatgccccgcgctccttcagcatgcccagctgtgggcaagcgcgttgggtgtagtacaatacggaatacgctactactctccgtgccccggtggtgacataatcgtggctttcagttacaaggcactttttacatttatcactccacgtgattctccccattttgtttagaaatagttatggcaatactactagtagaaaatgggcaactatttccattttgcaggtgaggaaactgggactcactcagctttctcagggtggtgttgagagaggcatatgagtccgtttgactgctagctggccccagcgtgcgctgctgtcggcagagagctcaaaatagcttttgtctctcgcatcgcatcccctactttctccaggctcccaaccccagtcatctggagttaatgttttcagatcaaataagagacagttggggattccagttctggccctagaattggatctgctctgcctcgtgacagaaatgggcttcgtgtagcttgctttcccactgtggaaacatttaagatggtgtgcttggctcttccctaagaagacttccctccaagtgggttgtcgtgagagcatgacacatctgtgggcggcaggaaggcagccgtgtggaagcagttaagagcagaaaggcgtcctgcccttcagtgctcgtgtggccagctgaagcagggagccacttacctcccgctgtctgcaggcccagcacagctctccctgagtcactgcaggtgtcgactgtgtgtttccgcccacactgactcctagtgtcacgctagggaaggatgtggcgtggctttctaatgggtctcctcggtcactcagcggcaggccttaggacctgctacaccgtctgccaggagaggcagagaagtcagcgtctggtggcagtgtccatagcacacagagcccaggtggcagcttgggttctcgtgatcctaaagatgctgggttagaccaggacaacctcatgtcccctagaacaagggtcaagggtttgctcactgctactagtcttgcttccaatataaacacccagccagatggttccggcctataatccccacactcgcgcagcagaggcaaaggattcctgcaagattgaggccagccagggctatgtagtgagtccaagccagctgtagagttagaccctgtctctctgtgtttttgaaatttacctggcagttaatgttcactgcttgaatggaggctgcttcttccatacttcaaaagattctactactagcatttagtgtcttaaaataatttctgttgaagtatactgttcaatctttatacatgtaagatttagaaggtatatgggatttgtgtttcacggagaggcctgtgtctttcaacagtgagggcctaggtcctcgtcataacatgttaatctcatatatcaaatactacattattacaagttatttaaacaactacatatttgtaaacatttccgttgttcccattttctttctttctttctttttttttttttttttttttttgagacagggtttctctgtgtagccctggctgtcctggaactcactttgtagaccaggctggcctcgaactcagaaatccgcctgcctccgcctcccaagtgctgggattaaaggcgtgcgccaccacgcccggctcacactttgtttaatgagttacagttttcagattctgcttttgaaagtctaaatgcagagcttaaagatggtcaccaatgtcttcttctcaatttgtgttaacaaatgaacttatatttgctataaagaaaaatcctctttcttcagagatttaatctaacaataaaactttttcccttatagtctatatcacatgggccttgggcctttacaacagtctactgttttgttttgttttgttttgtttcaattatgaggcccactaccctgtgcttagcaacctatgtttggaatttgtcagaattcagacaaagagaaggtcctgtcttctctcagcagagatcttcaagttcctctgaaatcacaaatccaagtctcatggaaactgtttaatttttttccccttttggtgctataaataaagtaaggtagagcggttctattttggtggccagggtataattattttctgttaggaaaaatgaagctgagtcctgtgatgagtttcctctcccttatatccctgcagaggtgaggactgggctgagacctttgcacagggaacccctgggccaaacgctgtgggctgctttgctggggaatgagcgagctagagaagagatgacagaagccgggcccagagtgccagtgccacaaccacaggccacatggtgcttccttgtttgagagagagagagagaagaagaaggttatagatgtgggcacgcactcgggttgatctgcacctaacgttacccactgttaccagagtagattcttcaccgccatagaggtagacaggccgagggaaaggttgactgtgtgtcctttggggtcatgtgtgtatatgctcacaggtaagcagttcatgctgcatagagaaaggttgcttctatagacagggttctttaagggcgtcgtccctcagtatggctgaatgcagtgctgacatgtggattccaagcctggaatgacacggggattccggccatagccaagtctctcacctcccttgttgcttctctttcagtggacgatgccactggggttataaactgcgtctgctggaagaagctgagcaacgctgagtcttcctcaggtaactgtgcttgccacagtcctctgatgtcactcaaggtagctcaccaaagagctgtcagtcagtgtttgcacattaagctactgccgggctgcattggtggccctgacaccctgtccctcggtggccctgagaccctgtccccagtgctttagctgctgggctgcatcggtggccctgacagacaccctgcccttgtagtaaagaagggtagttgcttctctcctacctccttggtcctcatcttctcctaaacctagggactgagaaagggtttctggaagtttctacagtacagtttttacctcacctattgttttacaagccaagatgttgcagccttacggctcatcagatgagaattcctgagcaaagatttggagactgctcctgtcatatgcgtgcactaatgtctctgctatcatgattcagactttctgaaaactctaatatatatgttcaaatacatagcaaggattcaaagcttgctaatgtaggattcctttgccgggcagtggtggtgcacacctttaatcccagctcttggggaggcagaggcaggtggatttctgagttcgaggccagcctggtctacagaatgagttccaggaaaaaaaaataaaggtaggattcctttggaagttagctgctaagtaatataaattttaaaattatattttgaacacattgactcactaaagcatttggaatgatgtgaatatatttcaatgatgcaagtccatttactttattttatatgtatgggtggttcacttaaatgtataccagtacacagcatatgcatgcaaggcctacaaaggtcagaagagggcattggctccttgaggactagagttacaaagggttgtaagccctcatgttggtacttggaacccagcctgggtcctcttcaggggcagaaagtgctcttaagccctgagccttgtctccagccctttaagtcacttttaaagttttcatgttcagttcccagaacccacacggtagctctcagccatccataactccagctcccgggaatccaacgccctcttcctatttcctcaggcaccgggcatgcatgtggcacctatgaatgcattcaggcaaaacatgagtacatctaacaaaattaatctttaaacaattaaattaggttcataattatttacaggatgttatcagcgttagtgatctttttaggctccatgtagccataggcaccggcactgtcttttgccgttttgtcccatatgaagaatgacatccatgtggggctatccagtgtctccctccagtgggtaacctccagtgtctgatggctcatgctggatggtgcaggaatgtcttgtgcttaggagctttcttccttatttttaccatcacgtgccagaatcccaccttccctttggctgtgccgaccaatgactgctcatttgtttggttttccagtgttcgtgtacttaggaattagctagtcctgtgtgctctcagcatacctgtccctaacttgagaacatccaagttggtgactctgctttgcttagaaggcaagcgatgaacctgtaagacaggcagacctggatttgtgtgggttgggtacttgttttagtctgtgcctatgtttggttggctggttggttggttggttggctggttggttggttggttggttggctggctggctggttggttggttggttgtttgtttggttgtttggttggttggttggttgtttgtttggttgtttggttgtttggttggttggttggttggctggttggttggttggttggttggttgtctaaaagcagaaaagtatattttgtctcacagtgtgaagctccactctatcatggcaacaaaaaaggccagggctccaggaaggcactcatggcccatcaacgttaggaagtgcagaaccgaggtgtgctcctccagcgttctccttcttatgcagtctaggagtctgtgcttatgttaactactttcccaatcactgtgacacaatacctggtaaacaggtgtgagtgtgtgtgtgtgtgtgtgtgtgtgtgtgtgtgtgtgtgtgtgtgtaaaacccaccctggctggcctgaactcacagtgcaagctagccttaaactcagagatccacctgcctctgccttccaattactagggttaaattcccatgccaccatgcccagctgtcagaaggaacttaaggacgatgacgtttctgctcatcgtttgtcagggaaggcagggaggcaggcgagtgatgtacctggccacacgacacacacaggaagcagaggaagatggacgccgctgtccacctgcagtcagggatcacagcctatggcgtaacacagctcagactcagggtggatttcttctcgttaatcctctctggagacatcctcacagatatacccagagtgtgtttccatggtgattctcaatccagtccacttgacagtgacgattaacggtcacaatgctcttccacagaatactctaggcaggtaatttatgacaaacggttcgtcggacctggaggttgggaaatccgaagaacccgcaggccagtctccacctccaagatggctccttgaatgttgctccctctggagtgttcctctcgtggccaaggagcaagcagagaggagcccttcttttctgcacgctctcatggtagcagtgactcgtccaccctggcctattgctctgaatgcctcctgttcagtcccacctcctaacacggttgtgctgcggctatggtccggatgaaagtctccctctccagggttggcaggaatggaagatcttgtggactaatgtgagggcctagatcactgaggacatgctatgaaatggtaccctgtcttagtctcctcttgcttcctggcttggacataggatcctgctatgacatgttactctttgcaaatcacagagactgcctaaccctgggcttgtgcatccaggcctatgagccaaaaacgcagctctctgttttgtaagaagtctgttgttatttcattcccgggatggaccacttgctggtacagtctggatagtttccagcacttgaggcttggagggtacagaagcgtgcaggccacagtggcattgtgagtcatttacagacttatggctctactcacaatccttaatcagaaggtgcagtttgtctggcagcgcctgagttaggtggagggtgagcaagcttttctataaagggacacatggtgtatattttctgttttgtggacgtgatctgccttcattacttgacactgccattttagcaccaagtgggccatggatgatacaggggacaatcaggcggggacagggtctcactatgtggctctggctggcctcaaactctccctgatcccctttgcctctgcctcccagtgctgggaacagaagtgtgtgccaccacattcactgctttttaaaaagtggcatgatgagcagcactatggaactcctaaactcagtaattttttagatcaacggttgttaatactgaacatgctgagaggtagatgtcttaactgtccgaaagcaggtgaaccggtgacagttagagagcagtcttcattttaagctgctttgcaaacataaataaaatggttagtttccggagaaagcctagaaagagcccttgtcatggtacatgtgatgtggcacatgtgatgtggtatttttaaattgctcccaactcactcgttctttccttttaatttaattgcccaaagtttaaaggctttcattggaaggtggccaaagaagatcatttttaaaaaacagaattcagtgtgagtcaaaatcatgttccaatcaattaaataaaaactataatgtaaaccctgtggatgttacattgactataccatttgcacttagcttatgatcaacgttaagacaggttagccctcaccatcagaatgttaaaaggggtttaccttcaggatggagaccactaaaatgagttctgtcaggctccaactgtctcattacattcattaaattacacgctagagcctcctttcatcaatttgacttactctttaaatgaaagcgaggcctcttttctcagatcagctgtcaacctgataatgtcagtggggccacgcggagctctttagcatctccgtgatgtggcagtgaggttgtaaatacccctaacttcggagagagaacaagagggcctgaggtaggaagtggggagagagggcctgaggtaggaaggtgggagaacagcctttagaaactgacaaacccagtgaactgagcagccattgctctgcgtctgatttcctaggtttcagtcaccgcatgcgcagttctttgtgctccccgtgttgctatgaacagcacatgtgtattagtgctgctacacattacaaaactatggttgtcaacattgtagttggtcagaaagcagaaaatctgagcaaaagactaaaacaaagatccctctattaggaaaccctgctgagacaaacctactgagctgtaggaaatacatcagcagttagccaatgtcttttcaggtagagtcgtatctggaaagaggtgaccgtgactcctcgcatcctgcagcttacgtaaaggaacctgaagaaggcacgctgtgtgtctgtcccagtaaacatgctgtgctctagaaaccccagctgctgggttactaaaaccagggcaataagaggcatgaattaaaaaatcaagatacttttttaaaaactctgatacaagagaaagaaatcaaataaatattaaaaataaagcaatgggctgggcagtgatggcgcacgcctttaatcccagcaccggggcagaggcaggtggatttctgagttcgaggccagcctggtctacaaagtgagttccaggacagccagggctacacagagaaaccctgtctcgaaaaaccaaaaaaaaagcaatggacaatgtatgtgataagcatcgtgggcacagtttgcttgaagtttaatgaaaccgacagtgtgagcttatcagccaagagacacataggctgtcgtcccttataaagacagccaacacagtgactgagacaaaccaataatcctggtgtttgggagctagaggcagtgagagtccccccaaaaaagtaaatagttacctagagagtccagtcacttgtcacaaacagttgtcacttcctctgtccacagttgagtcatgcacaacagccatgtgtgtgtgtgtgtgtgtgtgtgtgcatgtgcttgtgtgtatgtgtgtgtgtgtatgtggtagtagttatagactgccattctcctcatttccttgattcattcagttgaggagaaagggacattagagtgagacacactgtacatgaggaggtgtcatcccagctgagaacctgctgagatagaagttgggtttctctggctctgggagccaaatgctccccctccacctgccccatgcagtgaccaaaatcaaaatgagaagccatccaaagggaaggaacgtgcagccaggctaccaactaacctgccatgttaatgtggcaggatgctgtactaggatccgctgagccgctctcagcactccaaaagccgaagtaagggttcgttcggggccatctggggttgcatagccaaaccacatttcagaagacaaagcgataacaaaatgcagagtcatgcagcttctatggccacatgcgtatgtggaattccagcaggcagaagaacagaacaccgagtccctagggagccactctgactacagacgcaggccatatcccctggggcgggcggtgcagagtgcagtgtagttacagtctctgcagccagacagtgccgttcagactgcagcttctcttcttcggaaagaagattctgacttcggaaaggttgcttgacctctctgtgacatacgtgtctcatctctgaagtggagctcccgatggagcagctgtgagggctggatgctcgggcacgttataaagcccgtagaagagcgcctatctgcccagtggccaggcttcttctacccaccctgtcctttcttatctcatacagttagaagtaaaacccagcggtagggattatttagggttgagtgaacattatcttcttttccccgtgaggtgaaggataaagatgggaggagagagcccacacttgggagggagaagggttggttagtctagtcccctcaacactgatgggagggacgaagtctctgcacaaatacttttgttgttattgttttgagacaggacctcactgtgcactgaagactagccaggaactcacttatcctcccagtgtcgtcttgagtagctggggttaccagcatatactaccacacaggcctccacagtcatacgctaaagagctgtttgtagccaggcgtggtagtgcaggtgtagttccacttattcgggaaactgaggcaggtgaagtgaattccgagtctgaagagatggctcaacagttgaagagcacttgctgctcttccagaggacctgaattcggtccccaacacctctgtaggtgtctgcatattcatgcacatacatatcctcacacagatgcacatatgcacaattaaaaataaaacatctgtacttttagaaagccttcctgggctaaagagtgagtgagttcaaggttagcctgggcaactcattgagcccttggctcaaaataaagtannnnnnnnnnnnnnnnnnnnnnnnnnnnnnnnnnnnnnnnnnnnnnnnnnnnnnnnnnnnnnnnnnnnnnnnnnnnnnnnnnnngggggggcggggtagttgccactcagtggtacagtgtttgcctagcgtgcgagaggccctaggttcagtctcttaatactgcaaaaacaatataaagctttcagaacagagggcagcgtagtgttgttgccccagttgctctgaacgtgtgcacagggctacatagagccctttgcaccagtgatgcaggggcgggtgatgcaggggcgggaagggcggtacagtcacccgggagcttcccacttggcctcactccagagacttctccttttgttctgcctttggatagatacacttctgttttccttaggtttttactgctgtgaacagacaccatgaccaaggcaactcttgtaaggacaacatttaattagggctggcttacaggttcagaggttcagtccattatcatcaaggctggagtatggcagcatccagtcaggcatggtgcaggaggagctgagagttctacatcttcatctgaaggctgccagcagaatactgacttccaggcagctaggatgagggtcttgtagcccacgtctacagggccacacctactccaacaaggccacaccttctaatagtgccactccctgggccgggcatatgcaaaccatcgcacaaactttgtgcgtctggggagatgctttgaaaaggtaccaggagctattatactagaacgccccatcagagcaggcacactagcttcctcagcccctcaaactgtgtccccagcatagaaggaccctcgcttatacctcttctcttttctcctggccccgccagacccagctattctgagcactgcgagagagcttagcatgacatcacagcttaagaagctgcaggagaccatcgagcagaaaaccaggatagggattggagatatcatccgagtccgaggctctgtgcgcatgttccgagaagagcgagagatctgtgccaacatttattgtaagtacagtaagtttctgccaaatgagctgatattctgggtgtgtgctcagtaaatgcttgtttagctggaagtcagactccagaaaggctcatagaagatttgatcccgttggggggggaattatgtttagcgtgccgtttttaggaaaagagcttttttgaattttattttgaagaatgttaattagaagtaaattgggaagtttggataatttcaccgtttctgaagcactttgacattctaaatgtcagtctgttagcatagagtattctactagttcaaaacgacggggacaccttgaacaccatgaagcccatcaactggaatgaaaatatctaatcagacaactgtaatgaaaatagctaattagaagtggttccaaatcgccccctttgcactgtgctggctggttttcagctgaaaaatctcaaaagcagccagtcatggtggtacatgcctttaatttcagaacccagaagacagagtcagacagatcttcctgcattcaaggccagcctggtctacataatgagttataggccagccagggctcatagggagaccctgtcaataagtacatatataaattacaaggctgtcccagtagtccatcggcataacatacagattgctagtgacaggcctgtccctaccctagatgtgtctgtcacatatagggccttgccttctctctcaggggatggctggagctgttctgtgactctagactattgtcctagtggtagtttggacgtgggaagacgttctctcggggttactcctgtggcctctctttcctgggttgttagataaggtggacgatccagtgtggaacatgcaaatcgcaaggatgcttgagctgcccaagctctaccagaaggtgtacgaccagcccttccgtaacccagccctacaggaggaggaggcactaaagtaagtccctggctgtcactgctgagaacatacggccgcagggaagcttggggtacaaatcatcaaacatcccccacctgaggaccatgggctccgcctccctggcctcagttcccactcctgcaaagcgagagtgactacagcgtagaggcactagggtcgttgcgaatgaaacacaagcccatgatgattgttatgtattgtgtaatatattatacttggagttaccgaaggagtggagggaacacagatgaatatttgggtcgtggctgaaacttgctcaagttagctaaaaactagaaacacagatccaagaagcttagcaaacctccaggggagaaccacgaagaagcctgcactgaggcacatcacagtccccatcacagagtgaccccgatcctgcattcccccaccataaaacaaggacaaaaacaaccgggttgggtgggtttcactcctgtacagggtgggtttcactcctgtacagaggggacacaaagcccaagaggaatacaaatgtacacacatttgctaaaatatgaggtaaagaaaactgcttatcagtggctctctagaggcttcaagctgggaggatggtatgaggctgtgtcttacttagggtcactactgctgtgatgaaaccatggccagagcagcttagggaggaaagcgtttatttaacctctactcccagtccactgtcgtcatccaaggaagtcaggactgaaactcaaacagggcaggaacctggaggcaggagctgacgcggaggccatggaggggtaagcatacatagatgcttactcacttgctccccaggtcttgctcattctccttataggagaatgcaggactaccagcctgagggtggccccacccacaataggttgggccctccctcccacatcaatcactaagcaaatctcctgcagcttgcctgctgcccggacttctggaggcatcttctcaattgaggttccctttccttagatgactatgtcagttgtgtcaagttgacataaaactagccagcacaggagggtactttttattctgtccttattattgattttattgagttggtggcagaggggttagagagctagctcagtgggtaaaagtgcatgtcccccatgcgtgagcacctaagctcagatcccggctataggcaagtctgggccggctggtgtgcactaaggggatggaagcagggcgatcagcggggcttgctgtccacttccttatctctaaagtcaatgagagatctgctctcaagggaataggtagagggaaatgaagcagggcaccagtatcttcaagttctggcatctgcatgcatgcatgcatgcacacacacagagcacatacactcacatgcacacacacagagcacatacacacatgcatgcacacacacatacacactctcacacacacacaacattcatgcacatagacagcatacacagaccacgtacttaacacagcacacatacacacagcacatgtacagcgtgtacacacacacacagccgtcacacacagtttttcttccggggtagagaatgaaccaggaccaaactcacgctaggccagtgctctagcactgagctgtaccccggccctctctttaacttttcaaacatgtaaatgtatcgcttatccagtaagtcaaacagtgcaaacagcaggtatgcgtaacacagaaagtgggaaccctctccgcactactgcccagaggttgccagagggcttgagctggcttggttccctttagatgcctgtcttctgtgcacacaagagcatgaacgtcacctagatatttggtgggatctcctctccctcacaaacatggccctcctccatgctgttctcgacccgctttataatccaccacgagtgtccagcaagtgacacggtcccaccaaagctacacagcgggcaccgtgtggatttccctgtttgtaaaaacaaaacaacacaacagcaaatcaaaacaagcatggtgcaggatggctctcccagatagcttttggtttcgtgtactccaaaaggagccgagtagtggtttctttctgcagggtgttttaaaactttgctccctgcagcaataaagacaatttggatctcgctggcctcacgtctttgctgagtgagaaaattaaagaattcctccaggagaagaaaatgcaaagcttctaccagcaggagttagagacagtggagtctttgcagtctctggccagtcggcctgtgacccacagcacgggctcggaccaagtaagtgtggcacattgggaggtatgtggggggtggggctgggggtggggtggagggagatgccataagtgactggtgtcagagtcacactggatggactccaaaagcagaggtcaccgttttagcatgtgccatttctattctggaaaggtgactgaccactaagaatctgaaatgcactgaacctgccccttacaaggtcacactgcacttagtgtttaggctgaggtcacagcacgcagttgccagtactcaccgagatggtgtcccgtaggtcagggagatgagaggagacaactatcctctacccaagaggatgtatcgatcagcaagatgatccctgagccagggcttttaatgacttactccttttgccttgggaaaggttcatctgtcctgttgtaggaattcgagtgaaggccaagctgcatccagtcatgtctgtagctaggaaagtgcagaggaccaagcagtgttcccgttcctctcggtacagccccgccttgcactccgagggctcctggcacactgctttggtgtttgctgtttctatgttagtacaaagttaagatttactaagacatttccggtttagcctgtcgcttgtattactgctcttgggtccgctgctgtcgcgtgtgactgtgtatttacttttaagtgaacagtctcggcttaccgtcatcttctgatgcctcatcccctctgactgctacttgccctcagtatctctccacagatctgtatctcacccctcactgttgtgacccccggggcatccctgtctgtgtcactagtacttaccttcccggcctgagttccatctgtatctgtgatgtcactgccacttgtcccttgcagtcctcaccccgcccattacgtcccagcctgctgacgtcactggcacatagtggttttttggtttttgggttttttttcccacctcttgtagcagaattgaagggctgtgctagcagaggccctgtctgcatgttctgtgctctctacacaggacctcaggactgggtactgcaggaatgaagattgattttggggttttgggtttttttttttttttttttttttttaattcagatggtcctgagaatggcaggcgtgtttccctcccatcctctcccaccctgctcctgatcccaccgccggtccggagcatgaccttggccaaatgctgtgcttatgttgacagcggtgggcgcctcccttcttgttccccacatgggagtgcactgccggctttaggagacctcggttttcagtgagcagtgcatctttctgttctttgtgtacgtagagatttgccaccatctaagagctttccttccccgtaccaaggatgagttcacacccataaccaggctccattctgcaactgtcctgacgcctctccagtcttctcccgtcagcagccaggctgctctgagtgtcctaacttattccggatgctgctggtgggacaggcaccttctcaccatcccagcccctcatgaccttgcttcctagatttgttcacacacctaattacctcttcctggcaacaggctctgtgcgcagtgacccaggatttcataaagggagatgagggatagagtttcagaaaaacactcgggtggagaaggtcgtggctgggaactttgttctttgccaaggttgcttctaaacagccttggtctccggctgcccacttcccagtggcctgtagacagcctcagcctccagctgctcacttcccgttggcctgtagacagcctcccatctgactgcccacttcccattggcctcctttccatttcatcatttagaataagctcagagttaaactgaccttcctagggcttctgatgcctctcagtttattttcagtaaaatctttcctagtcttctctcccctttttcttttccttttaaaacattttagatcagggtttgtgtgcgcgcgcgtgcgtgcacgcgcatgcgtgtgtttggggcccaaggatcaaactcagatccttaagagttggcagcaggtgccttgacgtgggggcaagcacctttccagccatgcatctcctctttctattgaggcatggtctcactctgtagtccaggctgacctggaacttgctacataacccaggctagcctcaaattcacagtccttctgcttgagcctcttatgtgcagaactttatgtgtctgctaccatgcccagttctaaagaagcattagtaagtagcgaggcccaccttcatgtgaagccatgatggctacaattgactggaaagacgtcaggactcccccaggcaggatgttctgtggcggagttttgacgtggtatccttttgaagaagcttagagcagaagactgtttctgtgtagtgctgtatatttaaaaagaaactgatctgtcgctgtatttgtttctctttgaaaacgatttcttccatcaattatgaatcagttggtcaaattgccctgcttgggatgtcagtgtccctcaattaatagcgccctgggagactgcagatgctcgggcgatgcagaaacccgagagccctgggcgccctgttgtcactcatggctgctcacttccccgtctctcccttctgattttttttctaaccgtcgcctttcttagcaaatccagaaacatgataagcagatcttacaggaccattgtttctctgacagctagatgaatgctgactatgtttgggcgggcagattatatatatttcaggaagccacccagttcctggcctgagcaccaagtcgctgcttcagtctgtgagcaattttggtttcctgaaccgtgcgtgtctgtcattgttcttttgaaagtgacgagcaaaacacagatctcagtcccggaagcggctggcttgtcagaagggacccctggtgtccttgctctcaggactgtggcctttgaaacaggctaggcagcacatcctgaggccgcgaggcagtctctggagaggatgcgtcctgtattgtttgcagttcctgggagctgagctgcagttggctccctatggctgcgagtgctttccctgctgacccggcctctcagaggagggagctgatgctcatgggaaagatcgcccagcagcctgggggcaaagccgtgatcagtcagagcagaacccaagttcagcacagttaccaagtgtgaccctccagagcagacttctgaccctgcctaaatgccggcctgctcagctgacgcatgcctagagcacgctgactcagcacaggaaaagcctgttgggtgaattcataataaaccagttgggcttgggagttagtcgcaggtaatggaagatgagacatttctttttcttccctgtgcaggtggagttaaaggacagtggcacttctggcgtagcgcagagagtgtttaagaatgctctccagctgcttcaggaaaaaggactcgtgttccagagagacagtggctctgataagctgtactacgtaagagacctgcagcctagtttcccctcatggcttccgttacaagtacagttaggcttaggaatagtaccagtttctaagacagtgagtcggggtgaaagcgacctcttaccctttcacaatgtaactgtttcctccagtgagacagtctgactctgtaaacccaggctgaccttgaactcctaatctcctggctccacctctccacggctgggattgtaggtgtgtgccactactccggatccatgctgccacttgaagcccaatggccgtctaaatatttatctgtacattgacagatatacaagcacgtccctatggcttttttaagaaaggaaggaagggtaggggaagggggaacggaagggaagggagtaagagtgagtgagctatcttctaattgagaaggcctcatcctcagagctcctggtgcagatgctgatgcactggagactgtcctgtgtcttccaccagcatccctggcctctcacactaaatgccactagcacctagtatgttgtgacaatcagaaatgccttcgggcatcaccagatgtcccactgctgtgaagagtgctccgcacagcctgcagtgccaccgtctgtccctgtgcccgtgtgtcccggcacctgcgagtctgcctcactctttctgaccaggagtatttaccagaactttctagccattcctttgtgacggacggacggacactacggttgtacgacttttgctgtcacaaatagtgtttcctgactcgatctgtgtggctctctgtgtgaatctgtgttggtatttccaaggacggctcacgcaggagagcgcccggagcaaaggacactttagttaaagctttcgggtaactccagtctgcctccctgaaggccttgcttgccagcctcccttctgaggaacgggacggctgcttgcttgcctccatcttttcaaggtagaagtctgcctcttgctgcatgcctttgatgttggaggcagtaagctgagagaggaccactcgtgtccagagcggagaagtggcttcagaataagatgagagctctggagacaggctgctgggcctgcctgcttgcagactcgctagaggtctacttagcaggtcatttcctctgtggagaggcccaggttttatttatttaagtaggaggggttttccacagtgttgagaggtaagccagtataacacagtgctgtccactcatcccgggatgggaggggccaagcaggacatggcggccattgtcacactaagttcagctggagccctcttagagattggtgcctccttctgttctgggttggcttctgtgagggtctgtctgtagagagcaaccctccctgggaagcagccagggcaactgcagctgcccagggcgaggtgtggcagggttgggcacttcctcttgtgaatgaatcaccctgagctggaaggggtagtcaaacaggaatagatcccacggccccttctgtggctgacccctcccttccactcatccctgatttgtggctttcctttctcctgaagccctgctggggacatagttacagcagagcccagagctctgtttgcacccatggttgaccttcacactaatcttgtgagtccgaagtcatcaggtctcacgggcggccatggctgtttcctgtacccagttcttcagctgtgttcccatgcttagacttggctcttcctccttcctctttcttctctccttttacacactccttccttccttccctcttcccctttcttctcttcctccctccctccctcaccttctttttcttttgcttcctctccctccccccctctctgcctctcttccctcttcccttccctcttctcccctctctcttctctagtgttattaaatttactgcctgtagctgagggtgaagcctgctgctagttgagaaacatggttgtgggtgtgcctacaagagcagagagcgtttctgtagataagctggattctctagcttgctggcttccccatgcccatttcttctttaattcttccttgtgcttagaagaagaggaactaaagaaatataagacaagaaggggaccgagaggaagaaggctgggacagggaggaaactttgaacctgcgggagctccttcaaaaacactgggcaaggaagaggagtgtctgtctgagtggccacagtgtagaaaagggcagttgccccttcaaggcacagggttccagttatgctttcccttctggccccaacaaaccagctcctgagagagctgtgtccttaggggcagagcggagctgcagcggccaccacgcatcagaatcactgagggagggcgtatgggggaggcttgtcgttgctatgggatttgtagaaccgcctcgaaggctggtcttgagttctgagtgacacactgctgtgttctcaaaccacgtttcctctctggattctccttttaggtaaccaccaaagacaaagacctgcagcagaagatctaccacatcattaaggaagactgtcagaaaccaaaccgtaagtgttttgtgatggtgagccggtgcgcccagggttccttccctcctagacagaatcaggatgctctgtcctgactcaggagggagacagccagggcttctgtcctccgagactcattgtcctctcctctatgtcgtgttgcctgggcagaggagtcagcatgtggggctcctttaaacagccctggggtgtccggtcctgtagggataagctggaggccaaccaccaagctctccctgagattcgggcacactgaagtgaaccaccacgctcggctctgagatgcgctcgctgcttctggtccctggtttgtcgcccatgtttaccactgcctctgaatgtaatgtcaacattcactctcttctcaaacatcaaggcttttcagtttcaggcaggacggctcttagacattacagttcatgaataacgaaatccagtcatctcaagaaacccttgagttataaatgaaatggcttagaaaaatagtgccggtttgtggagttaggtcggcccctagtggctggacactcaaactacatctagtctgataactcgcatatcaattcaccctaattacaaagaaagcatccgtcttatcatgagtctgtatgaacttgtgagtcttcaaggtgaccgtccagagcctggcttttgcaaacatatgccaatgacaaatacttatgtcaccatgatcctaggagcagaaagggttgttagccctgggtccccttcctatttttattctctctggagaagtctttcactcctttcagacccagaaggaaaggctgggtctacagacaggtagagggaggccaggtcatctaccctgtggtttaggacccagtgagatcagaaccaatagggtgccacaatcagacaagaaagaaagaaaggaaggaaggaaggaaggaacggaggaaggaagggagggagggaaagggaaggaaagagcgagccccaaagcagtcctgttacggtagtaatggatgctgtttggctcattcgtagcagggatggagcagcacaggcaggcatggtcgcatggacctgtaaccccagccctgggaaggccgaggcaggaggtcagccagggttaacacaatgagatgtgctttctttctccccctgcccatacccctctatttcacctttctttttccctcccccttcctgtgtgtatgtgtatgtgtatgtatgtatgtgtgtgtgtgtgtatgtgtgtgtggtatgtgtgtgtgtgtatgtgtgtgtatgtgtgtgtgtgttatatgtacctggtgtatgtgcatgggaaatgaaaggaagactttagatgtcctctatccctttctgcccttctctctctgtctctgtctctctctctttctaaaaactgctttatttatttatattccaaatcttaccctcattcctggtccctcctccaagagttcttcacccccaccccccaccccacccctgcctctgagcgagtgctccccatctcaccctctcactccccctaccttacctttcccccccgcaaccctccttccctggggcacccagtctctacctgtacacatcctctcccattgaggccaggggccatggaccaggccatgtatgctcatatatgctcactggttggtggtttagtctctgggaatccccaggggtcccagatacagttagttgacactgttgttcttcttgtggggttgccacccccttcagctccttcagttcttcccctgtcctattcttttaagacagacttgtcactgagcatggaggaaggctggcagccaaggtgctccagctgttctcctgtgcctacccctccctccccacattcacacagtgcaggggttacaggcgctcctgcagccgtgcctggctgattttacatgggtatcagagatttgaaatctcaggtccttaggcttccaaaacaaggtgcctctccagcccacagactgtcgcaacaaagcaaaaccaataggcagcctctctgtctgctgctttgtgagagcctcagccagaacggatggtcccaaaatgccattcctccacactgaatcccaggcccctcagccgccgcattcttagattgatgcacattgggactgcagcgctttatagcctggcacccgtaaagtaaacgaaaggggtccacactccatcctcggaaggagtggctccgtgggtggcagtgcttgctctgaaagcccgattatcagagttcaggtccttggaacacacagaaaagttgggttcagtggcacacacctgtgttcctagcacccctctagcaaactgggaggcaggtacgaagctcatgggccaggccagctagcgtggaacacacagtgcagcagcagaaagcagcaagatggacggcaagaagcagctccctaattcatatccgtgccgtggcacgtgcacacatgcaccccaataaaatatttaaaagagacttaaaaaaagtgacaggttttatatacactggttggtcagcccctgcccaggcaactgagcctaccatggtggatggctctgccactgtctgtaagttgtgtgagggggaccctgcaggcagtcacagctggcagggaagcgaaccaggaagaggtgagagtgaaaactcaattcagtttggtatcatcaacctggatcaaacctcggggagtctggtgccagggggtttactgccagcattctttaaacccagtgtaattttggaaaagaagtttccaggtataatacaatccccggtgcacaaggtataattacattgaacctcaactcagggcacatgtcatttcttccaagaagacgggttctggagatgggctacatgtattagcttaagggtctaggggaagagctgatctgctcatagaggtagtggagaggtcatttaggctattagccacctctggtcctggttatgaaagcttgggggagcctttggctatacagatattgtaacggtcatttagactactaggtatctttggtcctggttgggggagcctctgactgtacaagtcattgagattaccagccattactggtcccggttgtaagagtttgatatgggggctggagagatggctcctcgggtaagagcactgactgctcttccgaaggttctgagttcaaatcccagcaaccacctgttggctcacaaccaccggtaatgagatctgacgccctcttctggtgcgtctgaggtcagctacagtgtacttagatataataataaataaatcttaaaaaataaaaataaaaaataagtttgatctgtcctggcccgacagatattgcacatcatcaggctgttaatcacctccgattcccagatttctgaatggaaaaacaaattttacatattttccattggaaagacatcctggtttcctggagacctgggagtgcaaggacctttgagctctgctcccaacacatgcaggcctctaagagctatcggccaatcacctagtgcgaataactccctaggatactcacaggaactctctctctttctctctctctctctttttttttttttggtttttcgagacagggtttctctgtgtatccttggctgtcctggaactccgtgtgtagaccaggctggcctcgaactcagaaatccgcctgcctctgcctcccgagtgctgggattaaaggcatgcgccaccactgcccggctcacaggaactctcttagcattggctgtagtcacctgtctttctcttgtcataacctgtggcactgagtaataaatacgcaggtcctaaaaagtcagacagtgcagaactgctcagaggacctcagacccccctctccacaccagaccagcatccgtctgggggtgctccgtgcacatgcaaacacacaatcctgcttttctagaaactcaaggttggcctataatctgcattgtctgcacccagcattgacctctagagggcattggcaattgcgctgtgtgtggaaagatgcctccaacttctaagtggctacatgctattccacagttgtccagagaggtcagtctattcatttcatcattcctactgggcctttaataagtgatgggctgacatttagagggactggggctgagatcatagcaaggaaagtgtctgcactaagcctaagccggcatcagctccatgaaggactaaggggctcgtcctttcagaaggtgggcagcatgtggcatcagagagagcctggttgcagagcaggtgacagtggtgtctacctgaagaatgtgaattggtgttcccaaagctgttgagagaattctaatttaggctagaaaggggtgagaaaagcgaggttccctttcccgacgggacagtgactggtagcccttacctctagcctggggtcctgaaggctcgctctagctctctgccccttggctgaatactgaagcagaaacatttcaggtgggattgttgtgtggatttttctctactgtaggtggcttctagattaaaaagcctggatttcagctttacatatggtataacaatggtaaattttccaaaaaagagttgtacgatccaaatggtttttttttttcttttttttcttttttctttttttggttttttcaagacagggtttctctgtgtagccctggctgtcctggaaatcactttgtagtttgttccaggctggcctagaactcagaaatctgcccacctctgcctgccaagtgcgccaccaccacccagcccaaatgtcttttgactctggaaatgttctcatgagtagaaaaattaagcacaaaacgtgcaagtaagcatctcacctagattccctggaagaccagctctggaacacagccacgccctgtgtattcgctgtgtcctttttacatctaatgggtgccatgtaacatgtaccgtgtaacatgtattgtgtaacatgtaccgttgtaacacacatgtagagtgcttcttcaacgacagcattttgaaagtaatgagtatattcaaccactaggggtcacaatctaacctttgttagcctgggacctcaggccatgagaggatcacaaatgctccctgtcccacaaccagtaaacagaactgattctcgtgggtgctgtgacttgctcaagggtacaaagctgcttctctgagagccttccccactcgagccctttggttaccatgggagcgtagaccagcttcagctggtgtgtgccagggctggggctctgaggagggcctggcttttagtgatgaggttcctctgtgacttaggatattgtttatgtcagaagatgtccagatgacgtagagggacagaacacagcacagtgcatttgttcttccgttctagtctgctttagtctgcttggtaaggagaagaggctgctaacacatgagcatagaggtaatgatcactaaccccacgagggggtggggtgccagccttcagctttcatcactgagtgcccagtgcttagtttggggtcaaaaggtgaaagattactaaactacaactgccatagatatgacgcagtgaaagccagaagaggaaacatgggacgggctcaaggtaggaatcccttagccaagccaccccattgagttaagaaagaccagctctcgctgggcagtggtggcacacgcctttaatcccagcactcgggaggcaggggcaggtggatatctgagtagaagccagcctggtctacagagtgagttacagggctaaacagagaaaccatgtctcaaaaaaaaaaacaaaacaagaaaagaaaagaaaaaagcaaagaaaaggccagctctactgtgagtctccagaggcctcctggaaagccaggattcagtactgtgtaccagagaaaagggtttatcagggaccacacagccattaggataggctatacagattgactggaagtctgagaagtgggctgtgtcacagaggcatgcgtgtggagcctcgggctgtgtcacattggagagggacagaggagggcccggctgtcacagtcacacctggtgtctgcccttgcctgtagatatggagaagggctgccacctgctacacatcctgaactgcgtgcacctcaacctccgctgggacctgagcaaggctgtgctgcagcgggtgctggagctcctggaggaccagagtgacatcgtcagcaccgcggaccactactacgcggccttctgagcagagccgcggagcaaagcgggaggctctaccctaggttctgctcacaggcccagtaaagacttacacatcccatagtaagctctgataagtcacaggaaaataggactgagacagatggctctgatgtcagccatgacacacacaagccctccttgtcagctccctggctggacttcccatcactcagaacagaatgggagaaaacggtgttgctggtttaatcactgtgtctgaattcaggggccccgtctcgatagaggggcatcccagggcgaaggctcctccacatctgaactggagcagaaatagcagactacaccgtctgaaaacgtcacactccaagctaccacatacatccccaccaggctcccctgatgtgtcaagagctcgtataggcgcatcgtctcctacagtaattgacgtttgcctcagtttcctggggcttcagcagtagcggtgagggctgctgaggcttgcagatctgcattgaagaataaaaactccaatgcatggcttggcatttcaattcatttccttatgacttgaaagttgtctcagaacatttccctgcactcaggagaggtgcccaactaaatgtgtggttcctcggtgcccctgaagatggcagaggctatcggccaactgtctggctgatagtgttattttcaaggttgccgctgagtgtgcagggtgtgccgacaccatccagacgaagcccggtatgtgcccagacaggtgatgctcagaatgacaaggtaaagaaaacatctgagttatgtagcaggcttgttccaacagcaaatggcagatccagccggcagaaagaaagcatggaggaagatttagagttaattacagtcattttgcagagggcacatctgccttagtctgctgtgctagcctttgacgtagcttgagtctggatggctcagctggaaatcccttgggcccaggagctattccaggcctctggcaactctgtattaatagggacgacacagccaccttctcttccctgtgcttcccaaagggtctcagctgaacaagatctgcatggaattcttccagctcagcagctggtccctgttgaatgactatatcctgagtagtggagctttcccactaatcaaggagggagcctggaatcagagcataaactgctcgtgtgctagagagagcagtttcatgaggattccttggggggaaggggggaagcacacaggtgtgagaatcatgaacgtgcaagatgtccatcactgtctaatctacaataatttatatttggagaagttaaatatataccacacaatgaaatactacacagccactaaaatgatggtgcagatggctagccactgtagccatggccagtaccccagatttgtgaggagaatggagttacagactagtttgtgtgaaattaatgccattggtatgaaactccctgtgtgtctttacatagtcagtaaatgtggatagtgtgggttggcacaggcagctcctcgtttcttcccttctagaagcacttgctacgtttccctttcagggcaccaaattccctggctgcaactttactcaggcttccatctgcccacgtgctcaagagtcagtctcagccccagacctcatttctagctatcttgttctccagagatcttaacctcatgtcatttgcctgttgccgctctttccaggtggcatgagattgtgggcctgtctgccgtcttcacacccatatatcctcatactggcaactgcttaggtgtcttagagacgtcaccaactaaatctgtccagagccagtctctgggtcaccccaggcactgccttgcttctttctaagccccacccccgatgcaggagatgccatgccggctccattccccagacgctcaggtcaagcccaccgacagctttctcacagtctacacctaagccatacgctgtagcttactaagttgtcttgattcctagtgtttctagaatatacttcttactcccctgcttccgccttctgggaacattgccatctcttcctctcttgctcgatgtcagtcctcactcccttgtcacattctcgggccagcaaccacagggatcctgtattggtcctactctccatggctttgagtctttttcaggaaggagcctgaggcatcccagtgaccagcaggactctgctgggcctcaccttgctgcgctatgctcagcctttactgcactggctgtatttggcacacaggtacactccagcctggtgacaggcctctgctcttgtccctcgggtctgtgtccctcaccttcttggtgaggcccaacccagctctctgttgatcgtaaccaatttctgctactcagctctgttctgcccacagtgctggtgactgcctaacacactccagatgtctgcctgcttgccctgtttatcatctggctccccagtagaatgctccagaaggctagaattcctgtgtttcctgtgtccccggtacccgggcagtgcctggcacatctttcacaagtcccacttttgtttgtggctcctcatgcctgtatctcctgagggttaccaccattaccaccaccatgtttggaaatgttgtcagtccaggaaagcgcaaacgaacatccccccccaaaacaaactcagccagggcacctgggttacagcaactcagattccctcgtcctcggagatgtggttgtgatgtgttctgaccagagttcctctgcacaatccagtgccctccacccctcctaacatgatctttaccagatgatctttaccttgactgtcttctctgttgctcaccactgttctcagcatctccgaagtggaagttcttgccttcttgaagtctttgcctctgggtcagtttctgggcaaaactacattaatatcacgctccctgattcatttgaaaagtgttatgcggataacacacagacatgattagaaatacccaccaggccgggcgtggtggcacccgcctttaatcccagcactcgggaggcagaggcaggtggatttctgagttcgaggccaacctggtctacaaagtgagttccaggacagccggggctatacagagaaaccctgtctcgaaaaacaaacaaacaaaaagaaatgcccaccaaagactgacatgtttcccctgaaaggtgagatgccaaatgctttcaaattcatgtcttcacaaatcctagctctaaataagagtggagtgggccagtgaatgagatgaaatggcaggtgaagggacgtgctggtgacctgaactcatccctggaacccgtgtcagagtggaaggacaggccctctctacaaggtgacctttgacttctacgtgtgcactgtggcatgcacgcacacacagaacaagctggagaggctgagtggtggtggcaaacacctttaagctcaaccctcaggaggcagaagtaggcagatctctgagttccaggacagccaggggcctatagagagaaaccctgtctcgaaattaaaaagaggctggtgagacgactctgtggctaagaacataagggcatgcgtgcactgcactctcaaagtcccatttccagccaccacatgaggtggtccacaaccacctgtcgctcctgatccaggggacccaacagccctaccctcctccgcaccagccctcatgcattcccttcccctctcacataataaaaattaatgtatttcccatcccccagaaagaagactaggaggcctttgcctcacagctgtgtcagaacactgcagagctgtgggaagctcttggaaaacccttcgggggctaaatgcagttgagctatagcttacgtatatacaaagaccaagcaacgggttcctgaaaaaggggtgtggaatgaagccctccagccctgggtgtatgcttgtttggagaagtgtgggcccacacgtagcttgtggaggcaagaggacaaacgatgctactgtctagccatgggtttgttcgaaaagccatgattatccccatctggtaaactaccagtgctcttcgttcctctaagacactcctttgtaattatgttcccctctgatggtgtgccaggacactggccaaaaaagccaagtgggattaagtccattcaaccgtgggggactcgagacccggtgccaatgactgaaaccaagcaaacttctaatttcccatcggcaagagcatctccactgtcttattaatgtggtttctcttccacaagtggcttctacgaggctacccgaaaacatctctttgttccctttttgcgtttatatgaagcctatgggaaactcagattatgaggtgtctcatgagggacaccagcagcagcaggcactgggaaaagggtgtgcagggccatcctgaaggggtggggtcccaggacaaagctttgtaccaggctttgatgcctgctgttggggcagagggctaactataagcctctactcagatcactggggtctgagtagcgccgaattttacctcaacctgttcctactgatatttgacaacttgtcttctgcctgctgacttctgctctatttactaagagacacagggaaatcccagaaaaacaccaggttatatattcacaagaattccaaatctgtccccaaaggtctgtcatggtgaagtcaaatgcgacattttcatttgagatcaggaagaggaaacttgcagatcacttgatggcttcggtatgggattgttttttacatctatttggtgtgtgtgtgtgtgtgtgtgtgtgtctgggcacacacatagcagatgacaacgtatgtgagtcgtttctctcctaccatgtgaatcaggacatcgggctcttgacagcgagtatctttacccactgagccatctcactgcccaggtcttagacttttgcttctgttaagtcaggaaaggtagtatttcattaattcagatttagtgaatggtctgtatggatgagtgagagacctgaggttgaaatggtgccgtttccttgctgtaggcctaccaagcaatcattaaaatctgactgtgagagaacaggtttccgctcttatagaaccaatccgccgtaatgaatgaatatcttactttgggttatccattatttggtatcatttagtgatatgttacttactatgtaagatttaggtgacttaaagctacttgaacccaggcctggagagatggctcaccaatcagttaagtacgtttgtgatgttagcaggaggaccagaaacaacttaggaaggaaagggcttacatttctgtatcagtcaggacaggaactcaagccggacaggagccgatgcagaggcacggagggtgctgcctgctgacttattcctcatggcttgctcagcctgctttcctatagtacccaggaccgccaggccggggatggcaccacccacagtaggctgggccttcccacaacaatcactaatgaagcaaatgccctacaggcctgcttatgactgattttatggaggcattttctttttcttttttttttttttttttttttttttgagacagggtttctctgtgtagccctggctgtcctggaactcactttgtagaccaggctggcctcgaactcagaaatccgcctgcctctgcctcctgagtgctgggattaaaggcgtgcgtcaccaccgcccggctggaggcattttcttaattaaggttcctatcaaacgcctagcctgtgtcaggttgatgtgaaaactagcagcatagtgaattactaataacccaaagtggaaacaacccagtgtgcactcactgactgagcagagcagtcttccccgacttgggtaccacttagttggtttctagtctgtaactgtggcaaccaagtatgcagggaacatcttcatagattcttccaggagaaagggcttaagcatatggactggtccaggtctggtggcctgtgctggtcacccagaacacaggtggctgaggttgattgtgagttcaaggccagcctaggccctatagagagacgaaaagcatactaaaaatgaataagtgaacagacattaacaaagtaccccctgaaaaggctggtccactgttaacttccatcaatgacggatgacctgctcaaagctcacccacaatgcaatgcggcacctgtagtttttgtcactgtccttgtgacagaaatgaataactgctgggtttgtttttgtttgtttgtttgtttgtttgttttgttcctggaactcactttgtagaccaggctggcctcgaactcagaaatctgcctgcctctgcctcccaagtactgggattaaaggcgtgcaccaccactcccagcaaactgctgggtttttgtttgcaattatttcttgaatatgagccgaattgagcacctagatgctcaccatggataccatagacaaggttctgtcctggacagtggccatctcttctaccaagagcaaagaatggccagtcacccacttgcaacagcattagcctcaggaccatcccagagcccagtcagcacgggtgatacacagctgaaatagacatacggctttcagcgtctcaacatgctgcttcaagtacttggccatgtgctcacaacagcactaatgtggtaaaacataaagcagtggtgtatgtgtgtgtgtaacatgcatgtgcacgcttgtgtgtgactatgggtgcacagcatgccataacatgcacgtggaggccataggacaaccttgaaggcaagcctcacctttcaccttatttgagacgtgatctcttccactgttggattcactgttggccttcaagcttccagggattcccctgcctcctcctgcctcatcacaggtgcactgcgactgaagatgtgcactaccatgtccgtctttgtgtgaattaaatgcaggttctcacgactatgcagcaagtgctttacccactgagccacctccctagcctgactgatattctttaaagacagcgccccccccccaaccaggttctctgaaagagcagtaagctcttctctcttaactgctgctctgtctctacccctacaacatgtcttttctgggtattcattgtgccatgatcaaacgtagtgactatgctatacagaagatctcccgagcccattcctgggaacaatctaagaaaaggaacagcatatcttaagatgacaatgaaattatcccggttgctagtatattactcatactgggtattttggtttggaatgaagtgcccctcccaggtttatgtgttaaagcctcagccgttgtcactgttaaggaaggttttggaaacttaggggatgggcaggtcactagacgaggggggtggggtccttgcaagggtatctcctcccttgctcctttcttggttgccatagtgtgaactgtcattctttgccaagatttccccctgctgttgtggactgatgtctctggaatcacgaaccataatgcattcctctttttaaaaatcccagcacttgggaggcagaagtagaaggaaaataaataaataaataaaggcaggctctcactattattgactttctgattcccctgcatcagcctccgaagtgagggattacagatgtgcctcttacagatgtgcctggtctctttaaaaccagcggtgctattacccgcccatggatgagacacacttcagactccgtcaccattgagataaatgcagaaaaccgtgaatgcctgtggggaaagggctcgctttacgagccccgcagctttagctggagtcgaagcaggcttagcagagctgccatctacatctcccagcctaatcaccctaagagtctgggattttcattttcaccagttgactggactggtgtagctaattggggcactgggccacacccattttgatcgcctctgcaaggaaatgtaccctaggggccgagggtctttatttttcattctgaggatgggccatgaataaaggactcgagggaagggaaagggagcacggaacacacttctattatgtccttagctctgcgtctcagaataatggcggccctgcatgatgtctgcggcaaccgctgacatccgtgccatactgaaacaagtggacaatgaatttactctcggatgagtggcatgctcctccactgagttgttagcatagccgttgttttcccatagccctttgtaagtagcaggcaagctttacctcagggaagcagtgtggagctgagttggggagttgctagtgcatacagcctggggagtgttttctggaagcctggagcctggggagggtttccagataagtagaccccgaggcaatgcagactggaatgtcttctctgacagtcccgtggcagaggccaggatgacagggctgggattgcaggggtggggatggcagaggctgagatggcagggatggggataggaggactcctgtgctgaggctctgtgatgtctctgagaagggcgggacctcagcctgggtcatagcttcagctaagattccaggcctaaatttgctaaggaggggaccacaaatgtcctgtcctgaagggacatgaagtttgaaccctgctctatcagcgtaggctttggcctcagaaggatggtagctctgtcctgttctccagctgtttaattctagagtcccatggatcctcagggaagggtgaacctgtctcattcaccctcccactacctcccgccagcctagaggacaaaggctcgcctgagacaactgaaattaaagaaaagggaaatgacaagtctcaagcacttgagttttgaaagtaaatctcataaaggcacagttagaagaaattcccggtaactctcagaatgaggtcattctacacgcctgtgtttcagaatgctgttttgagtgggaaggaacggcataatgtcacagtttggttctggagacattgttggttattctcccaaggacaaaaaagcccgtcctgcatcactgcagaaacacaattggaaaccactccttagagacggtgggagaggggttgacaagatggctcagcggggataagcagttgcctcaaagcctaatgattccatttcaacccccagaacatacatggtggaaggaaagagctcattcctaagctgtcccatactctacataagtgttgtagaacacagaaacactctgtgtgtgtgtgtgtgtgtgtgtgtgtgtgtgtgacagtgtcttggcagggtccacccttttataatctaccctgtcccacagggtatgcctttgacatactaatgagcaaggaaaatgacctgtaactctggtatgaccctgcttgcacctggctatgcaggagcaagcggatgctggtaagtgagcaatgcattccaactcagaagatgccaaaaacctctgagccatgggtgagtcttctctcaacatgaaggagcatgatgacttacatactgcagtggcagctgctagcccagcccagcccagcccagcccagcccagcccagcccagcccagaagcttcagtattgtcagcaagctctgcctgtgcctgctgcatctgcttgcgtctgggcttggctgcccttggtgaagggcaaggaatgggacctgctctcctggaaaagacagctggcttgggaatgctggtctcagcactccagtaggggttgggccaccaacacaggcagacttggaattttccatcaaatgggtcataaggcacatgatttataactttgaggtacaaaagggttttgacctcaggctttaaatttttttatagcaacatttaaacattggttaccatctgtatataagaaaaagtgtgtgtgtgtgtgtgtgtgtgtgtgtatctttggcagtagaacttacttacagggcaggtagaccagatagcccatgcctactgcagtggttcaggggaattaatatcaaggcagcgaaacagagatcaggcaatacaacagaacctgagacagacagaagatgataagtaaggtatgccaggcagaccacagcaaacacttcaggattgtcagacttgtggggtcaggggtggggctccggattgctttggagtctgaactggtgacagaagaaatgccggaagaggacattcgaaaataaggagttccatgtagaaatggactggagagacggctccaccgttaagagcacttcctgctgccaacacaagaaacacaactattatctcaaaggataccagaaatagttaattttggagccaaatctgagtgaccatggcccgggaatacagatttaggtgacctcaaattgtgttccaatgtggaaggagtttcatgaagtgtttatggtaacaaaacaaagtcctaaatcaagatgcttttaaatacataggtggatacattaggcagttaggttatagcaatacagggagcactctaggcctgaggctctagctgagaacattctgagtcctttgattggtggaactagggtttgctaatacatcccaaaaggtttttatcggttagtcacaaggtcttg

SEQ ID NO: 770 - DNA, 1986 bp, Mus musculus
gcgtggcctcagcgggagtggctggcggtagctaggcgcgggtggcgggaaggaaatacgccggcgggagtgtgctcgcttccttctcgcaaccggaactggttcggcaatcttggctggctgctcctgcttcgggagaagttgtaaactgctctgatttctgcctctttttcctttcctccgctcttcccagaggtgaaaggtcgaagcttggatagacacaccttcagggcccccaaagtccacggccacagggactctctccattactctccggattcactcgttaaaactcctttttgggagtcttggctctgggttagcagatgccacagccctgcctcttgatggagtgtgaatccagtccaagggaagaggagatcccgcccctcttttggggtctggatcctgtgtttctagcctttgcaaaactctacatcaaggatatcctggagatgaaggagtcccaacaagtgccaggtacatatttttacaacgggcatccaataaggcgggtagatatcatgggagctgtcatcagcgtgaaagaaagagagactttctacagctacggagtggacgatgccactggggttataaactgcgtctgctggaagaagctgagcaacgctgagtcttcctcagacccagctattctgagcactgcgagagagcttagcatgacatcacagcttaagaagctgcaggagaccatcgagcagaaaaccaggatagggattggagatatcatccgagtccgaggctctgtgcgcatgttccgagaagagcgagagatctgtgccaacatttattataaggtggacgatccagtgtggaacatgcaaatcgcaaggatgcttgagctgcccaagctctaccagaaggtgtacgaccagcccttccgtaacccagccctacaggaggaggaggcactaaacaataaagacaatttggatctcgctggcctcacgtctttgctgagtgagaaaattaaagaattcctccaggagaagaaaatgcaaagcttctaccagcaggagttagagacagtggagtctttgcagtctctggccagtcggcctgtgacccacagcacgggctcggaccaagtggagttaaaggacagtggcacttctggcgtagcgcagagagtgtttaagaatgctctccagctgcttcaggaaaaaggactcgtgttccagagagacagtggctctgataagctgtactacgtaaccaccaaagacaaagacctgcagcagaagatctaccacatcattaaggaagactgtcagaaaccaaaccatatggagaagggctgccacctgctacacatcctgaactgcgtgcacctcaacctccgctgggacctgagcaaggctgtgctgcagcgggtgctggagctcctggaggaccagagtgacatcgtcagcaccgcggaccactactacgcggccttctgagcagagccgcggagcaaagcgggaggctctaccctaggttctgctcacaggcccagtaaagacttacacatcccatagtaagctctgataagtcacaggaaaataggactgagacagatggctctgatgtcagccatgacacacacaagccctccttgtcagctccctggctggacttcccatcactcagaacagaatgggagaaaacggtgttgctggtttaatcactgtgtctgaattcaggggccccgtctcgatagaggggcatcccagggcgaaggctcctccacatctgaactggagcagaaatagcagactacaccgtctgaaaacgtcacactccaagctaccacatacatccccaccaggctcccctgatgtgtcaagagctcgtataggcgcatcgtctcctacagtaattgacgtttgcctcagtttcctggggcttcagcagtagcggtgagggctgctgaggcttgcagatctgcattgaagaataaaaactccaatgcatggcttggca

SEQ ID NO: 771 - protein, 376 aa, Mus musculus
MPQPCLLMECESSPREEEIPPLFWGLDPVFLAFAKLYIKDIMKESQQVPGTYFYNGHPIRRVDIMGAVISVKERETFYSYGVDDATGVINCVCWKKLSNAESSSDPAILSTARELSMTSQLKKLQETIEQKTRIGIGDIIRVRGSVRMFREEREICANIYYKVDDPVWNMQIARMLELPKLYQKVYDQPFRNPALQEEEALNNKDNLDLAGLTSLLSEKIKEFLQEKKMQSFYQQELETVESLQSLASRPVTHSTGSDQVELKDSGTSGVAQRVFKNALQLLQEKGLVFQRDSGSDKLYYVTTKDKDLQQKIYHIIKEDCQKPNHMEKGCHLLHILNCVHLNLRWDLSKAVLQRVLELLEDQSDIVSTADHYYAAF

SEQ ID NO: 772 - DNA, 56260 bp, Homo sapiens
aactgtaaacactaagaagaatgcaaacttgaaaaaaatactttattgaaatataatatagctacagatcaagaaacacaaaataaccagtagccccacaagccctcttcatgctcctttgaagtcaacacccttcatcaaagggtaattgattctttacctctaatagcatagaacagctttgactggttttgtactttatataaatagagtcatatgatatgtactgtcttctgtgtttgccttctttcattccacatcacatttgagagattcaagagaaatagcttttgtaattaatatatactcaacattttaaaaattggagctgggtgcggtgttgcaggcctataatcccaacatttggagaggctgagacgggaggatcacttgcacctaggagttcaagaccagccagagcaatatagtgaggcccccaactctaccaaaaagaaaaaaaattggaaaacatccctttagattacttttaaaatcgtatgtatgggctgggcacggtggcttacatctgtaatcccaacactttgggaggcagaagtgggcggatcatgaggtcaagagatcgagaccatcctggccaacatggtgaaaccccatctctactaaaaatacaaaaattagctgggcatggtggtgggcgcctgtattccagctactcaggagactgaggcaggagaatcgcttgaacccaggaggcagaggttgcagtgagtcgagatcgtgccactacactccagcctggcgacagagcaagactccatctcaaaaaaaaaaaaaattgtatgtatgtctgtacacaatttatttgaccaagactataaatttttataaatgtcctgcctaaaaagaaaagttattttttctttttgacattttcattaattcttttatcctggcctattataatgaatattaatccaatttctccaaaacttaatctttacccagctccaaatgccttacaatctttgtagcatttttatgagaagagaaatataagaataacacaaaggtgttttccagctggtggacccactagcagctggtgaccactagggaggtcgatgtgttgccagctctgtccctgtaaggacatctgtcatctgtcagagcaatactctgggactttctcagaagagtgcatgtgcatcaagacttggctgattgtttccactcacttaattataagcctgagtccagttaaaaaaaaaaagggagttcacctatcacataaactaccagtaatcatgggaacttccaaagttggcaagacactgtggatttatgacttaaatgaccaggaataatgtagaacgccaggcaacagtcacatagatttttataccataaactccacaaaccatgcacagtgttgccctgtgatacaggctttctaaaaaaattctttgattttcttaattttaaaaattgtgttaaaatacatgtaacataaaatttaccatcttaaccattttaagcgtacagttcagtggtattaagtatatccatattattgtgcaattatgactgccatccatctccagaactcttcattttgcaaaactgaaactctgtacccattaatcagtaactcctcatcccccctaccgcagcccctgacaaccatcattccactttcttcaagatgcagatttttaaagcacaaaacgcaaagttctcttgtgtactcaatccagtctcttgggacacaaattttccttaattaaagtcattctctgctctccagaatgaaccctagcccattacctcctgccctcttcatctttgcaagggtcataatcctttggtcaagttcctgccatttggacaggaaggatgagctatttgactcacatgaaaggacccaagtagccctcttgatgcagtgggcagcactgtcagtctcataagtgtaaggacctagagggtatctcaccctcagccatctctcccttttatgtctgcttctgcttattccaagaatgagaagaagcagaaatgcgaattgcaccctggttcacctggggccttctgctgacacaggaatctccttcaaagtccatgaggcgggatgggctgtaactgttatctacaactaggcaatttctgactttgttctacaattcagtccttcactccttaaattcttgagccaccttattccccctgaccaaatggacttgctgttaactaaaagctatatcactaataacttctagttatgggtgactgacaagatcagcaaatcatcttgtcaaaatgcaaacataaaactggacaaaactgaccaaaacaaccatttcagcactctgagatcaaagacacacaacagtctgaaagcagttatgcttgaaaatgactgaactccaggtaagaacagtgagcatctgatgcatttggcctggggcctctctcattccccttgctgaccccagcttggttaatgtagatgttctgtctgggaagggcaagctgtcagcgcaagcagcacctctaccacagtcaaaggggctcattcaatttggagtacccattcctaaagggaaaaatgaagagcacaaaagtaatagttatacaggttattacaaaatcatctatggtaatttttcttctcatttctttttttttttttttttttttgagacggagtttcactcttgttgcccaggctggagtgcaatggcacgatctcggctcaccacaacctctacctcccaggttcaagcgattcttctgcctcaggctccctagtagctgggattacaggcatgtgccaccatgcccagctaattttgtatttttagtaaaggcggggtttctccttgttggtcaggctggtcttgaactcctgacctcaggtgatccgcccgcctcagcctcccaaagtgctgggattacaggcatgagccaccacgcccggcctctcatttcttatctaacttttttcaaagacatgagattgtataaagcaataattacaacattgtattgctgtgtttataacatatagatgtaatatatatgtaaataatagcacaaagaaggtgggagggatagaagaatattgaagcaaaatttttatgtttttcaggaatttagtattaatctgaagtacattatgataaataaagacatatattgtaattcttagactacaatctctgagaaatagctaaaacttttttcaaaatgtggagtaattcagacgttaccctaaaaatatttaacacaaaagaaaagaaaaaaggaaagcaatcaaggattaaccgattaataaaaaagaaagttgacatatagaaaacaaatagaaaaatagcaaatataaatctaaccatatcaacaattgcattaaatgtgaatggtctacataccccaatcaaaacccagagattattagactgaataaaaagacaagagccaactatatgatatctataagaggcttagattcaaagacacaaataggctgaaagtaagaagatggaaaaagatacaccattcaaagagtaactattagaggactgaaatggttatattaacagacaaaacagactttaaaactagaaatattactagagacaaagaggaacaatttcataacaataagagtcaatacatcagaaagacataacaattagaaatatatgtgcctttaacaactaagctcaaaatacataaagtaaaactgacacctttctcagagataactcacatgaagcagggggaaaagttactgtcctctgattactccaactcagggcccccactttatgctgctaagttatacagcatttatcatgacatattgtaattgtctgtttacttgtttggctcacctggagccttttttccttttgtatgcccaggatacagcacttttttcagtctgctcagcagatacagaacagttgacttttgtaatcaattaattaataagtgaatggtatcctaggcagaaggggagaagcaaaagacagagtggcatattgtaggaactgtaagttgttccaaatagcttgagttgtgtattccaatgtaaactattgattggatttaagtccagacttatttgggcaaactttcttcaatattttgaggatgtattcttcagaacagcattggagagatgatggtctgaagtgtaggatggctatgagggactgatgggagatgagcctggagaggccaggccaggaggaacttggtaggaaatgctaagagatttgaacattattctgcagaccacatagagccattgaaatatttcagacaagggagtaacatagtttaatttgcattttataaggctcaccttgacagtggcacagatgatgaattggaagaaagccaggctaaaggcaaagaaactagttggaaggtagtgtcagtaacccaggcaataaatgacaaaagcctgggctcaggttatggcagtgggaacagggaagagaggctgagttaagaaaacgcatttagaaaacagaactgacaggtcttcatgactaattacattgtagggtgaaacagagggaggtgtccttgaaacattccaggtttctgacttcgacaaaaggcaggtggtggtgacattcatcctgacattcatcctgacttagaaaggagaaatggggaagaggtttactttgaggtatccaggagagtctggttggaaattcacatgacagactcaggagagtgttctgggctggatgtgaagaattgagagtcactagaagattgtttccactgaagtcataggtttggataaggccactcagagaaagtacatagggtaagaagggaaatgagcaggagattgaaccttggggaacatcaacatgtaaaagagataacaggagaggacactgagaaggaagaaacagaggcagtaggaggaaaacctaaaaggtgagaaaacccatcaggaagccaaggtgggactgagagaaaatatgatcaaatcaacatcaaatactagtacatcaagaaaaaaaagatacagaatgataaggaaagaaaagtattcattgaatttgaatctgctaaggttattgtgagtcttaggagagcaatgtcagtcgagtggtgggctgtggtggggtgggttgaagaccaagataagccaaatgatggtgggttgaattagagacctaccacagagaagtacagataggaagcatttaggactcttccaaggagctttgctttgaaaggagatgagagtgagctggagggcagtagttaaaggggagaagggggtcttcagagatgctgcttttggaaagtttggatgatgttaaagagagcaggagagcgtgcttatgggccaaggggaagccagagagagagggaggatgacatcataagggattgagccaggttgctaaggaggcaggaggacaagtgatacagatgaggcccactgcattaggcccagaaatgttttcttattctagtttcttcaccaccaattgatgaatatccgtaagacacaatttttaggatagattcagtaaattggattgagaacacttcttatacatttttgtaccccccaccgtagtatgttagatgtggcaggtatacctacaattctttttttttttttttgagagagagagagtcttgctctgttgtccaggctagggtgcagtggcatgactacagctcactgcaagttcggattcctgggctcaagcgatcctcccacctcagcctcctgagtagctgggactacaggtgtacaccaccatgccctgctgatatttttcttttttgtggagatggggtttcactatgttgcccaggctggtcttgaactcttgggctcaagcaatcctccctccttggcctctcaaaatattgaggttataggggtaagccaccacacccagcctaactacaatttttaaattcattaaatcgttcctctgatgaataattaacaactcccgttgtttacaggaataaaggtagaagctagctcaagaccttcagaatctaactaaaatcttggtctccaggtggcttccactgcagcctccctctccagccaggctgctgtgttggcttacccaggaacatgactcgcccatcctgctgcctatgccgtgctcccactccatcacagcatcacagtacccttttcacatagagtgagactaagactaaaatccacaccaaccatggcctacaaggtccctcggatctgcctcctgcctatctctccattgcatatgcaaccgctctccccacactctcttctgttccttgaacagggaagtattttgctgcctccacacggtggcccttgctttgactgctgcctgaaatgctctttgcttagctctgtgtggctggctttttaacccttccggtttcaacctgacgtcacttcatctaagcactgagaacaatttgtttattgtccctccactttccccctacagaatggaagctccataagggctggaaccccactgtcttgtctctttcttaccctcaatgtctattacagtgcttgacaaatgcctttaaaatatgcttcatgaatgaagcatgaatgaatgaacagctcctccataatctcaacacccagcttaaatcccacctccatagtaaatatgaataatagctgacatttatttagtgcttaccttgttccagtggttacatatattatctcacttaatgaggtccctcaatttacctcctgtaactcatacagtaattatccatgctactcctttcatattgaatcacaatttagcctcttactttgttatttaatatattacaggcatcaccctttttgctccagtggcataattactgctcctccacagcccagtgccaaagcacacagagaaagctcaagatatgctgaatgactgaagatgtccccgccccccacctgccatccctggggttataatagtagcctaagaaaaatgttgagaggttgtctttattatggcaaagataagcacagtcagactttagttaaaacagtgaaaacactttactgaataactattgacagtaggggaaagagctgagttcccttcagatttatagagaggtcaccgggctttttaaagagaaaatgaattgggggacagtggggcagggaagaattgcaggtgcctaagaagagtctgcgaagtgaaaaaattacaaaaaatgagaagagaggggaccagtccctgtgagacccatctaggcttgctaactggtgcttattggagttaggctcctaccctccaacaaaggctaggagacaaggccttgccttcaggtattggctggaacaaacagtaaattattcttcttctttttttttttaattatactttaagttctagggtacatgtgcacaacgtgcaggtttgttacttttggcagtcttgagttttctcaggcaggcactttaaagggatctagggtcattctaggaatgtagccttgagctgtttgaaactatgtagcatttgttcatgtctttataggccaaggttgaggacaaattgggaagaggactcaaggagactgattagagtttggtcaaagagagaatcttttgtcaactgtaaacttcaaacagaaaatctaacccactttgcaagtggacaaactcaattccacctgtaaaggtgtaaaacatgtttaaaacatgatagtttgagtttgaggtatgagatatccagttcaatcccctcattttccagaagaacttgttaaaaccttaactttctagaaagaattgtctattctgtcacaaatgcttcaaaaccaagttcacaagtttcacattgagaagctataagaatgggttcctagcattacatcttaactgctgggttttgaaatatctgctttgcagtgttgcagaattccagaggagccctgcagtgttgaggattttaggagtcccttcatacacgtccaggcggtggcttggggaacctgaaatctgtgttgatggagactaaagggaagaggatcctcccaaattcctctaaatgcttctgcagtctggaaattcttttctacatttcaccttaggtttcagttacaacctactccttcaggtttggggctcagatcaaaaggaacacccttagactccaaggagtcctcccttcattgtaaaagatgacattgggacattctgctctgcttataccacctgggtgtggtccttcccaaggctggcagtaagcatggagtccaggagggctcttttatccaacactctacccttgagcgccatgagcattattcctgaaatcatctcaggctctgacacttagtagtgatttcctcctttgggtttcaccctggagcagatgtgtacagtcaggaaaatgtcactcaacctgtctctccccatctgacaggtcagcaggaagcacctgtcctactgggtgtgttttctttgcaagggccttcctcctataagagaaggtatcttctctctctctctttttttttttttttttttaattgaggcagagtctcacactgtcacccaggctggagtgcaatggcccaatctcagctcactgcaaccgctgtctcccaggttcatgcgattctcctgcctcagcctcccaagtagctgggattacaggcgcacgccaccacatttggctatttttgtatttttagtagagagggggttggtttccgtatattggcctgcctggtcttgaactcctgacctcgtgatctgcccgcctcggcctcacaaaatgttgggattacaggtgtgagccaccgcgcccagccagtgtcttctcttaattaaatcttaaaccctacatttcctagtgttcattgcagtagaatctgggcaatgtattttaccaaggactcttgtttttgagcttcttaaatggccggggaggtaattaaatgccatgggtctaatgacacacacactttccattccagcggctccaagttccttctctgataaatagtttagcaattatctctttggccaccacctgcctcccccgggaatggtctgccagggtgatctgtactcccctgccattttccagagtctctgtaaattaggaagaattcctgacgtctcgggtaacgtagctctttatgggagtggaacgtggctatctttcctcactttaaaatagaaattctggagactaagcaccatcaaggtggccatgatttaccaaaatgccagcttttcaaagttcttaagtgtacaaccttccagactgtagaccgaacaagggtaaaggagacaaaatgtattgtcatgattttgcacggctagtctctggcagagtcaagacctcacattcactcgagggctcaaatttagatattgacatctccaagtgaaactagagtcctaagtgtgtgagtcaggtcacttaccaactgtaaatgaacatttaaaatatgccacaatgcactcgtggcactgcttactttttatctgttttacatatcaggaatcaaaaagaaaaatagtctgatcctgacccaacctctaggaggcccaggttcagggtcccgccaccagcaggaggaggggtgaaaggtgactagaagagcggcgttagaactgcaggaatttcaaggtcgcctcctaggcctcagcggtggaggctagcacgaaggcggggctgcagcgctgcctgaaccaaaagtacgctgcgctgaggcggggcacggaacgggctggacttcggctggatggggcctagcggatggttgggccgcggcgggatggggcggggcttcgggcgggatggggcggggcttcgggcaggatggggcgtggccgcggcgggatgggtggggtctgggtgggatgaggcgggacttcgggagagatggggcggagccgtggcgaggcgctgcagcagaaaggaaatgcgctggcggggagaccggggttggtccctggcggggcagggggcgggctcaggccggaactccagagacgacctcagccaactgctcctgcgccgggcggggtcgtcgccgccagcggctccgagcgccggaagggccaggtctcagggctcctggagctgcaggcggcgggaggggctacaagtgggtccattttttagtatcttttttcctccttttcttggctcatccccaaaagcggaaagtttagggcagagcgacagtcagacccatccactatgccccaacacgtgcagggctgcgagggcgcccgttcctcccgggaccccaagcggtttctgctacgcctgtacagacgtatcttcccagagtgaaagttgatgtttagccgttccgaagttggtgctttgtgggaaggagaacagcgggagagccgtaaggaacgcaggcgtcctgacgtgaggaacgcctcttaacacgccccgtggcatggagtttgacagggccctggatccctgcgttcacccctcctggagtcctggacgcccacctgggagcagcgtcagggccgtgccactttgacccacgttaaacgcattgcatcctcatttctgtgtcccatctagatgcttgactcagtgatgcagaacctttcagagttagctggaagccacagccctgcctcttgatgcagcctggatccagccggtgtgaagaggagaccccttccctcttgtggggtttggatcctgtgtttctagcctttgcaaaactctacatcagggatatcctggacatgaaggagtcccgccaggtgccaggtatgtggctagccaccctgggatgccctgggctgcatctgccaccctttcccaaagtctcagaaagctgggattagaggcttttaggagagccttccctgctgcaggctttgaaagggacctagcctggaccttcgcatgagttcatttatttgcaaggtaaaaaaaacagtctaaatcttttttttttttttttttttttagtaggtgtttgggggagtaacttttgtactggggtttttacctccatttagggtctttcatgcttaaaaatgctcatttgtttttctttggccctgctcctgttggagagatcgctgggccagatattcctaggcctggctcctttcctaaatgtgccacttacctggtccgggcatgtgactcaccttctgcaaagtctgggtttctttgtaaaaatggagcttaaccctgtgtaatggaatcttttgattcctgatatgtaaagggggtttgttttcttttgaattaagcagaatcaaaatattataaactccctgagaggaagaacatcatctgtcttgttcacctttgtaatcccagggcttagaacagtgcctggcatatagtgggccctcaaatagaaatagcagttgaagcaacaaggcattatacatgtaaagtttaaattttcttttttttttttttgtattagaatagtggctactagagataggcttatcttacctaaaaatataacaagtatagtttggggtggatttaaataattcacgtagctgtgtaataattcacaaatagccacatgtttactgtgctatttgagaagtttggttaaactttctttgctattttgagtgaagctttccagtcaaggtccttctgaataacaaactatgagttagaagtagtcaagaatctcaagcatccacagttttaatgagataaggttttgtttgtttccagttaaatgtacaaatatatttggatgaccttatgctaatgccttttgtacagatttttcgccacacctttatttcctaattattgttggaaatggtctgtgttttcccttggaaggcagccaacctcctccacagttttccattttccagtctggttttcttcatagctcatctcttcaggaagaaattaattcacaccaaattctagccttgcttaatgatcttctgcaggtgagaaaacaggtaccaaggacatgacaggggcttaactctacctgtaggcaaaagactttatgatgtgttaaaaacaaaccaacaaaaacaggaccagtgatctttgatttatcactggtgagaatgtttccaaggtgttttaaaaatgaaacctcacggttaaagcagacatcagctgacagattggatacttttagacctggggcccccaacccctgggaccacagaccactactggtacatggccattaggaactgggccacacagcaggaagtgagtggttggccagtgagcattactgcctgagccccacatcctgtcacatcagcagcggcattacattcttttaggagcgcaaaccttattgtgaactgcacgtgtgagggatctagttgcacactccttaggataatctaatgcctcatgatctgaggtggaacagtttcatccccaaaccgttcccccaacccccatccccggaaaaattgtcttctacaaaaccggtgtcaaaaaggttggggaccactgctttagactataccatagtgttctggggggtggggaattccactcctaggtttttgttttgttgttgtgtttggttccatttactataaaggcaaaacttttgactacataaaatttaggattgtttaaacagcaaagaatatcttaaacaaaataacaaagacaaaccccaaaaatgataaaatatgaaatgaatgtgttgtgtgataaagaatttcactgacctttgcccttggttcctgcagggtaacatctaaattattatagtttcctgagtgataggagcgtcatcattattcatggtgccctctcgaaccacacttgaatttatgcgaatcaggtggttcatgctggatccctagatagtttggggtggggctgtctatgcctaaaagaccaactgttcaattagagagttgggggttttgagccagatcatatcagtctgaccctttgggaagggagtggggctggagattgagttcagttatgtggccaatcattcagttaattgtgcctaccttatgagacctcagtaaaaactctggacactgagggtcagatgagcttccctagttgataatcatgtgttggtgtgtcagggggcaaggtgtcaaggacacagaagctttgtgtttgtgccctcccagaccctgccctagcatctcttcatttggctggccctgatttggatccttcatggataaaactataatcataagtatagcaccttcctgagtcctgtgagtcattctagcaaattatcaaacctgagggagtgttggggacccccaaatttataaccagttggtcagaagtgcagttggcctgaggactctcacaaaacttgggactcatgactcaaatgagggcagtattgttggggactgtgcccttcacctgtgaaatttaacctatctttgagtagttagcatcagaattgcattgcaaaatgattgcaaaacgtcagctcctcaaaatttgaatttagagttgaactaagaaaaatactgtgaaatttgattgtggtggtatttagatttgtgtgggttctttttgttttgttttgtttttgggttttttttgcattaaaaaaaaagtatcccaggtacagtggctcatgcctgtaatcccagcactttgggaggccaaggcgggaggatcacttgagcccagagttcaagaccagcctgggcaacaaagtgagaccccgtgtctgagttttaaaaagcagtacctatggtcccagttagtcaggaggctgaggtgggagaatcactttagcctggaaggtcaaggctgcagtaagctgtgattgtaccactgccttccagtctggacaacagagcaagaccctgtctcaaaaaaaaaaaaaaaaaaaatatatatatatatatatatatatatatatgtatttttaataatagctcataacatacagaagtcgtatttattgttttaaatatctctatccatgtcaaactttaatgatgggttaaataatagtgactcttttatttaaatcagcatataatacttatcctattattctagtgggtacaatgaagtggaaataatatattcataagaattatattaaatctggttgaaaaagattatcttaggtgttttaatgctgtcaaacataaataacatagcatcgattaaataacagcagttaaactaaaaagagagcaatcaaaagtacttttaaaaagagaaaacagtcaaatgtcttgctgtggttgtggatgttcagggttggctgcttgaaatccgagtcaacctgcctgtgaccctagatccctgaacccttatagcttgaccctcctccttcttgggggcctgatgatccagggggtcctctgatgcttttaggcctctgtgggctgcatgtggaacagcaggaacacaagggccttgggaaaggctggaacatgagctctgttatctagtatttgttaccattttcttttcttagttcattaagctttctctcagttgacagagcagccatccaactttcctgagctctcttcttatagaagatcactttgatacaagaaaatggctctctaattcttttttccatgtcttcagccatctttttgtagatgctgtgcatctgatacgtatagttcacgtttctatatacttggagaagtttcttctttctaagcagtgtatttcctcctcagttgcttttctctgagttttaaaattcaaactatctgttatagtcttctgatctctttctccgttgttctgtgatgcttttaagattttttttttttcatcagccacttggaactggaagggttttgttgcatcttcatcttgagtgactgtccttaaaggcaagtcattgttgtcagtccgtgagatgaaaattcacagggctcacttttctgtcctttttcaagaaagtctactgtgtccacaagtgaagacctgttcagatttttattaagtgttgccacatacaaagttgataccattggatgactggcctccatcacaggtgacttgagtacttcattggtttgtgccattagcccagtcttctcaatgcctttcccccagacttcaacccaggaagaataccttttgttccactcttctccccatctgaaagtgtttttgctctttattaaaaccacgacagtggtatatgctaggatctccttggagacccaaagaatcctgggactttcagacatcaccagcagagcatcctgctgcttctcaaccaactggaaagacatttcagtggcagacagccggccctctgtgggtccaaacagctctgctttctgcctctgattgcctatgtgctgtgggccacaacagaccctgtggagtgtctgtctctaatacaaacaagtacctggcagccaggaaggaccatcacgtaggccaggggagcgggggccagccctattctataaaacagttctctctaactttactctgctcagtgtacaaatagtgatatagagcatttggggaggcagaaagggctgagtgcagccagagatcctgcctggagctcaggccacctggccctgcagcaaacctagaccaccaaagcagcaccatgcctcagccctgctctgcacacaggcactccaaggctgagtggtggggtgtacggcagtagagggcatccctgggtgaggctcattttcctagtttaaagtttgcttctgccataaggaagcctgcccttgactacacaggacacagggatctcccttctctgcaggctccctatccttttgcgtttggtcagtgcaggcaggcaggggcaggggactgaagatctcatcaatggtgttatggaaaagactaagtttcaattgtgagaacttgggagaagccagttggaactggctacatcttaaaattttatggcctgggtgcagtggctcacacctataattctagtgctttgggaggccaagagtttgaggccagcatgggcgacagagagagaccccatctctataaaaaattttaaaaattagttgggcttctgcttgagaccaggagttgagactggaaccactttgtctccattcaatccaagttttcctggatggaggtgactctctttttgggggtgacacagtgacccaggctccttccctccttgttcctgccatcttcagctcatgcctgcaaggtggtcctgaggacagtctccaaccaccaggttatctcttgaagcgtgcctctgtggagggagagggtcttgcttttggctaaatttgccacctcttatttcttaaaaccacgtctcactcccttggtgtctctctgtaactgaggcttagaagctccttgttcattctttggactctttctcagtccctttgtctacaagggaaacagagccatcagcagaggccagtctgggggttataaggggcgtcgggattcaggccacaggtccccccatgaatggacagaatagaggctgtgactatgcttgatgtgaggggaagaatggccaaatgcctgaggtgatcattgtttcttaatttagaattcgtatatttattttaaaaaggacttgactgggtgtggtggctcccagcactttgagacaccaaggtgggaggatcgcttgaggccgggagttcaagaccagcctgggcaacaaagtgagatgcccatgtctaatttaaaaaaaagaaaaaggaaatcaccatatgaaagtttataacctgtttctgaaagtaaagaatttagccgtcatgggggcggggggaagaggctggaaaagagattgggcaggactctttagctgcaggtgacaggaacacagtgcgtgtagcttaaggtgaagtggggagctcgggttaggttactgggggacaggcagaagggaagccctgcaggagccaggacagccctgggaccatcagggactccctgctctgagcagcccctctgtgtcctggccccaagtcagaaaaaagcctctgggtatcagtgggtaggttccccctctcagctttctcctctggcaggaagttgcctgccaccatctgtagcctaggttttgaaaacagagttttaaaaagagaagttttggggttgtaacctggccccaaagggtagcgttttgtaacctacttactgtttttttttaaaaaaaatgctattgccagttcaaagaaatcatgactggtttcttagaaaagcacttgtttgaaaaaaaaaaaaaagccaaagaagcctttctcatggtttcctctctctttccttctagttgcttcaaatatagtcctgtgtttggtcccccagtataatgactgttttcaggccccttgtgagcattcagaacagggtgcattaaccaaatctagttggacagcgttggttttctcccgtctagtgcaagctttaatgccaagctttctacttaggacctgtgaggaaaagacattggaatttcttggggcgttgtcatttgtcaaggactgattcttaagtctagaatttcagcaaacagcatggattgatttttttacactcccttcccccctacaagttaagatttattgaagcagaaaatgtaatcatacattatgtcgactttgctttttttaaattttaggtgtatttttgtacaatggacatccaataaaacaggtagatgtcttgggaactgtcattggagtgagagaaagagatgctttctacagttatggaggtaagaacaattgtgtctgaaatgaagttgatgtagaaggctgacccttctgggctgaaagttggatttcagcagccccagccatttagagtagctggggaccctcactaagggcatgtactttctctatggggtgccccttatagccccagacacgggctaagaataaaatgaggcaacgggtaggaatgatactgatgaattcagtgaagtgacagctgctgaggtgctaagaagtggaagaattaaaatacagccccctatgagcatcgatggacgggcaggggggcacctgatgccaaagggtatatctgtaaatagcaaagcgtggtaatatgtggttatgtggatcactttaaaaagcgaagaccagattaatgttaaagtagattctttaacaacacaggaagatgtgaaaaataattttaaaatatttatatccagaacagttaacaaaaagccttttgatacccaaaggggtaaatacccattatcagaaagtttattttccctcatgatggaagcttaataaagggtttctatattttggacaccagagaattgctcaaatgtgattttagtgtaataggtctttcttttttcattgagttgatttttaagcatttaatacattgccttgtacaactccaagcttctctataatcaagagcccaagctagatattttgtgggaaacttaactttaaattccaaacctttgctgaaattgacattgtcactttttgtgctgtgccttggatttgtattcttactcttcttgaggaaagatagaaggcagttgaactttgtgaccaagagcgtttcattggcagtccctgcatgattgataatttgtagatacaatattattgcatttctttacatgtattcattttcctgaagagtattatcttgtgcttttaataaaataacatgtgaaaaataaaagcttattttttctgctttttctcagcatatatatatgtacatatatatgtacatatatacatatatacatatatatacacacatatatatacatatatacatatatatacatatatacatatatatacatatatacatatatatacatatatacatatatatacatatatacatatatatacatatatacatatatatacatatatacatatatatacatatatacatatatacatatatatacatatatacatatatatacatacatatacatatatatacatacatatatacatatatatatacatatatatacatatatatatatatattttttttttgattctgaaaaggatcatcctgtcagaaattcccatactgaatctcttctctgctttattttaccaaagatattggtcctttttttctccagacaactcaacaaatatttactaagttcctacagtgtatccagctatgggcagtacactgtggtatatagtacagtgcttcctctccaaatgccaacaacgaaataatagcgtctttcagtttgtaaagcacttttatatgcataatttcatattattctccctctagtcttttgaaatagaaagtacaggtattatttccattttgtagatgagaaaactaaggcttagtaacttactcaagattccactgatggagatttgtgggtccattctgtttactgactccagtgtgttctgtggtctccatataactcagtttgatttttctctcctcctcctttcttccatcccccacccaccaaaaaaaaaaaaattaactgcatttgatttttagttttctgtttttcagatcaaataaatgagactgtttgaggactttaaaatcctggccctagaaccaggctagatattaagcctgtgtctaaaggagcttcacttaacctcttttcccattataaaaagattaaggcactatgattgcctcttctccagtaagcatttccctctgagtgagtgtctgaggagcatgaaacatctgtgggctttgggaaaataaaaagcatctgactgctgaaattattgagagtagagaggcttttgcaactttaattcttgtggagaactgcccctctccttgctgtcctcaggcacaatatggcttttgggccatctgccaggtggccgctccctgctgttctgggttctgcttcccctgactcaccgcaggcctgtgctgggggtgcttcctgctcgcactgactcatcccgcagctgaaacaaaaggccagcggcccaggcggtactgtgtagctgctgaggacattgtgcagcactgcaagggtgcctccattcaggggcattccagcagccagacctctgggcaccaaggcacagggtctgctgggagaggtcacaaactgggaagtccgggggttggtgacagtgcccagagtgcacagaacacttggtagcaactcgagcttagacctagaatattggaaggctacagtcaagaccagaatgacctcgcattctctaggacaaatgttcatgtgctaattttttttttttttttgagatggagtctcgctctgtggcccacgctggagtgcagtggtgtgatcttggctcactgcaacccccgcctcccgggttcaagtgattctcctgcctcagccttctgagtagctgggactacaggtgcttaccaccacacccagctaatttttgtatttttagtagagttgtagtttcaccatgttggccaggctggtctcgaactcctggcctcaagtgatctgcccacctcggcctcccaaagtgctgagattacaggcgtgagccactgctcctggcctgctaatttttttttttttaactttctattatactataaatcaagcttttcacctacagagaagtggtgtgcctggaagtgccatgcatttttttaacgcaaaatgtccttattcattttttggattcttaaaatggtatttactcattataaaataaaatttcaaactagagataattttaatgaagtatataaaaatcatatgaaacactataaatcaggcaaaacaatgtcagtgtttgggtgaacatccttcctcattctaaacatgttcccagtatcaaagaaatatagaaatgcctatttccttagtactattatgcatatttatttctcagtgtttctgaaattaggcttacagtcaacgtatacattgaatgtggggttccttccccacactccaagagaaactgctcttagtatttaaagtcttaaaatcatttctgtcaaaatacactgtttaatgttgcacataaattggattatatatttctattttacaatgagccatgtatatctttttattctcatatactacgtcattgtaatttttttaaccaattccatatttataaacatttaggtatttccaagtgtcagtattataaagaatactacagtgaacagccttacatagatgtatgtatctgtgtacttgtttttgttttatctggaagtaattgttaagtcaaaggatatatacatttaaaaacaactttttttaagaggcagggtctcactgtgttgcccaggctggagtgcagtggctatcacaggcacaatcatagcacactgcagccccaaactcttggactcaagcaatcctgcctcagccccccaagtagcaggcatgtgccaccgcacctggcttacatttcacaatccgatgcctgtttacaaacttgctcattaagatttaaattttagaaatgtgttactaatttatactcccactatcgacatatgagggtatcagtatttttaatatttgtcaatttcattgttgataaattatgtatacttgcttttcttaatggtaactagtgaacttatactgatgtatttttattggccatttttagatcttccatgaatcgcatattcttttctttgccactttttctcttgtgatgttgatctttttcttattaatttatatgagctctttatttattttttattttttgaaacaaggtttcattctgttgcccaggctggagtgcagtggcatgatcatggctcactgcagccttgaactcctgggctcaagcaattctcccacctcagcctcccaagtagctgggactacaggcacataccaccaagcctggctaatttaaaaatttttttttggtagagacggggtctccctgtgttgcccaggctggtctcaaactcctaggctcaagtgatcctcctgccttggcttcccaaagtgctgggattataggcatgagccaccatgtccagcctatgagctctttatatattaaatcattaaccctatcatttggaatattgctatccagtattagtttttaggtggttagacttatcagactttctttaatgagttctgattttaagattctgcttaaagaagtctcaccccacccactgtaagtccagggttaaaggtattcacccatatcttcttctcatcttaagtttaccttttttatatttaataaaatgaaacccatctaggatttattttagtataggaagtactctttttggctttttcttcagcatagatttaggccagcagtaacaaattttgccttagatttcttcaggattgtgtgtgcttttacaacagtctagttgatgatttttttttaaatttagagacccactgaccccatgcttagcaacctctgttctgagtttgtcggaaattaggcaaagagaaaatgcctgttattccctagcaaacatctccaaattcctctgtagttgtaaatataactgcaatgggaattgtttgattttttgcaaaaatgagataagccaggaataacataagccagactagtactgtttttgtggccaggatataattattttctataatgaaaataaaacggtgcccttctgtgatgtgcttggctttccttacagcccctgcggtggtgaggactgggcaaaagatctttcacaaagagaaacccaggccagatgacttggaacactttgtcttgggaagtcagcacactagcaaagagactgtgacagaaggctgcgccctaagtgcctgtgcctctaaccacactccacacgatgctctcttgtttcagggtgggagagaaaggctgattttctatgtgagcagtcattcagtttttgcacttaacttcccaaggccaccatttttagtagagaggtgtagaccagcatcatgagggtacccttgagggtactaatcgttagtaccttgaggtaggataagtgaaatgctgaccatatcccactgggcttgtgtattacattgacttgtgcagacaagcagtttatactcgtatgtagtgagaggttgtttcaaaggtggaaggagagtttgataagggatttgcttctccaggctattgaaagaggtcatctttcagtatggctgaatgcaatgacagcatgctaattcaccagccttgcccaaatctctcttatacccttttgcttttctcttgcagtggatgacagcactggagttataaactgcatctgctggaaaaagttgaatactgagtctgtatcaggtaattttatttgccacattcctttacttttcacctaactaatggattttactcaatgtagttcatcaaaacagctatagggctaaattttcacatttatctgctggtgagttacattgatctacctgaagcactatacccagagctttggctgctctgaaaactgatgccataggagagccagttgcttttctttctcccatctctttggtgctcactgcttcctaagcctacaagaatgtgaataggttacagggagtttcagcaattcatttttaccatgcccattattacataagtcaaggtgtcttagcctaattgcaagtcaggtctgaatccccttgtcccagccatatcacttgaccaaagaacattttgaagactgtttctctcacatggttgccactaacttctgtgctgccatggtccagattttctaaaatctctgtgttcaaacaaataataccaggaattctaagactgagaaggtaagataggattcctttggaaattatccattaagtaatataaattaaaagaactttaaaattgtatagtgaatacattgactataactgaaacaacatttggagttgcttgaatatattttaataatttttagatacttttttttttttttaaagttaggttctcactatgtttccagggctggtctcaaactcctggacacaagtgatcctcctgcctcagcctcccaaagtgttaggattacaggcttgagccaccacacccggcctaatttttagatattttttaatttaagttcataatatgaaagaatatcgtgcaatattggtgatggtttttggttctagagaagctttgaaaactggaaccttgtttttcctgtgttttacaacatatacagtatagtgccatacacagtggggttattcagtaaacactgcctgctctaatatctaacatctagtatctatctacttgcattatgtatggtaagaatatctagtgcttagagtcgtttcttcttttttgccattacgtgtcagaatctcaactttgtactttgactataccgatcaatggaatgctcatttgcttaattttctgatgtatttacatttagaatttggccatcagtttcatgtaactttggaattctaattcctaatttgggaacatctaaatcaatggcattgctttggtgaggaaggtttgtagatagatttaagggagacaacgtgtttttaggcagatacctcataggcaagaaataaacctatgagacaatcaggtatctggatttttatgtatgtctgaggtgtttttcttaatctgttttgtgctgctgttacagaatacctaagactgggtaattttataaagaaagaaatttatttctcatagttctggaggccagaaattccaagatcaaagttttggtgtctggtgaggtccgggtttcccctccaagatggcaccttgaatgcttcatcctccagaggggaggagaactgttcctcacatggcagaagagcgtgagaatgagaaccacttctgcaaacccattttatagtggccttaattcattcatgagagtggagctctcataacctaaacacctcccattagaccccatcttctaacactgttgcattgggggttaaatttctaacacatgagattttgaggggacaaaaacattgaaacttgtttttgtcaaactgtagcagtattaaaatcatttgcagatttttggttgttgtcacaatcttcagtcagaaggtgtagtttgaatatgcgtacttgttctagatggggagtcagcaaagtttttctgtaaagggccatattttctgtttgtgcaccctatggtctgtgtgtctcaactattcaacgctgccattataacagaaagtaaccataggtagtacataagcaaatgggcatggctgtgttccaataaaactttattttaaaaaacaggctgtggatggatttggtccatgggctatagtttgcagacccctgttttagtcattgtttcagttttcaaaattaactctttttaaagaaatagcatcatcaggaatatataattcttatacttcgtaattttttagatcaacaaaatgggtattaatactgagagtcagatttttaaaatatcaataagtagatgaatggatgaacaatcacagtaggtagccttaagattgctttgcaaatataacgagaaggtaagagtagaaggagaaaacctaaaaatgattctcatcgtctttaaattgttcccaactagcccattctctccttttaatttaattgcccttagtttaaaagctttccattggaaggtggccagcaaagactaattttttaaacaaaatttagtctgagtcaaaatcatgttccactcagttaaagtaaaagaatataatattagctttcataaatgtcacattgaatgtaccatttggacttagcttatgagcaaagttaagatttcctggccctgagtattcgaatgttaaaggggatttatctttcatgatggaatagacactgaaagtgaagttctgtcaggctccagtcttctcattatattcatttaattacacagcttgagcctccttttggcaacttggctcaccctttaagtgaaaggtgggcctctttttctcagaccaaccatcagtctgatcatttcagtggtgctatgtgaagcatttattatcacctataatgtctgcataatgacaatgagatttataaatacctttaaaattcagcctaagtagaagagggcctggggataggaactgctacttttgaaaaagtagcagttggggattttttgaagaaacccagtaagctctgagcagcggtaatgctgattgcgtccaggttcctacctggactcactgaatgcacagagttctctgtgctccctatgttgctgtttccctgggtatagtaggtgtgttcaaggaaaattaatgcctctgtacattacagagccacagttgtcaaaattatattaggttgattttgatgaagggtttctctataaagaaatacagagagtagatcatcttgtgtaaaaacacagcctctcctgcaatttaaaagcaaaataagatgtacggaataattatgtattttttaaggtattaaaaatccaaatgactgaagctggtgtaggagttgtgagcctgcatgcattactgacaatgttgtctaaaaacagagagatttgatcatttttttctggcaagcattctgacaatatgtaatgaactgtaaaccagtttgtaattttttatccagtaataatctccaaagaaagacccccaaaaaacaagatactttttctggaaggtttaattattcattatcacaaatagcttacatttattatttcctataaatatggaattgtgctaagtgcagaatgtaagtgttcaattagataatgcacaacaactctatgtatgaggtagactctactgttatatccatttcataattgaggaaaccgaagcgtaagtgtagaaaggaaacaggcacagtgaggttaagcaggttaagcagcctgcccaagattacacagctagtaggaggtaaactgagattcacgtcaggtctttctgactccagtagccaaaatgccgatggctgagctatactgcccccatacagtgctagtgaaaaaaacgaaagtaaaaatttataaaactgtacctataatcccagctactcaagagactgaggtgggaggattgcttgaggccaggagttcaattccagcctgggcaacatagtgagaccctgtctctaataaacataaaatgcttggctgtgtagcttctttggatacatatgtgtatttgaaattatgctagacaggaaaacagaatacatagtcttttacacccaccagccgtaactgggaaatgtgagtatcttcctggggcaggcagcagagaataaaggataagtgggatggctctggagctagagactgcctgggttcaaactccagccttgtctctaactagctgttctactttgggcaagttgcttgacctctctgtgactcagtttcctctctaaaatgggactaataatgagcaggagtggttgtgaggactaaatgtgctaatacattgtaaactccttagaacagcatctatagtacccagacattcgtgacgattcttcttacttaactaatacaatttggaagtaaaatagtgatagaagttatttagaattgagtgtacattgggtttttttcattataaagttgctcgagtttatagttttaagtggtatgagagagagaaagtggagaaagtgtgagagagagagagagtgtgtgtgtgtgtgtgtgtgtgagagagagagagacagagagattagcctagtttcccaacagagatgagaggtgagaaattgggatgttgagcactcagatgggacaagtctcctcgcaaggacatttgaaaggttgtttaaagctattgctgccacgcccagctgaactcattgtacagaatttgtctcaaggccatgcagagccctttgactgcactggtgatgcagggcaggaaagaaggccctggagcctgtcggaacttgcccgctggacctcagtctagactccgttcctttcaccccgctcttgaataattacagtttataccttgttctcagtggagtactccaaaaggttatgtggatttccaacagtagaacaattactcagaagtagaataaataagcatattgtgttggtcttaccctaaaactgtctcacagatgtggtagagtgattgtgttataactttttctctttccctctggctctaaacaactacagctgctccaagtgcagcaagagagctcagcttaacctcacaacttaagaagctacaagagaccattgagcagaaaacaaagatagagatcggggacacgatccgagtcagaggcagtatccgcacatacagagaagagcgagagattcatgccaccacttactgtaagcacaagatatttctaccaaattggtggtttttctggatgtgcgtccagtaaacctcttgttcagctggaagtcaaactttcaaaaagttcagttaaggtataactctatttaatgagtgaattacattgtttaacatgctttctttagaaaatcagcatttcttacttttattttgaagacagctaattataagttgggaaagaaaatgaattatttactttatatatggttggcaagtttatttggatgacatagtagagtttccaaagcactttcaagttcagaatgtcaatccattagggcaaaatatgaatattcttcaaaataatggaaatttctttattttttctttattttttttctttttttgagacagagtcttacactgttgcccagggtggaatgcagtggcacagtcacagcccaatgcagcctcaaattcctgggctcaggagattctcccacctcagccttctgagtagctggaactacaggcatgcgccaccacacccagctaattttttgtagagatggggtttcgccatgttgtccaggctggtctcaaatttctgagctcaagagatccgcccacctcagcctcccagagtgctgggattacagccgtgtgccactgtgcctggccagaaatttcttgaataccattaagtccattaactttaaatgaaaacagctaatcagaaatatgacagttccccatcatcttccctttgcacgtgctggctggttttcagttggaaatctcaaggacagcccctgctgtccaccagaggagcagacgaatcaatacattgatgtgctttcctggttccttggccctggccaagcccatgacacttagggcatcgcattccctcatgcaggatgactgggagccatttagtgcatctagactgtgatccctgggcactcacaaggaaggaggcccacccagcacctcatttactgttgtcttagcagcagtttgggcctgggaaagaattgatctcaatgtaatttgtaatttctgtagcatcttttttctggtcacttgttagataaagtggacgacccagtgtggaacattcaaattgcaaggatgcttgagctgcccactatctacaggaaagtttatgaccagccttttcacagctcagccctagagaaagaagaggcactaaggtaagtggtgacttatcactgctgagcacgtgaccacggcagaaaactgaagcagctgagcccagatgctgggatcggcctaggttcaaatcccgaatcatccacctatgcactgtggggctctgggcaagccctctaaccctctctatgcttcaatttcctcaactgtaacatgaagagaataatagcacagatgtcctagggttgtcgtgaggaaattatgggtgtaattggagtcactgaaggaggagtggaggcaggagcagagaaaaacacttggaagaaataataatgcctgacatttttccaagtttgataaaaactttaaactcacagatccaggaagctcaatgaaccccaaggcaagaaacctgaagaaaaatgcaccaagtcacctcataatcaaaatatgataccatagcacgtcataatcaaaaacctgttttaaaaaaacctgcaccggtcattctcaaccagggatgattttacttttttataggggagaaaacccaggaggaatgagaatgtgtgcatatttgctaatatgtgcataaaagaactctgagaggagacacagagaaccggtaacagcagctccctcgggggtggggaccggaggataggacaggaaggggacagaaaggagactttactgtgtatcctttaatgttttttaacatgaatatattatatattcaaaaaagtatattaaaagcacaactatagactcatataaaaagtgaaaattctccattttcctgtctcctgcctcaggaccattccccagagattaccaatgttcataagccaatgtgtgtctttttaaattagtttcttctgtgcttacacaagcatgaatattcacccatagattttgtgggtttccattttttttatataaaaataggaccataccttacatgctgttctgcagtttgacttttttctcctaatctgtcatgaatatcttagttcctgtagttctgcctcatcattttaaacaaccacatgatgttccctgtatatattactctgtatatgaaaaacaaactccaatatagtgttgcattttctagctaattttctggtttttatacaccaaaaaggaacaaaggtgatggttttctgcagagctctttaaaactttccctccgcagcaatccaggcgccctggacctccccagtctcacgagtttgctgagtgaaaaagccaaagaattcctcatggagaacagagtgcagagcttttaccagcaggagctggaaatggtggagtctttgctgtcccttgccaatcagcctgtgattcacagtgcctcctccgaccaagtgagtgcagcatgcccatgtgagaattctggttccctgccccagatctgcaactgcaggtgtgggtgaaagtgactgtggcatgaagattcacagagttgacccagggaacggagggaatggttctgtcacacattatttctattctggaaaggtcattgactactaagaacttgaaatgaggcataaggctggacctgccccttcttcctccttacctaatcttttttttttcggagacagagtctcactctgtcgcccaggctggtgcttctcctgccttggcctcacaagtaactgggaccacaggcatgtgccatcacgcctggctaaccaagataactttttctaagaggaataaaaaattaaagaataaaaaattacttaagtgttccttgaaattttacttacaaatgagtctgaatacaactcggtctttatttaaactcctaaaacacaatgggttaatcttattctgaaaaagacagagcaagtcattaaaaaccatggttcaagttcgcgaatcattttgctgatgaataaatcatcttggatggataattacctcctctcatctacttccctgtcacttggcttctgctgagattaaacatccatctcaatgaatactaacaacctactactatggaccttagactattattatttttttctactcaaatattaagcataataagattaagtaacgaggggccaggcgcagtggctcacgcctgtaatcccagcattttgggaggtcaaggtgggcagatcacttgaggccaggagttcaagaccagcctagccaaaatggtgaaatcttgtctctactaaaaatacaaaaattagacagggtctcactctgggtgaccctgacccctgactgtcacccggagtgagaccttgtcccaacaaaaaaaaaagaaaaagttatctccatgtttttacccctagttttatttgggtaacttgttttgttgcttggtgttgacgtattgcttggaattaagaattatttgagacattgattttaggctttccctttcattgcagttcttaggtttgttgttgttgtaacgtgactcatttatttactttctttatcccaccagggaatgatctcagcttaaatgtccctccttgccctccctggccgtctagctgctctgattgccacgtggcccctcacccttacaccctgtttttgtatctgacgtcactggtctttatttgtttgcttgcctattcctccatcagaatttaagttctgtgagagcagaggacttgtctgtcttattctttgctctctacccagggcctagaacggggctggcataaagcaggttctcactcattatttgctgattgaaggaatgaatgatttttaaaaattcaaattgtcccacaaagtgtaaaggtaaaggtcagtttctttcccatcctccctctcactccctttcccctgagacaagcaccagtactagtgtctggaatatcattctggagatagtctgtgcttgtgtgtactctaagtcactgtagccccttctgtttcacacagatggtagcatggcgtagtatactatgagacaccacacttttcattgacgtatgtctcacagattctttcctagccgtacatataggttggcccctacagtctttgtcacatgtaccatcatgtatatgaccagtctgtccattcctggactgtttagatgttttctgatctcttgccatcaccaacaaggctgctgtgaacacccttgctaggtaacataagttcttgattttggtggaacagatactgagtcacatcctgacttcctgggcatgaccactgcttctcagttttgtttgtgctcctaattatctcttctgggcaacagcctgatgtgcccagtgacccatggtttcatacgaggagatgagggatatcgtttcagaaaacaccaaagtggaaagggtcacgactggctgctttgttctttgccaaggttgcttctaaacagttgcagcgctccagctgtcggctgacagcaagattgaccttcttcccacttaatcatttagaggcggctcaaagccaaattgacctcctaggacttctgatgattctatcagcatgtttggaaagaaactttaaagcttagcgaagaccatatttttcacatgaagccagctcttccgtgatagctataattaagtagagagagagacttaaggactctttgaggactaaaagactcctccattcaaaatgatctgtggggaacctttggcatatctttttgaaaatgcttacagcagaaacttgtgtctgcctggtgctatatgtttaaaaagaatcgaatatggcactatatttgttttgtctttggaaactcttttttctatcaattatgaattagtccctcacattgctctggttggggaggtcagtgtgattaaactgagttctgtttaatagattcctgggagactaaaggtgctttacaatgagactgaaaccctagatcctttggcactttctgttgtcatacagatgaaagcttaacagaaaaaatcattgtgatggtgttatagtttagaggcagagagagagcaggcttgaatgtttcctcctttttttcatagtggtccttcttagcaaatccagaaacatgataagcagggcctgcaaaaccattgtttctttgacagctggatgaatgttgagtttgtttgggaatgaagactatatatatttcagggatccacccagttcctgacctgagatgaggcgaggcttggtaaagctcagcacgtttagctagtgactgtttttttttgtttgtttggtttttttttttttttgcctgtgagcaatttcggtttcctaaatctgatgagtctgtcattgcttttttgaaaaagacaagaaagacacagatcccagtccaggaaaagctgctggctggaagagacgattagtggctttacccttgagactatggtctttataactaggccagggaaatatgtcccagggtcagctgaggcaaatgtttttggaaaggaagcttcaagtattgtttatatttacagagagccatttctgttgagtccttgctcacagctgaaactgtgtttttaatctcctaggcctagcattgtctcttcctgctgcttgatctgactgaaatctgggagggggaactaggctttttatatggtttggggataaccaagagtcatttttaaagacaggaataatcatgtaatactcatctctagttagtttccaatttatttctatcttgctaagagatgtaataaacctaacctttaggatccttatgttaaattgactaaagaagatagatctccttagaattataaagattaagtagttatgaaggtttgcaaaggagtctatgttgcactgatggtgcatcccctaagagcactcatgtatgaaattaaaaacagttttgccctaagcctcgtgaataaaaagatgtgtggctgaggattgctaggtgtggtgtttattctaaacacacccagagaggttttctgcctgtgggagttgtcaaatatttctcagccttattctcccttctgaatggaagctgtcataacctggaatgtttgtcggtttgggggctctaatgacaaggttctccagcttgttcttttaaggaaaaacttagactgataattcaattagtgtgttaggctgttattgttagcccaggagaacacatttgtgaaacatcaccaggatctattagagtaacagaaagcctgtttgggaggtctcttctagaaagagaaggttactttgggacggacttgtgaacacttgagaccctgtggaggctctttcctctccccttgaggaaatgtcattagcaaatctcagccactctttttcagcacctctgggtgctgccccacataggctttgtaagtacctttcaatagaggtaggacttggccttcaaatgcttttctggaagctttgccacatttgtttggaactctgatcttttcaatatcttgacaaatttctgtcacattgaaaatggatctgtaggctgggcacggtggctcacacctgtaatcccagcactttgagaggccgaggcgggtggatcacgaggtcgggagatcgagaccatcctggctaacatggtgaaaccctgtctctactaaaaatacaaaaaattagctgggcatggtggcaggcgcctgtagtcccagctactcgggaggctgaggcaggagaatggcatgaatccaggaggtggagcttgcagtgagctgagatcgcgccactgcactccagcctgggcgacagagactctgtctcaaaaaaaaaaaggatctgtactttgaagagcaattgttgttcgcccttttctttgttttaggaaggagtggaaaatccccaatggaataataagaagaatacacacactctaatgtgtatttgtttccattcatctcacagatactttatcagtcacctaacgtgtgctagggaggaggtggccaagatgaaacaaagtccctgactcaagaagcatcccatctggtcaagcatggggggacatagctgatagcctagcttcctcggggataagaagcaggatgacctggatgaccctccccaggcaaacgtgtctccagagaagtgaagagacactgaaagtgagggggagagctgacagcagcagaggtcccttctaggtggggactgtgcttcaccaggactgctgtctaccttcagccttgtggactccccttggtggatctctgcacagcctctgttgtcctccatttaaaataatgaggctatttaatacttcatgctggaatccccaaattattccaacatacaaaaaatctttgaagtccctaggaagagattgtatacagcctcaattttaatggaaaagggggctaatatatatatacagtgttttggttttgtataaaaaataagtcaaagattgtccaacagtgagggtagctttttttattctgcactatggagtgttgagttcattaaaaaaaaaaaaatcacaactaaggtagggaacagttatgaaaggtgacctgccggggcacacttctcagtcctccttaaataccatcctgctaggccggtacataccaggatctttttgactcagcagttaaaaggcctgttggacaaattcatgaaccagttggtctaggagttgttctcaggtgccgtaaggtgagacttatttcttttcttttttctttttcctctctttacaggtgaattttaagaaggacaccacttccaaggcaattcatagtatatttaagaatgctatacaactgctgcaggaaaaaggacttgttttccagaaagatgatggttttgataacctatactatgtaagacacttgcaacttaactttttttctttgtagcttcaattacaaatatatttattacttatgaataaccacttaattattcttaaaaatcattaaggaggtacataaaatcagaagtgaaagttggcccttatccttccccgaggtatctcttttaataatacagttgacccatgaaccacacaagtttgaattgcatgggtctacttatatgcagactttttcaaccaaatgcagatggaaagtacagtatttgcagatgtgaaacccacatatgagggctaactttttgtacatgcaggtttcacagagccaacttcaggacttgagtgtgtgtggattttggtatacctgagggtcctggaactgatccactgagtataccgagagataactgtatatccttctagacatttatctgtacatttacagatgcatacatatacaaatgtgctcctgtggctttttcattgtttccaatccctgacttatgcaagaacctttttgctttataaaaaatgtgatcatcttctaaattgacacttctcaatctgaacactatttggggtaggtgatcgattgccatgggaactatcctgtgcattgcaggatatttagcagcatgcctgaccttcacctactagagaccaggagcaacaccccaactgtggcaaccaaaaatgtccctggacattgccgggtatctcctgggaccattgagacttgctactctaaataatgctctgtaccttttttggtaccaagataacacatgacaggcacctttccacattagtagttataaatctacctcgttctttttaacatcctcagggtattccatactatgggtacctgttgtgtattttttagacattcctttttgatgggtacttagggtatttctaacttttgctgtcacaaatggtgttgctgtggctatttttgcacaactatatttgtgaactcatgtcagtatttctgtaagattgactcttaaaagaagagctgctggagcagagggcatggccatttaagcttttggtcaacacagtgtgatgggcctgcctgaaggctgtaccagttgactcccagcagaagtgtaggtgcttgtttgcctcactctttcaagttaaaagttcaccttttgctgcatacctttaatattgggaggagctaaggtggaaatgggccttctcaggaccactgacatcagtgggtgtggactccgttatgtgcagctctcccagagactgatcaaattctgtggtattccagaagtctcactattcacaggcaagattcctgacggggagcttttcttaatatgacatttcctgatgttgatttaccctagtgactcccctctttagagagattttagaaattacaataccatttaaataacttttgaagcaggtatcccagtctacataagggcgagtgcctcccacaccgtcccaggatgggagtcctggcatgggaaggccgggtgggagttggttgcttcctggaagttggagaagctatgggggcagctcaccttgagccctgctctgggacacacatttcctcccaggcctttagagagcagcccttcctgaggagcagcagtccagggcaaggcgtggtggggctgggtacttcctcctgtgaatcattgtgatcaagcacaaatagatctcttgtcgccatctctgacttcatctctccactgctttgtagtcacctttctcctgaagccctgcctcagggaaatggttaaaataagtcaacacttctgtttgcctagtgctttcctaggttcagcagctctcacacatgaccttgtttaatcttcgtcataaccttgtgagctgagagaaggcaggtgttctcaagatgccccctccagtaaggcaggtcagacaggcattcttgggctgtctttaaggaggaaacttacagctatttgtttgcatgcctattttctttcttcctttcttcctctctctttttctgtttcttttttttctttctctttctctctttttttgttactagattcactgtggaacatgaaggtgaaacctgttgtgtgctgcttccctcttaatctgagctggttaaaaaagactaagttggccaggtgcggtggctcacgcctataatcccagcactttgggaggccaagtcgggtggaatcacttgaggtcaggcattcgagaccagcctggtcaacatggtgaaaccctcatctctactaaaaatacaaaaattagctggacgtggtggtgcacgcttgtaatcccagctactcgggaggctgaggcgggagaatcacttgaacctgggaggcggaggttgcagtgagctaagatcgtgccactgcactccagcctgggcgataagagtgagattccgtctcaaaaaaaaaaaaaaaaaaaaaaaaggaaaaagaaaaagactaagttatgtctacctttgagagcagaatgtgtttcagtggataggctagctttactctcatgctagcctgtccttgcagggttttttttttttttttctccttttatttttccttgtggttgggagaagcaagaaaactgatgcaacacaagacaggtgtcagggcccagaagaaggagtcatggggtggagattggaggccttgatcactgtgcctcgctcaaaactataacaacaaataacaaaaatgtgttatgagtgttgaagaagaaagttgtcccttaaaagtatgcaattccagctttttttttgttttaacctcattgccccaatgaaccaactcccaaggacgtgtcctctgggcagaactggtttgacactaggccaagtatcaaacaccacattaatggtgtagggaagatgattattatgtaatctttagaaactatcctgaatactaatttggaagtctggatgacacaactgctgtgttacctaagaacactctctctctcaactatttttcctatttaggtaaccagagaagacaaagacctgcacagaaagatccaccggatcattcagcaggactgccagaaaccaaatcgtaagtggtataatgtacaagtgatgccctggtgccctggaaggggatactgtctcccggggagcactggatggagagtcaggagacccgggacttttcccagtagtgacttggaaaggtgatagtcaaagtacctgccctccctgagcctccatctcctctctaaaggagtgttgggctagcacagttgttgtgatcttggctgtacataagattcaaccttggagccctctgaacattcagagcccagattctaccctggggattttgtttccatagaggatgaggtgggggctagacaaggaattctgatacagtgaggtcaccacactaggacgttttgatgtcattctgcttctcatgttctctctgatttgtgttatttcctatttcatgcttgccccccttctttgaacacaaacctgacatttccctctattctaacatcaaagcctttcagtgttggaagggatggttctagacatgactgtttatgaacggtgtaattcagtcatcttggaaactgttaatttgcaaaagacatggtttagaaaatagttttggtagagttagttcagcccctagtggttagacactgaaactgtagctactctgacaaggaacaataccatttccacactagttagagaaggaagcattagtctatctttaaatcctatgtaaactgaccggtcttaaaggcgacttttcaaagtctagcttttgcaaacacatactataataagaagtgttggaaaagtttgttaatgaccccaggtccctgatctgccagtgaactccacctccagtccttcggcccatacatccctggggcctggacctgtgccaggttgagtcagtgggtgaagctgggccaggtttccagcactggtgtttatggtagacagccctagttagcctttaagaaaccatgaggtcggatcccagagtggtgtgacagcagctcttaaaataaactcaaagcaatatattatttcagtgcaagtgaatggactttgttcacttcattcagaacaataaaagcaaatatcctttagttgagggaaaagcccatctgtccacaattgaaggagcttttgagagcagtgcaatgtgggattcctcagccaagaagggatgagaagatgctcccaagataacatctctgcagtcaccctattcgcaggcctcctggccaggttcttattttcatctgcattaggaatagaatggattgaaccctagggctagtaaagcacatgaaaagaattcacatttcatttggacttggctctctgaagtgtcctgaaagtagcaggtttaacatctacatctacccacagctcatcaagtggacaggccctgccactcagtctgtgaatgggagcctctaaaagccactagccaatcacctggcactactacactcccaggagctgaattctgaagcctgagctactgagaatgctgataaaagatgttataaggactgtgttggaacctgctgtgaccaccccgcttcataatgttataacatagcaattcagaatagtaacgtatgcccctcatgaaaagccaagcagtgcaaaaatccactccaaaaagccagactccctcccagcactgagccccagcttctgtgttcccctctccaaaggcagtggttgttattagttacttgcatatcctgttggatatgtgttttctatcagggataaactatacagatatgcacttacaaacatatcatattatttatccttgacagaaaacacaagtgaagtttagccgacgatatacattgtcctacaccttgtattttagatctaacattgccttctagaggtcaacagtacacatgaaagtgcctacgtcttttcattagctggacagcatgctgttacatgtataggtaaatatccgaccctcagtctaaccatacctactgggcctttagttcctttctagcctttcaaacagaatatagcctggagtttttccttgtcaggatgattggtagaaggacttgaagtcatttatgagtgtctcacaaaggctaacccttcaataatgaaaggactatgaacatcaagcctgtcttaggtccctgaaggattgatacttgttctctgaagatgggcaatgtggcggcattgtgaggagctgtgctctggagccaccttgcctaggtttgaatcccggctttgccacttgctagctgtgtaatgttgggcaagtgccttgggttctttaaatgcaaagtggggataataatagtacctacaagatgggtttttataagaagtaaatgaattggcatttagaaagttagaagagtactcagtgcataattatgatccaaaaagtattaaataaaaatgaagttctctttcctaatggcacaagtggtaacccctaattctctagcctgcaggcctgaaggctcaccctctacttggtttaatattgatctggaaggaggcagtttcagatagaatctgtatgtggattttgctgtattattgttggagtaaagttgacaaaatctggattttggctttcagtatgggtacaacaatggcaaattatccaaaagagctctatgttgaacatgtctttttatctctaactttttactctgaaaatattccaatttatcaaaaaaaaaaaaattaaaagactggtacaataaacaccgatatacccttcacctagattgactaaaaacttcagtttgtatttgctaagcatgcagaaattctcctatttgatcaccaaatcatttcacaccgaagaaaattaacatttgatgagttccaaaatggcagcctttcactaaatgttactttataccattagcttttcaaaaatctcccatgtatttagctcaggttcattttttactatcccagagctggagagaactgctgcttttggtagaaactgagtaccatataacactacttatactggaggattttttttttaaacttaagacaaacttttaaaaaagacttaaagaagtttaaccttttgtagttatagtagtaggttatatctgaaatgtatctttatgtcatttgggtctctagaacattagcctttgtggtttctggtggaggtatgatggggtatagtatgaatcaggctacatgtgaaagttcttgggaaaatataaggcgcagttatcaccgctcatagtgatccgtcataagataactatgtctgccaggcaaacacttttcagaaaagtctgcttcggcttgtgggtttgttccagaagagtcgaattatgtaattgtactaacccctggggagctccttgctggcctttcctacttttactgttttataataatttctcacttagagaagaatctaaggccaggcacagtggctcactcccataatcccaatgcttgggaggattgcttaggccaggagttcgagaccagcctgggcaacatagcaagaccctgtctctacaaaaaataaaaattaaaaatagagaggagtctaagttcacattaccgaagtgactggagatcacttttgaacagcctcaccagataaccctcagcagaacagcctttctgactaaatagttgaaggcctctgagacagtcagcatcactgctttgggccccatggatgcctgtaagtcaccttgagccctgggtccaagcatccaggccttgcagaaactaaaagctgagcagcactaaattccctctgctcctccctaccgtgtgcaggtctgtgtggttggagcccctcaccctccatcatcaaacctatccttgcttgctggtcagctcttcctccttgagaggcttttcttcttgggaagggatgaagcttttctagagcaggaactaagttacattcatcttcttggattacggatatgatgaaccaaatcatagtagttccccctggtctctcatccacacagccaccctgagaaggaagtggttttgttcccgggagtgactttgtcccagttgtagagccagggcttgaattctggtgtggtggactccagtggcagctccaggtctgccaagctctacttgctcctccttgctcagcaatgcacacatagtaggtgttcaggaagtctatggagtgaatgttgaagaaacagcctggaagtatagatgccagcaatcccagttggaaggagtaatgagtggacacagccactagaggtcagaatttagcaaatttttgttagcccaggagcagtctctgaaccttagggttggaaagggccttggaagtggttttcaccacagctgagaacactcaggcctagggatggcttgcccaaagctacagaagtgcaccaaaccttgaaccgtgctttgcctcacaccgcaatacctcttcgagcaccttcctgaagcctaaagcatttttcatctgtaaacaactttcagtgactttgtggagcaccttttgtgtgccagatactgggtatacggcagagagagaccatgcctgcgcctgccatggagttttaaactgtgacaactggagagggtttgcttttggtaaagaagtttgactttgactcaaagttagaaatacattttacatcatgacccaataaattatataattctaatgcataagatgtatatgaaattaagtttcatgaattaatatgtatccaaattacaatgcaagatattctgtaacgttctatttctgctctctttgagtttggtaagaaaaagttgctgatcgcaacctacaaaaattggtttcgttatcccctaataggcacaacccccagtttgactactgccgacgacctaaaaggaaggagctgaggcaaaattaatacaagcagagagttgatttgggccaagtttcaggattgcagctggggagcacagattcaggtttctctgaatatacactctgattagcagcagtgataagtggattttttttttttttttttttttttttttgagatggagtctcactctgtcacccaggttggagtacagtggcgcaatctcggctcactgcaacctctgcttcctgggttcaagtgattctcctgcctcaacctcccaagtagctaggattacaggtccatgccaccacacctggctaatttttgtatttttagtagagaggaggtttcaccatgttggccaggctggtctcgaactcccaacctcaggtgatccgcccacctcggcctcccaaagttctgggattataggcgtgagccactgcacctagcccataagtggatttttaaaagccaaaaaggaggacagggagtgggctgatacaaagttgtttgtcaggaattctcattggtttatagataacattgattggtgactggctatacattgttaagccatagggtgtggattatagtgttcaatttggcattattaggctaatttataactacttgtgccaatagcaagcagtttccgaggtgaatatgtaggagtagggcgtgatttccgtttcatggtcgtgtctctctgggcctgataattaaaaggacttgcattcttcagataaaagttatttcattttctcattaccaacgtttaagtcattgatttcaactaggaaagaggttactaactctgaatttgtattgttgtatactagatggtcttagtttggggcagagcataagaggttactaggaatacaaccatcacagataagacttttggaagccaggaagagaggaatgagaacaggccaaaggtaggaatcccttctcaccaggcagccgcatcaaatcaggacttagggggaagcatacggaggctgcagcaaaccagctctgctgtgagtttcaagagggctcctccctgagaaactagaggtttggcactgaatacgttacacttatacatgtaattaccccacagaaaaaagtttatcaagcactaaaaatccactaggttacagataaaaaaatctttgattgggaatccttgaaggttgaagttcagagtccctgagcagtggctccatgtcgccgtggtgacatcaggggcctgagaacaggtgtttctgttttgtttttgtgatcaggtagatcatgcatttctgactttaatgtgcataaagatcatctggggatctggtcagaatgcagatgccaagtcaggtatggagaggacagaggagggcctgacagttgtgtccacactcagccacctacctttttcctgcagacatggagaagggctgtcacttcctgcacatcttggcctgtgctcgcctgagcatccgcccgggcctgagcgaggctgtgctgcagcaagttctggagctcctggaggaccagagtgacattgtcagcacaatggagcactactacacagcgttctgagcagagacacgcagaccagctgaggaggacaaagataaggtggcattcacccccaggctctgactttcagcatcatgcaggggcttatctgtctggaggcagttacctcataataaactataaaatatagtcatcttgggaatgggatttggcataaatgttgttggctcccttctgtccactatgtccttggtgtacaatgactttgatctcagccatgacacaacaagaaaaccctccctgttgagctcctggctggactgtgcgttgttcgcagagcagaatggggaggaaacagtgttggcagcttaactgatgtgtgtggttggagtctcttccatggcaaagggacaccacagggtagtgaacattcaggaactgaggggcatatggcctgatcacacagttctaagcttttcaaaacttcaggttatcagagaccttcctgtgggcctctcttgctggctaagaaccggtttaggggagtagttctccctggatgagtgtcacttgcttacagtttctgtggctcagttaccagcagtggggttgagacctgggtcgatgctctttacaggcctgcccagagatgggaataaacagggatccacagcgtgactatgtgtttgtcattttccttttatttccttgggaatcgaaaggtgtcccagtacatttccctgcacttacagaggtgcatgactaaatacattgtccctcgatgcccctgaagatcacggaggcagtcagccaattgcctggcaggtggtagatgttattttcagggttgccgctgagtgtgcaggatgtgctgacaccatccagacaaagactcggtatgtgcccagacaggtgatggagtcatgcttttgctcagaatgacaaggtaaaggaaaaacatctgaggtatgttgtaggcctgttctgacagcaaaatgacaaatccagccagcaaaaataaagtgtggagaaagatttggagttaattacagtcatttcacagaaggcactgccttcgtctgctgcatttgctcttgatgtgataagctcttcgtggctcagctggagatcctttaggcctggagagttgctcctctctccgtggaaacaggacagtctttatacgcagaagtccgctgcagctcgatacgtcaggctgagagctagaaccagtagattgcctcctgtcatagacttttgtaatgatgcaaacctttgctgatttctaacagtgattatgtagtggctgccctgcatcttctctgtgtacagaagggtccctagcatagagtctgcctggaatgatgtcctgggcagttcttccttgaggtcagcagctgttccacgttgaatgcatctgattagtggggctgcccaggaaggagttcagaatcagaaggtaaaaagggcatacccttgcctatagcaactctgctcttaggggtttatctcaaggagatggctacacaagtgtgaaaggatggttgcacaaggtgttcattgctgtataatctagaattctatattggggaaaatacctatagggaaaaagttaattacggttcttgggcacaatgaaatactatgcagctatgaaaaaaatgatgaaagcagacagacagtgttgccatggcacactgtccctagtagatttagtgggaagtagatagagttatagatctgtttctatagtataacaccattatctacagctccctgtgtgtatgtatatatccgtagagagagtgtatatttctgcatggaggtctttataaatgtagcacatgtacatatatatatatatacacacacacagtcgaccactcccttctcctggaagtactttccgcgtttggctttcaggacaccaagctctctggttgctccttctcaggttcctttgttcagtgctctgcctccctgaggactcagtcccagacctcttttctatctggcttgctcactggggtgtctccagcagccacatggattataccatctacatgctgtctaacacctcagtttaaacccagaatgggcctcttccctgaactgcagacccctatattcagtttgctactgacatctccacttaggtctctaatggacatctcagatttcacaggcccaaagccaggctcccaattactcctgaccccaggcttgctcctgatagtgacatgaggcagccaaatgcctaggcagagaggggagggtcccaaatgaaaccccacgttcaagcaaagatcagcctgaaggctaaaagaccagattgctggtcctggatgaaacccaccacgcagagtgggaacttctgttcctgtttgcccaccctttcccaattgttctttctgaataacgccttaaccaatcgaatgttgccttttccagtaatacctacagcctgcccctccccccattctgagcccataaaaagacccagactcccccatattaaggggactttcctgcctttgggtagggggaccacccccacgtctcctctctgttgaaaactgtttcatcactcaataaaactcccagctttgctcactcttccactgtcagcacattctcattcttctttggtgctgggcaagaactcaaccagtgtggaagccatacttggcccaggcgggtgaagtgggcgggccgtctcctgcagcaggtagcatggtcaagcgaggcccaggtgggccgtcaccagccagaggtccctggcttgcaaagtgaccgagaaaaaaatcctgtgccactcctttggaaaatgtccctgattcaggaagaggtagctccatccagttgctcaaaccaaatccattggcttctttctttctatcatacctcacatccaatctgtctgcaagtcttttggctctaccttcagaatatctccagaatcttaactgcttcaccctcctccccggcctcctcagtcctctctgcttccgccctggcccctcttgggctgttcacagcacagcagctgttgccaccctgttaatgctcccactctcctacagccttcggtcttgccccaggtaggagcctgaggctgcacagaggtcagcacggccccgcttaccctgccctcccagcccagccgcacgggccttgctgcacacatgcctcggcatattcctgccttagggctggtgctcctgctatttcctcttcccaggtaaccatgtgaagtgcctccctctgccctctttccagcctttacttgagtgtcaccttctcagtgaggcctgccctcattcctctttcgctgtttgcaacccatctcctgtcccccttcccagaactccctttcctacttcgtttttcttcacagtacttgatactgcctaacacactccatggtttcttacttgccctgtttattattttcccccaatagacagaatgttccatgatggcagaattctctgttttgtttccttccatgtccccagcacctagaacagtgcctgacgcatctcctaagcaatacgaccaataagtatgtgtctggctgccttccggctgccagtgtctgcctctttcctaggggcagtggttgcgggggtgctttctcacatgtcttagtaggctgtgcaggctggaagtgctcagaagtcacacccccagggagcagcctcagccaacagcaccttggctgtaaatgccccagctccctcgccctcaggtaagcattgctgaggcacacgttccatactcttttccacagttcctccgtgggactgagcaccacccagccacccacaggagcagctaacctgataaccaccagcctcaccctccctgccttacttccccgctcccctttaccacatgctgacctcccagatgcatttcttgctttccggtctctgtctcaggattggctcctggatgaacacaaactaacactatgttcacaaatatatttgggaaatgctggatgaataattatacacatcagacagattactagaaattctcaccaaagggatgcacatgttacctctgcatggtgagatctcaggtgctttttaccccacatagctatcctttggcatttttataattagcaagtgctcactcttccactgtcagtacattctcattcttcttgggcgctggacaagaattcaaccggtgtgtaagccagactcggcccgggcagtctcaaactcctgactccttatataatttctacaaaaattataaagctgtttcccactccccaccccacattcatgtaacctgaagcatgagtaaaccaagaatgaggtaggcctctgtcttctaagcaacatcagaactctaagaacatgagggactcttagaaaactctctggagctaaccacagctgggtcactgctcatgtactgaagaccagccagagggttcccctgaaaaggagggaaactgagcaaacattctccagttctcttagtgtgcacatgtttcaggaggtgtgaaccccacatgtagcttgtgtaggcaagaagacaaatagtgctactgtctggtcaaggatttgtttgaagagccatgattatgcccatatggtaagccaccagtgctccccatccctgtaagacacttctttctcattattttctcctctgatggtgtgccaggatgctggccaagagaagccaagtggaaagaaggctgttcagtgacaaggaacctaagacttagtgccaaggactgaaaccaagtaaacttgtaattttccatgatggaaacatctacactttctcattagtggcctctacagcagttgccccaaagaagcgtctcattgtttttttactacatttatgtgaagcatacaggcaaactcagaaagactgtgataaggctcgccagagatgcctgcacaggtgctgggggaaaagcaggaccatcctgaagggagatggtgtctgtggacaaagaactctgcagtggttcttatttgcatgatttctgctggtggaggctgtaaatgtgagctcaaactcccacataagtgagttttcattgtaatccagaatgtttttaaatcaccctacttctattgaacttgcactatcatctgttaacctctactgtatttattaaataaacctgaataggtaaatcacagtacagcaaaaggttctgtgttccccagaattctaatcaaactccaaattcctgaaaaggctctagtcctttcctatatgtcaaatttaaatgataagttttcattttggaacataaagagggattttgaagaccacagcatagccctgggtttttgcatagagataataaacagacaatctcttttcagactgatttgagaaaatgtcagtgtgaattggtgaaaaatctgggttggaaatagtgctgttgtattacttcaggtctacccaatggtctttattaaacctgaaataccacgaaggaacaggtttctgctcttagggaatttgctttaataagaattaattgtgtaccagttattagtatcatttgattattatgtatttatcatttaatatttaggtgatgtaaaagtacttcaacgcaagagaattgaaaacatggccacacaaacacttgtaagcaaatgttcacagcagcattattcctaataaccaaaaagtagcaacaacccaaatgtccatcagccaattaatggataaacaaaaggtgggctatccatacaatgcaatattactcaatgaagtactgatatatgctaaagcatggtgaaccttgaagaaattaagtgcaagaagctagacacaaaaggccacatattgtatgattccatttatataaaatgtccagaaaataggcacatacacagagaagaagtagatgaggctgggtgcagtggctcacgcctgtaatcccagcactttcaaaggccaaggtgggcagatcacctgaggtcaggagttcaagaccaacctggccatggctaaaccctgtatcaactaaaaagtacaaaagttagccaggcgtgctggtgggcacctgtaattccagctactcgggagactgaggcagggagaattgcttgaacccgggaggcagaggttgcagtgagccaaggtcatgctactgaactccagcctgggtgacaaagcgagactctgtctcaaaaaaaaaaagtagatggtgtggccaggcatggggagggtggggattgggtggtacagggctccttttggggttaatggacgtgttctggaattagatagtggtgatgtgtgcacgactctgtgaacagactcagaattatgggctaggttgggattcctcacatcatggtgtctgggtttccagggcaggctttccaagagatagcaagatagcaagagccacacggaagccacatggccctttttctgtagccccagaagccacagcctcacttccatggccttctaattgttgaggctatcacagtcccatgcaggttcgagaggagaggaataaactccacctcttgatggggagtaatgaggttccagaagggcatataggtccgggaatattaccctggccacattggaaaatacagtctctcacagatatctttcagcttttatataaatacagcatcattatttaaagagctagtcttaaaaataccaaaaaagtacaaagaaggggaaagaatggtctaccacttcccaaataccgtgtgtatgtatgtgtgtatatatatgtgtatatacatatctctctatatatatataagtatgtgtgtatatatgtgtgtgtgtgtgtgtgtgtgtgtatatatttaggtgatgtatgtatacatacatagagagagagagagagagagagagagagagagagagagagagacggagttttactcttgttgcccaggctggagtgcagtggcatgatctcgcctcaccgcaacctccacctcccggcttcaaacaattctcctgcctcggcctcccgagtagctgggatttcaggcatgtgccaccatgcccggctaattttgtgtttttagtagagatggggtttctctatgttggtcaggctggtctcgaactcccgacctcaggtgatcggcccgcctcagcctcccaaagtgctgggattacaggtgtgagccactgtgcccagcttactgtgtatatttttaagattatatatatattgttaggaaaataaccatgttaacaatatttttgtgtatccttccaaaaaaaagtcagcgttttatatgcacttcacatttttattaatgctatattttggaagtctttttttctttttcactttagcatgcaaaatcagcatcttttaaaatggtgacataattccatcgtattgctgttccataatgcacttagccagggccctattaaaaaacatttaattggtttccaatttgttgctattgcaaccaattctgcaggaaacatttttcttttcttggtatatgtttaaagtatgtttgtatggtaaatttctagcaatggaactgccaggaaaaggggcatgagctttttaaaatttgcataggcactaacaaattacccagtaaaaagactgatccatcgtacactcctatcaatgatttatgcgtctactgtttacccacgagctcacccacagtttgtattatcagtatttttagtccatgtccatctgataggtgaaaatgatttctggtttctgtttgcatttatgtttttttagtatgagtagtgttgagcatctgttcatcatgggagcctttagataaagttctaccctggacagtagccattgcttccagcaggggctacagacggccaggcatgtgttctagcagtggtatctactgcggaaccagcccagagcgcagctgccaaggtgccagttaatacacagctggaataaacatccggaagaactcaaaactcaaaattccaaacctgccactccaagtgcttggtcacatgcccacccaaatattaaaaataataatgtgttacaacaatgatggttttatttatttttcttttttctatatcacaagtcatcaagcaaagaaaggacagcaatctttttaaaaccagccaccatattattgactcagacctctcatagaccagatgccatttagctctggttcagtgacactgtccccagtcagattaatgtgaaaaactaaggatgcttctaagaaagtgctaattaagtggagaaggtagttttagtaatagaagtggtcttacagcagctgccattgactcaacatagcttaattatcatcataagctgaggcttcactttcatcatttactgggtttggtacagttaattggggcattgggcaacaccatttttgatcatcctcttggctagaaattgctccctcggggaggaaggcatttattttttattctgaggacaatctgtgattgaaggaaataaagcagggtgaggacagagtagtagccttcagttcttcagctctgctttagagcaaagcagcagcggggtgcatgagctctgatgtgggacacaggcatttgtgacaagggctgaatgttaccctgtactgaaattgtgaatgattattctaatatgagttaggtggcagaataatatattgagctattgatgtgggttttgtttttcctgtattttatttcttctttccaagctggaagctagccttgcctcagggaggtttggcttgggggctgaattcagaagttgtttgcgcagactctctggttttttttttggttttgtttgagacaagagtctcgctctgtcacccaggctgaagtgcagtggcgcaatctcggctcattgcttgaactcctgggttcaagcgattctcctgcctcagcctttcaagtagctgggattacaggcgtgtgccaccatgctcgcctaatttttgtatttttagtagagacggggttttgccatgttggccaggctggtcttgaactcctgacctcaggtgatccgcccacctcggcctctcaaagtgctgggattataggcctgagccactgcgcctggcctgacaatctgctttatgttttctggaagcccgaagcctggggaaggattggagattggtggcccccaggcatcgcggatgggaatgtgctccctgtgacagtctcatggcaggacttctgtggagaggttttgtggtgtctctcagaaggtcagagccttagcctaggattctcagcttcagcaagattcctgtgtgtcagcttggaaaggaagcggccacaagcccttccctgaaggtgcatgcaggctggagccccggggatttccacagcggtcttggtctcagaagaagagtggacctgtccctgtttttcaggtaccctgtaacctcctggattttcacatatttccagggaagggaagcctgccccatcctgttaccacacatctaattttcatgccaggctcgaggttgagggcatcaaggctgaggtaacttgaaataaagaaaaaaagggaccaggcatggtggctcatgcctgtaatcccagcactttggaaggccaaggcgggcggatcacgaagtcaagagatcgagtccatcctggccaacacggtgaaaccccatctctactaaaaatacaaaaattagctgggcatggtggcacccgcctgtagtcccagctacttgggaggctgaggcaggagaatcgcttgaacccaaggaggcggaggttgcagtgagctgcgatcgcgctgctgcactccagcctggtgacagagcaagactctgtctcaaaaaaataaagagaaagaaaaaaaggactatgacaagtctcacccacctgcgttttggtagtaagattcatactgcaccacaattagaataacattcaaggtgaacgttaaggtcgtgctccccatgcccttccctgccagaatgctctcgagtgagggagaaggggaggacgtcaccgtacagttacagggacattgcctatggccctccctcgggagtgtgctgtgacaggaaccacctgtcctgcatcactgctgacacaggattggacatcactgcctccgaggatggaggagagatatgtaagatcttgttgcaattcctcagtggggtccacctcatcatgaatgaaaatgccaccttgtcccacaaccatgacacctgttgccagaggggaagagcgacctgtgaacacaggccctgttcctgccaggctgtgtgggagcaagcaggggactcaggagagtgagcaaatagaatctattctaggagattccaaaaccacctgagcaatgagtcttctcccaacatgaagaagcttgaatgccttactcatcgcagcagctggcccagccctgccctgcccagcccagtgcctcaggaagagtcagcaagctctgcctgtgcctgtggttttggtcctgtcctggcttgacttgtcctggtggagggcgagacccagaagctccgctcctgggaatgacagctggcgaggaggtactggtctcagcactctgccacagcttaggccgtcagcacgagcagatgccccattagggggcctgagaactgagaacggggactgtaatctgctatttctgtccatttgttgttgacccaggtaacc

SEQ ID NO: 773 - DNA, 1902 bp, Homo sapiens
acgacctcagccaactgctcctgcgccgggcggggtcgtcgccgccagcggctccgagcgccggaagggccaggtctcagggctcctggagctgcaggcggcgggaggggctacaaatgcttgactcagtgatgcagaacctttcagagttagctggaagccacagccctgcctcttgatgcagcctggatccagccggtgtgaagaggagaccccttccctcttgtggggtttggatcctgtgtttctagcctttgcaaaactctacatcagggatatcctggacatgaaggagtcccgccaggtgccaggtgtatttttgtacaatggacatccaataaaacaggtagatgtcttgggaactgtcattggagtgagagaaagagatgctttctacagttatggagtggatgacagcactggagttataaactgcatctgctggaaaaagttgaatactgagtctgtatcagctgctccaagtgcagcaagagagctcagcttaacctcacaacttaagaagctacaagagaccattgagcagaaaacaaagatagagatcggggacacgatccgagtcagaggcagtatccgcacatacagagaagagcgagagattcatgccaccacttactataaagtggacgacccagtgtggaacattcaaattgcaaggatgcttgagctgcccactatctacaggaaagtttatgaccagccttttcacagctcagccctagagaaagaagaggcactaagcaatccaggcgccctggacctccccagtctcacgagtttgctgagtgaaaaagccaaagaattcctcatggagaacagagtgcagagcttttaccagcaggagctggaaatggtggagtctttgctgtcccttgccaatcagcctgtgattcacagtgcctcctccgaccaagtgaattttaagaaggacaccacttccaaggcaattcatagtatatttaagaatgctatacaactgctgcaggaaaaaggacttgttttccagaaagatgatggttttgataacctatactatgtaaccagagaagacaaagacctgcacagaaagatccaccggatcattcagcaggactgccagaaaccaaatcacatggagaagggctgtcacttcctgcacatcttggcctgtgctcgcctgagcatccgcccgggcctgagcgaggctgtgctgcagcaagttctggagctcctggaggaccagagtgacattgtcagcacaatggagcactactacacagcgttctgagcagagacacgcagaccagctgaggaggacaaagataaggtggcattcacccccaggctctgactttcagcatcatgcaggggcttatctgtctggaggcagttacctcataataaactataaaatatagtcatcttgggaatgggatttggcataaatgttgttggctcccttctgtccactatgtccttggtgtacaatgactttgatctcagccatgacacaacaagaaaaccctccctgttgagctcctggctggactgtgcgttgttcgcagagcagaatggggaggaaacagtgttggcagcttaactgatgtgtgtggttggagtctcttccatggcaaagggacaccacagggtagtgaacattcaggaactgaggggcatatggcctgatcacacagttctaagcttttcaaaacttcaggttatcagagaccttcctgtgggcctctcttgctggctaagaaccggtttaggggagtagttctccctggatgagtgtcacttgcttacagtttctgtggctcagttaccagcagtggggttgagacctgggtcgatgctctttacaggcctgcccagagatgggaataaacagggatccacagcgtg

SEQ ID NO: 774 - protein, 366 aa, Homo sapiens
MQPGSSRCEEETPSLLWGLDPVFLAFAKLYIRDILDMKESRQVPGVFLYNGHPIKQVDVLGTVIGVRERDAFYSYGVDDSTGVINCICWKKLNTESVSAAPSAARELSLTSQLKKLQETIEQKTKIEIGDTIRVRGSIRYEEREIHATTYYKVDDPVWNIQIARMLELPTIYRKVYDQPFHSSALEKEEALSNPGALDLPSLTSLLSEKAKEFLMENRVQSFYQQELEMVESLLSLANQPVIHSASSDQVNFKKDTTSKAIHSIFKNAIQLLQEKGLVFQKDDGFDNLYYVTREDKDLHRKIHRIIQQDCQKPNHMEKGCHFLHILACARLSIRPGLSEAVLQQVLELLEDQSDIVSTMEHYYTAF

SEQ ID NO: 775 - DNA, 2313 bp, Homo sapiens
gggtcgtcgccgccagcggctccgagcgccggaagggccaggtctcagggctcctggagctgcaggcggcgggaggggctacaagtgggtccattttttagtatcttttttcctccttttcttggctcatccccaaaagcggaaagtttagggcagagcgacagtcagacccatccactatgccccaacacgtgcagggctgcgagggcgcccgttcctcccgggaccccaagcggtttctgctacgcctgtacagacgtatcttcccagagtgaaagttgatgtttagccgttccgaagttggtgctttgtgggaaggagaacagcgggagagccgtaaggaacgcaggcgtcctgacgtgaggaacgcctcttaacacgccccgtggcatggagtttgacagggccctggatccctgcgttcacccctcctggagtcctggacgcccacctgggagcagcgtcagggccgtgccactttgacccacgttaaacgcattgcatcctcatttctgtgtcccatctagatgcttgactcagtgatgcagaacctttcagagttagctggaagccacagccctgcctcttgatgcagcctggatccagccggtgtgaagaggagaccccttccctcttgtggggtttggatcctgtgtttctagcctttgcaaaactctacatcagggatatcctggacatgaaggagtcccgccaggtgccaggtgtatttttgtacaatggacatccaataaaacaggtagatgtcttgggaactgtcattggagtgagagaaagagatgctttctacagttatggagtggatgacagcactggagttataaactgcatctgctggaaaaagttgaatactgagtctgtatcagctgctccaagtgcagcaagagagctcagcttaacctcacaacttaagaagctacaagagaccattgagcagaaaacaaagatagagatcggggacacgatccgagtcagaggcagtatccgcacatacagagaagagcgagagattcatgccaccacttactataaagtggacgacccagtgtggaacattcaaattgcaaggatgcttgagctgcccactatctacaggaaagtttatgaccagccttttcacagctcagccctagagaaagaagaggcactaagcaatccaggcgccctggacctccccagtctcacgagtttgctgagtgaaaaagccaaagaattcctcatggagaacagagtgcagagcttttaccagcaggagctggaaatggtggagtctttgctgtcccttgccaatcagcctgtgattcacagtgcctcctccgaccaagtgaattttaagaaggacaccacttccaaggcaattcatagtatatttaagaatgctatacaactgctgcaggaaaaaggacttgttttccagaaagatgatggttttgataacctatactatgtaaccagagaagacaaagacctgcacagaaagatccaccggatcattcagcaggactgccagaaaccaaatcacatggagaagggctgtcacttcctgcacatcttggcctgtgctcgcctgagcatccgcccgggcctgagcgaggctgtgctgcagcaagttctggagctcctggaggaccagagtgacattgtcagcacaatggagcactactacacagcgttctgagcagagacacgcagaccagctgaggaggacaaagataaggtggcattcacccccaggctctgactttcagcatcatgcaggggcttatctgtctggaggcagttacctcataataaactataaaatatagtcatcttgggaatgggatttggcataaatgttgttggctcccttctgtccactatgtccttggtgtacaatgactttgatctcagccatgacacaacaagaaaaccctccctgttgagctcctggctggactgtgcgttgttcgcagagcagaatggggaggaaacagtgttggcagcttaactgatgtgtgtggttggagtctcttccatggcaaagggacaccacagggtagtgaacattcaggaactgaggggcatatggcctgatcacacagttctaagcttttcaaaacttcaggttatcagagaccttcctgtgggcctctcttgctggctaagaaccggtttaggggagtagttctccctggatgagtgtcacttgcttacagtttctgtggctcagttaccagcagtggggttgagacctgggtcgatgctctttacaggcctgcccagagatgggaataaacagggatccacagcgtg

SEQ ID NO: 776 - protein, 366 aa, Homo sapiens; identical to SEQ ID NO: 774

SEQ ID NO: 777 - DNA, 31363 bp, Mus musculus
agtacatacttcatatttctaattggcctctaggggtctccatatgcttaataagccaggattgggctgatcctcggattgtctctcccctactccccgcttccagcaaacctgctcttcttcaggtgtctgtctgtttgtctgtctgactgtctataactatatctacctatgtatgcctgtcaatcatcttcttcatgtgtcttgacatttccatttgcacacaggcctttctaacgtggcatatcagaaaccagcagttgtacctcccagctctgctcctggctggcccttctgcacagttggcccttcacatggcccataattcttacccaggtttcaccctcagttgttttttttagatgatttcttccatgactgtttgctataaaatgaatataatccattgtctccttctccacaacctccctgtttaccctcgcctttctctatcacattgatttgcgatcaattacaggtctgcttccatttctccccccccccccccaaagcgtaagctctctgagatgtggccttttcagtgctgtaccccagtcctgagaagagaacagagcttggagcaggtgtgcaataaatatcttttaaattaaatgatcatcgaagttacttgaatgaagagggagaagagctggacgtagtggtgcacacccttattgtcagcatcaccaaggctaggccaccctggtctagatagcaagttccaggctatggatacatagtgagatcttgtctaagacgaaggggaatggagttgaagagagagacagagacagagacagagagacacagagagagagagacagagacagagatagagatggagacagagagagagagatcctgttggggaaggaacaagatcttataatatggacagaagccacacaaccaaaggtctagggaaaattaatgtcacagacaccacaatccatagggaagatgtaaaatattcagaagacgggctgaggaagaaactatagtggccctggagagttagtgatttggttggtgactttgggtatgatatttattttggtgatgttgcagaagaaaccagaccacagcaggatatgacacaagcagtcaacagagacacagggtcagaggctgaaggaaaggctggctgaagccgagagaatagactaaggagaggcaagagtggaagtggtaatctcacaggaagagctcagtctttgactctgagcggcaatgaagaagaaggctcagccttctgtttcatgcacggtcagggctgctacatatggctgatactgtctatgtcctttagaccagctctggatcaacaggaacctactgtcctccaagtcacaagccctggagaagagacagggtttccaacgtaatacatacggcatgcctctggcaggggagtatctgctggaaggtgtctttttctacaatctagggaaatggccttatttagaactcacttgttttaggtaaataacaatgagaatttcagtgaaatatttcttcttcttcttcttcttcttcttcttcttcttttcttcttcttcttcttcttcttcttcttcttcttcttcttcttctttttcttcttctcttcttcttcttcttcttcttcttcttcttcttcttcttcttcttcttcttcttcttcctcctcctcctcctcctcctcctcctcctcctccttcttcttcttttccttgagacagggcttctttgtgtagccctggctgtcctagaattcgttttgtagaccaggctaccctcaaactcacagagatctgcctgtctctgtctctgcctcccaagtgctgggattaaaggcaggtggcaccactgctgggctcttttcttcttaaacatgttaggcacatgtatgtactgaaccattgtacccaccctctttaagaactttttattgacatctccagttgtacatgttaatgagagttcaatgtagtcattatctcagtctggttttttgctgctacttaactcattaatatagtctgggtagtttacaaaggttgacagttcattaagtttgtgattctggagggtacggaagttcaatttcaagggcctgagtcaggtgctggtcttcttgttgatgggactttgcagaatcctgacgtgaaacaggacatcatgtaatgagaagggcccgtccagcagagagggtcaaactggcttctacagaccaagtggagcgataatttataacttcattagttcatgaaggtagaaacctcaaggcctaatcaccacctactaaggttgatcttgtccaattctttacaacttccaatggaaattaaacttcaacgtaagttttggtgggggcattcaaaacagaatcatatcttttccggattttctaggatgaatctgctcaactttagattcgtgccagaggggaagaacagctaccgaaactctctgtacagtggccacccttctttgtgtaaagcaaaaggaagaacaaatgtgtcagccacagccagagttcccctttcacatcagatgcctacacctgggagcagatggggtcagtgagaggtgggggagggagggatgagataggatttcatgtgtgaaattctgccttactggaacttactagcagaggaataacaaaagccatgttgtgctgttctagaaactccgaggaaagagatgggtgtagggatgagtaattgtctatggactggatccattagggaagacaaaaaagctttctataaacttaagaatcacaatcttaggggtggtagcgaggaaacatgactgaggaaatacaggctcgttgaagctaccttctctctgctgacgtgctctactagggagaggaggactctatgctaggattaaagactccatctgtgtgctgtgctctagtagctgagaatggcgacgtgtgtgtctttgataataaaatagagatccgggtggtcatatgtggtagcccatgcctataatcctagcacttgggagacgaggaccaaatattcaagactagcttggtctatataataaaactgtgttaaaatattatatattatttgtaatgctttattgtagctgcttgtattctaatgccaattatgttcccccctaagatgtttgcatgtagcttctggaaacctgcctacagttggttctgataaacatgccaccagccaacagaggacagacaggggattttaggcttccccagcatggggcctgggggaaggaggaggaaggagaagggagatcagctatgctgggagtgtaccatgcctgagaagagtggagaacagagaggcgtaacccccatgtgaaggagctcggaattatcagtgggaggtagtggaggttaggctgtagcccagctactgtgttgtttaaagtatattaaaatataaaggctgggtgtggtaacgcacgcctttaatcccagcacttgggaggcagaggcaggcggatttctgagtttgaggccagcctggtctacaaagtgagttccaggacagccagggctatacggagaaaccctgtctcaaaaaaaaccaaaaaaaaaaaggctgcgtgtgtgtgtgtgtgtgtgtgtgtgtgcctttcatttgggaacataaaccattgaggcaggtagtaaacccaccatcagggtttattaatttaagaaaattactacattttgtagcctataatgtcttcaaatagaatttattacatgatagtaatatttaaaataacaatagagctatccaagaacaatacacaaaagaaaaaaatagatcatcactaacatcagaaacaacaaaagtccatccatagctgttgcatctgttgcttatagactgctaagggcagttagttgatttacatcaacttattagatgagagtacaggggaatgtgacattttcatattcttctaccatgtgtgacacacagaaggaaagtgacttgaccctggttattttataagtcacgaggaaagatggcaaatgaacatggcttcctatgaaccaacctaaagaccaccaggcactcacaacacacacagcttcctggctcggttgcattcttttttaactttaaccccaggaaaacatgatggaaggggggtgtctctcacaacttcttttttttttttaaagatgtttctttactcatatgagtgggggcatgtgccctcaggtgcaggtgcttgagtaggccataagagaacatcagggaattatagatgcttgtgagctgcccaacatgggtacaagggaactgaactcaggtcctctccaagagagatatgacacttgactgctgggccatccctccagcccaagtgtcttagggctttactgctgtaaacagacagcatgaccaagagctcttcttataaagacaacatttaattgggcctgacttacaggttcagtccagtatcatcaaggtgggagcatggcagcatccaggtaggcatggttcaggagtagccgagagttctacatcttcatctgaaggctgctagtagaatactgacttccaggcagctaggatgagggtcttaaagcctgcacccacagtgatacacctactccaacaaggccacaccttctaatggtgccactgcctgggcagagcattcaaaccatcacgtcaagctttcaccggttctaacgtgtttcctctgtgacaaaacttacatcagaggctgtcttgcttcctgtggcgactatggtctactgcccacatttgtcttcagagtaaatggcttgagtttcctagcagcaggagcactggctcttcacaggagcagtccattaactggctgatctggctgatggattaggagtggatgagggctaccccagagctagaggtccttctatggaattgcttagcgctcccagagcaactgtcacccctcaccctccagggctcactctccaatgacctgaaacagaactctgagtgaaaaaccccatcaggaccacagagaacctctcaggagcagtggttacagaagatgagactggtactatgaaagtatctattaaataaatgtattagggtctcaaagtaagccacgtgtcctgtgtatattttaacaagccaaagttgtgaaccatatatggtggtctgaaggtttaatggttgtcttagttagggttttactgctgtgaatagataccacgaccaaagaaactacatttagtttgggtcggcttacaggttcagagattcagtccattatcatcaaggtgggaacatggcagggtccaggcaggcatggtgcaggcggagctgagagttctatatcttcatctgaaggctgctatgaggggactcccttccaggcagctaggatgagggttttaaagcccacacccacagtgacacacctactccaacagggccacaccttctaatagtgccattctctgggccaggcatactcacaccaccacaatggtttaatgaaagaattcatcaagcacattgaaagatcacaacaacaatctgtaatctgtaataaactgcagtcagggctgactgtagacgtgtgtaatcctgcatttatttggttactcactttttattagtactagccatggttagtatgcgcatttattttttccttcctccaacttcccccaaacttccctttggcaaagtttctacacttttgccatcatttaaaaaaagaaaaaaaaaaaaaaaaaaaaaaaatcaggcatcagatgaagcctggatcctgactgccacctagtggaagttttgaatattaatgcatctagtaattgttttcagtaaaatgtctaaatatggccacatcaagttaagagctactggtcaagccgggcgtggtggcacacgcctttaatcccagcacttgggagtcagagataggcggatttctgagttcgaggccagcctggtctacagagtgagttccaggacagccaagctacacagagaaaccctgtctcgaaaaaccaaaaaaaaaaaaaaaagagctactggtcttgaatgtgtgaaactgtaaagctcattttgatttttgaaaatataggcgttgctaaggtcttgctattatctcgagagactgcttagtacagtggatctcagccttcctaatgctgtgaccctttaatacagtccctctggtagtgacccccaccccctgaccagagatactgaggaccagcctcagcttgggagagagggtcctgaggaagggatgtttgggagctgtggaagaaatgacttggagtgtgccatggatgcaagctgattctctttggagatagctctctcttgcacactaaagcccagtctcttattttacataagctactttcttaagaattgcatctcaatccaatcatttactccaggttcccttttgattggcccatgaatcagcattttatgaccttagccccttgactcaaaagacagggctgcatggctgaagctgcttagttctgctgcttgcctttgtctcctgggattaaaggtgtgtaccaccctgcctgggcctaagcttttcatggtcactgttcctcaagatctgggtcaaaagcctgtatccttcagccttaagacctggatcataagtgtgccctccatttctggattgtagttcattccaggtaagaggattccctcaggagctgtgctgcaaaggagcacagtaaatccacttccttttcttttatttggctttatgtgcactagtgttttatttgcatgtatgtcagtgtgagagtatgaggtcccctgaaattggagttacaggtgtgagctgccatgtggttgctgggaattgaacctgggtcctctggaataccagccagtgctcttaactgcagactaagccatttctccagcactagtaactccacttttaaagaccattttaaggaggtggttaggagtaccgattgctctcctgcagtaccaggctttgattcccagcactcacaagatggcctacaaccatctgtaattccagtcccagaaggtcctatgccctttcggcatccatgagcactgcatttatgtggtgcagacacttgcaggcagaacacttgtacatataaaataaaggctaaaaaaaaaatctgaaaccatcctaaataattccttctactaagtactcacacttttctacctagccttcaaagggctccgagtgcccactgccttccccacatcttccctgcggtctggcccacccttctgctgtcctctgtttctgaggaccacatatgtatttgtactctcaccttctgtctgtacttactaagcaatcgcccagcattttcctccagtctcctcccatcgttgccaacacgtgtgcacagggacacatgggaggggcaaacctactccatcttaaagcagaaagagcctgagtgcttgacttacagctgaacctaagccacacccaagtaccaggaaggaccccacggcttgtccttggcccgtaccccagagttactccctagctacttcctagcaacagccagtcaagattagtctgattgtttgcgatgtactttcagaccctctgtgattgttcatggttttgcttcagagcacccacctgtcagcttacaatagttattcagtgagatgcttggcaggctgtaacccctctcacttgctcgacatttcctataaaaccttgtcccactgagggcttaaggctgcttcaccctctggtcctactgtgacagggtctgcagtgagtgagccagaactggagcttgaatgagagaccctagtgcaactgcattggagtcggctccttggtggtcttttgggacacatgcacacacatacatgtgcatacacatgcacacaggcatgaaaccattcgaaatctattttgcaaggctataagtaatttctccatattttcattttgaaaattatcaaaatgaaattacagggaattaagagatttgtaccatgaactgttacacgttctccattaaattcaatatctgcttgcatttacttgccagcacatctattggaatctactagccttgtgggtctgagcaactactagatccttggacttccatttacagctgaccattgttggggagctggactccagactgtaagttgtcataacaaatttccttatttcatagagttctgtgactctagagaagtctgactaatacaaagatccaatcaacatttacatacttcattatcatttctccttttgcttgtttggatcttgagataggcacttgctattagacctggaaggcctggagtacactagtccaggcactttttaaatttcagttgattttcctccctctgcctctggtgtacttgagaccaaaccttcagggttcggactccatcttagagaacctgacctaaggttaaactcaagtaaactaacaggccagtatctagcaccagtttccaggctacgcccccccctccccccaacaagtcctgtgcctaacaccagtttccaggttacctcacaacaaaacctacatccaacaccagtttccaggttatttcctaacaaatctacaaccctgcgtttgcacccccggcccccagttctcttgcatcagagagggtggtgaggcccaagctcgagcttgaacaaaagaacctagttcaattgcatcagaatcagctccctggtggttttttttttgggggggggctcatgaacatttcctggcacaacagagactacacacaggcaccaccatacccatctttttaatcttctaatccaaaacagtccttactccttttaatagcattgcttccttctttgttgctgtgataaaacaccatgaccaaggcagcttaacgattttattttagcttatggctccggagtgagtctataatggccgggcaggggcagcagcaggccaaggacatgatggctgaagtattttgttgtgagccggcatcaaactgcacatacagcgccgagagctcaaatttaagtggtgtgtgtgtctttaacctctccaatctgcacaaggcagggaacacctctaaactactccaaatggccaagacgaagggaggtatttctcattaaaattacattactcttgaattatttaagtcaaaaaaaaatcgcacattctggatgggtgtttctttcctcacggacattcaacacgttatgcttattatttcctttaaactcaaaagggctttgattatacttcctcagaggtgacagtcacttcatgttgactgtcactcggtcataaacatgcataaagtaaggttgtctcacaactagtgatgctgaagttgatcgctgggtgagcgattgccagctttgactctaaacatcctacctttctctattttcttacatcacatggcttttacctaccatgggtgatgcctaagcacctcaaatggtcaccgttccacttctatcactctatctttattggctatatttattttctaaacaacaaaaaacttcccttctcttgacttcaaggtctcgctctgtagccttggctggcctggaactcgctatgcgggctcagactcagatccgccgccgccatctgcctccctgtgggacacaaggcacccgccatcactcccagcccgttcccggtactaaatctcatcagggctgggcagaaaggctcgcgagtttacgccgcagggaaccggaggacaacacccaccacagagaaccactcgctgccgctcccagcacgaggcggaactgacgtaaaacgaacatgccctctgcccccggcgcggcccagacacgtcacttcctgcccatcagaccacacccgctccgccttccgaggctgcaatcgcaggctgctgagagggcggcgagggtcatgtgacccgggcgccatcttttccacgagagtccgtaggtctcgcgagatctcgctcgccttgtctctctctcctcctgcccgaggccggcttctctcccctccccctcgctggcggactttctccttttccgaccgaggctcgtcgcggcggaaaatctttcccggctgcagccgcccctgacgccgctcgcctcgcctcgcctccccgacccctgcccgccgtcccgaccccagccccacccaaggtaacgagcccctgagggagagtcaggcctcctcgggcctcgggctggagtggaggtggaggcggaggccggaagcgagggcgccggcgtcagagctgggcccggccagggcagtgtggggaggcagcggctctcgcaccccccagtggacggccccggcctgcgtgggggcttccgggacgaggcggcgaacgtggccgtctgggggaagcctctgtgagggtgcggggctcggcggtttccatggacgcggaggtctgcgttccctggtgggagatggtggaccggggctccagcgggctcggggaagcccgcgcgcggacgggaagactcggccggggttccaggcttccggtgggccggaatgtcccggaggtgtcccccgaggacccgtatgtttgccccgcggccgcccagaggggcttctggacccctggcgacgccgagctgcgttgggcgagaggcgggtttctaggatgacctccgtgtgaaggaagagtgagcgctccgagcggttccctccaccggagagaaaggcgaggaaacgccgaaggtgtagttaaccgaaaaccgcttcctctgactggggggaagaacccgtccgtgcgaattttaatttctcttgatttttgactttctcagcttttgaaaagtatgtcgcagtctttattgacatacactgtcttcctatgatatatgatacttaaagaagaagcagggtttttttttttttttcttttttaatagcatgatttttccgggggaactctttctgtgtagaattgaccagccgtatctgcagtctttagaatttaattgccttgaagtttgtggattagttaaatatgaataaagttaaaatggtgatgaacggaacttgaattttgtagcaagagtgatttaaattagacaggtcagaggaagttttttttttgttgttgtttttttgtaatttgatatttgacttgccttatgggcctttattttcctcagatgtcagaggatctagcaaaacagttggctagctacaaagctcaactccagcaagtagaagctgccctttctggaaatggagaaaatgaagatctattgaaactgaagaaggatttgcaagtaagtacaggtggacacttggagttgaggttgtttgagaagaggatttgtctttttcaaagtatgcattcaagactcgtaggcacgcaaagcatctgaggaaggcgctcccacgtgtatatgcttgtttgtacacaggtactgaggcttctcacattagctcctcttggtgtacatcagaaggaacaaaacactcggttttgtaaatcctgtgtgtacttacaggatttcatgagaagaggcgttgcaacggaataagcttttgttttaaaagacttgacaaggaaacttagttcaaaaggtaacactattaagggaggaatatacaatctgactaagatccttcttatgacacaaaattatctgaagattaaattcagccttatttttcaaagctaatggggtctatacttttattaaaaccacatcgtgagaatgtgttagggaataacattctgtatggatgttataggtatttgactttaaggctgggctttgtagttgttgagtgaagttgaaatagtgcaaaagagattagctttttcatgccaagtttaggaagaacaaaacatctaaggacatgaactggggtttcaggacaaatttacatacctgttgcttctcagaacaccaggttaagaaaagtaccatggataacttgtaaatatcttacatggaaactttgttcctaagaatgtccttcaagttctgaacccatacttcagcagttttcagggtgttttgatgatttcttgcttattctatatcccatctaaacagtcattctctttatcttcctgatgaccattaatacattagatgttgcctgctgtatatgcacgcctctaatcccagccctcaggacgcagagctaggcagagctcttgagtgccaggccatccagggctatagagtaagaccttgtttcaaaaaggacacggacacacaaacacaagcatttccaacttttatttttgggcttaatgcttttgggattctgaaagatcttacctgtaatttaaaatgagttggacattttcaaacttgggttctagacttacaataaagtatatgttaaaaacaaaataatgaaggataattttactttgactaatactgttcttcagcctatggagtgcatgtgccattcattagagagggttaggaaactttctcccacacccagatcttctgtaaaccataagcaataacccagtgtttgtttcctgcctgctcatttgatttgttcacctgggccatgagtggacatgaaggtgaagtgacagaaacacactaacctcatctacctctgccgacttcaagtttgttttctttgaagaagaaaaaaaagctgtctgtgcttcctgggagtgggatgagaggtctctgtagaaatggtagagggggagttgggagcctagtttcaaacaatattactatcaggtctttctaaacatttccagcgtaaattatctgtggagtatggagttagctatcttgatatgtaatctataattgaaagtatgatagggagaaacccttatggtagacagtttttacctaaaaggcttacctgggcctcagttaataatgatctggaggccggaggtaaaactacttagcatacacaaggccctataattcaattcccagcactgaaaaataaagtcaacaaaacacaaaaacgcaaatcaggtggaggtagtaggcaaatctctatgtgtttgaggccaacctgggctacttagacttccaggccagccaaggggacactgagacctggtttcaataaaaaaagcagagcagtaatgactttgaagtcattgtttacaaggtctcttgtatagccagttagaacagcagtgtgtggtagagcttgcttctgccacggtgaacaccatctgggtttgctcttcacgccacaggcgctagccacagtaagcagacactaggtaattaaaattaccagtgtcagggtacctgagcagctgatgtttaagttttttgttttaagtaactagagttgattacatattggacagtgcagatacaggcttcagtactcacagcaccttaagtagtggcaggatagagtactttaattggccagtcttccttatggtttactcttactcttttatgagaagtttggttttgattacaaggtatggcttgaacttaaaactattgggagatggaaatcacttcttatgatgaggtaaaactacagaaggtgttgaatgtgtgctcctgaccctaggtgtttgcatttagaacagtgacttctgtatcagtgtgggtctcacctcccacccacctgctcgcccctgtaggggagatggaggtgtacatatataaaaatgccactagtatttaaatcctgtctgattagattgattattcagcttgtggattctgcattttttttaaagggggtatcatcataatggcttctataccttatgtttattttcccagtaaggtttcaatgtttctgtctttcatacagaataataaattaggcaacaaattaatcttttaaagtcctaactgcttgtttttttttttcctttttctttttgacttaggaaggaaagtaggtatagtaaaatcaggctacctagctcattagttccctgggcagtctatagtaatcacaaaaatagtcaatttattgggctgtattgctgaataaactggttctaaaggaggcaggggtcaagtcacttgtctcatatattacagtggctctctgcatccccgaaacgccttccttcagtaagcagagtgcttgagtgcaccccctttgacctgctgatatgtagatcacaacatctgatgcttcctggaattgccgattactgtaactgctgcccatctgtcaatgaaggagcagtttcagaacttgggggaggaaaagtaattaatggtatgtaccttcaagaaccccctcatacgtaaagtagttcttctaaatactttgctccatatacacatgtgaagataaaaattaagaaggttcttcataaattactgggagggacatgtaagatgacagttagttataggacatcaggagaaaattctctggatcttgttgtttacaagaagggccaccctggcacagggctttgaaaaattatgcacagcttttcaggactcttttctttgaatgtgttttgttatgaatgtggtggggaaatattctgtcatataggaaaaggtaaatcagactgcatatttgtgttaaatatgtggtccctgggaggagatgcagatatttagtgaaaaagactgggctcctgatcgaggcccatcagcttgtattccttgctctgaaggtagttaacagaacaaaattggttaaaatattatattgtaggaaactctcctgctttatttacatagaattgtctaattcgatatttgagggctgtaggtgtgacagtatcgggcattgctggtttgcacagaccccggttcagtcttcagtgttgcagaactgatgatagaaagctatgcatagctcctatgacttagaaaagggggaaatggtgtctacttggctaaacttagagatttttttttaaattaaattttcaactcaagtctagtttgttttctgtttgattcacaaagctgacccttcttcaggtatttatttatttatttatttatttatttttaaggtacaaatactagtttttcaaaagtagccaggaagatttagaatctttaggagaggtaatatttaacttttcttggctactgaaccaaaacaaccattagaaaaccccagtgtgtgccagaagaaactaagaatttaattttgctatatttgtccccaagcatagaataagatgttttaaatgcaacattgtgggaaaccagtaggcaagttctttgaaaattagataatggacaatgtacatcttcattagagtaagaaaatagcagataagtagttaaataactgtttacattatttgtcaagttctaaactgttcctaatgactgaatcaaactaatacacagaagcctgaattagaaacaactgccacacacagaggcactctgcctgtgtgagttattttttctttaagatgaagctgtgctactgtgcctgataagtaggtgtaagctattttaaatctaacttgatggttctcacttaaatgggatgaaaaattaccagtttatttatactttccagtattttggcagaaatgtatataagtaggaattttgtgtgttgatgacactgtttgggtctttgtagaagaggtatattggctacacagttgaatatttctgctaagtaatgccctataaaactgtagttgcatgaaataacaaatggtagttgtaaaagtggccttgcatcaaattcagttttaatttctcatctgtagagaaatctattcagtcacaaaaggcatttacaagtcagatgtggctgagacatgtctacttttatttccaatagtatttacagttaacttggagatgcctctgcaggtttcaatcactctattagttatgatgttccttagtctctatagagaaacagtgttctcaatatcgctaagaactgtacttgtaacatgcataactgctttgtgatacaagaactatcattaaaaaccaaaagaaagtagttgacagtattaaattacaaatgttacggcttctgttttcttttttaggaagtaatagaactgaccaaagaccttctgtcaactcagccttcggagacgctcgcaagctcagacagttttgcttctactcagcccactcattcatggaaagtaggggacaagtgcatggccgtgtggagtgaagacggacagtaagtgtagagccaccctctaactgtactgagttaataagatacaatggtaagatgctactgctcagcttgtactactcctatcgtgatctgtgtaggtgaggtggtttatgaaacgaggctaattcttgggtggttgccattaacacagcttaattttagggttagtttaagtttggggagaagaatggttgaaaggaaagaaagatgaatgactgttttcaaatgatgtgaattgttttctcaaattaaaaagcgaatggcaagctgggtgtggtggcgcacacctttaatcccagcactggggaggcagcagcaggcggatttctgagttcaaggccagcctggtctacagagtgagttccagcacagccagggctacacagagaaaccctgtctcaaaaaaccaaaaaaaaaaaaaaaaaaaaaagtgaattgctgacactgtcattgcactcaagagcatacattgagatgaattatttaggaattagcttttctccaagatttagtacagtgagcagatgtgtaagagatttttctggtaaaatttaaattagggcttttgataccaggtgcctaactttaaatcactcgtgttatttttgccaaaagggccatcattgattgagaagtttattttagagccatgctaattgtgtcaatgcagtataagtcttgtaggctgagtactaaatctttactcacctgcttacagccatgatatctttacaggtgttacgaagcggagattgaagagatagatgaagaaaatggcaccgctgcaatcacctttgctgtttatggcaatgccgaagtgacgccattgctgaacctcaagcctgtagaagaaggaaggaaggcgaaagaggacagcggcaacaaacccatgtcaaagtgagtgacgcttcccagacgcgcagacgctggatggcgtaggccagctgacttcccattcttaccttgttctttggagtactaaagtgataagcgaggctcactgtagctgctaacgtaactgactttacccattgggtacttgaagtagtctgcgttgagcagttacataatactgtttgacattgttttgaacagtcagtgtgtatgcctaggtaaagtggagactgttaacgtgttccataaggaggatgctagtattaagaacatctactgtgtttttgtaagtcaggtcctaagactaaactacagtgaagactatcttgagacttgttcctgctgaatctataaccagaaaagaacacagacttgaggaagagttttagggctaaggatgtagcttaggtgtggagctttgcctaacaagtataaattcttgttaccacaaaagagggaccataattcccaggagagtgtcctttggagaatgacatctaaactaatgatggaaaccagagttagcaaagccaacagtgagagcactgggatgctggctggaaatagatttttgcctgacccttcttctctaggttgatgttgaacaaacttaacatccgcctcgtctgtgaagtgtgtagcagttcacagactgtttaataactgtctcctctaaagagcatgggaggcacttctgattttagaagtgacattttttggtaaaaacttaggacccacaagtcctaaggacagataacaggagacaaagttctgagtctacgtgcttcgtgtgtgtgtgtatctgtctgtgtctgtctgtgtgtgtgtgtgtctgtgtctgtgtttcaaggctgactgataaatgtgtttctgattttggtaatttttccaaaatgtaaagttggtatgtaaatatacttgaaatatatcacttgttaaagaaacattttaactgattttaagaacatcacgttgtaaaaccttatttagtctagtttcttgtttcgctcttgctttctgtattaaaaacaaaacaaaaaacctgcacacttaggctgcaggttggttatttggtgcaggggaatcaagatttgttctcttaaaacccttccatcttgtcagttgctgttagtaagcagagactattggtagcttaagccttgcttgtacttaggatcctatttttgacgatccaggtttctgctgttggtcttgagaatattggtcataccactcattcttctggtcttggtttctgtcttccaatatcgatgaaacaattttatatgcattaaatcacttcatacaatttctccaagtgtggcatatattacattgctaactgtatttttagaaattggtaaaagttttgccagccattaagggtgatttttttttttttttaaagactgggtttcatgtagcctaggctggccttctgtatgtagcagaagcataacttaatttcctaataaacattcctccatctcccaagtcataggattataggtgtgtaccatcacatgtattgaatattaatatccctaacatacaaccagcaaaagttatatttaaatttttagaaagatttgatttactttgcagtagagcttagtgtgtgcgtgcacagaagtttttgttgtcatttctgggtagagtccatggtcttggtatgcttacaagtggagtctacccccgaactatactgcctttttctaaatacgtgttaatcgtcctcagtgagtggcatggcttattttacatttacttagtgtgtagattcatgtggacagtaggacaactaaggagttgattctcctgccaccttgtgggtcccatggttaaactcaggttagctcatgggcttggtggcagatgcctttccgtgctgagccatctctcctcagtccgttcttcttcctttaagatggggtctggtgtgtcctagaccggcctccagcttggcaaggaggaagttgaagttctgatcctcctcgtttccacctgtggttaccagcatgctgtataccacacatttattttggcattgatttttaatgacaattgtgctcttgttaataagttagtctgtaagttttgttttttgtttataaggaagtcatcttgtaaatcttaataattgacttcacatctatgttttctacgcagaaaagaaatgatcgcccagcagcgtgaatataaaaagaaaaaagctttgaaaaaagcacagagaataaaagagttggagcaggagcgagaggaccagaaggtgaaatggcagcagttcaacaacagggcgtactccaagaacaagaaaggccaggttggcgcatccctcctcactttgttgctctgaatgcagctgccattaaaatcattttaaaatgaaaaaaggcggtgtagatttatcaaaggacattattttaagcaattcttgatatatagtccctgtcaatagtcattaggtactttttgcaatgaaacaggtttctgtaaggaattgtacgactgtttgccttcagacctcagaaaatatactgggctctgcttttttttttttaacatacttttattctgagtatctattttaaaaagctttggagtccttgctatgcattgttgggtagaaaataactgtagaattcagatgttcaaatacagtgacctgatgctcacccatagtttagcttttcattgacgtcagggtccacctcactggacacagttgctgaagactagtgcttgtatcactgtgtgtaccacagcaggtctcaccataaactcccttacagccagagttctgtatgacaagtaagctttctattagtaacatgtagtgatattttctgcaaaatagttttgtaagcattgaaacgtgaattatgttaactttaaagtttgttagattatatactagagattgatttttggaaactcatcagaaatgtttttttgttcctaggtaaagaggagtatttttgcttctccagaaagtgtaacgggcaaagttggagtaggaacttgtggaattgctgacaagcccatgacacagtatcaagatacatccaagtacaatgtcaggcatttgatgcctcagtaacctgaaaaactgctgcatttcatctctgcagggctttactttacactctcctttttatccttgtatttttctaaaggtaactgattgcttagatgctgagtaaggaagatacattgttgtcattgtttggctttggtagaatgaaacttgaagacatttgataactgctctcatttaacttcattactacttaccacagcttcctcagtgtgttgaacaaggcaacttttctaggtaagtgctgcttaaatcagcacttagatgacttctgaacgtcaggcccattgaactgatgttgtgtagaccgtttctaagtcctaatttggaattttcagatgctttgcacttgacatattccaacagttcattggaacatggaggcaaaacgccagcctgctaaagagagcttcagttttacaacctggccattgtccagacaagcccaagtataggttaatttataaacggcaaagtttattttgagggtttttttttccttgaattacttatttcctgggcctattaggtcacctctacaattgactcactttgtattttttgtcattgagtttgaaatttatattaaaaaaccaaacaaaccatgtttaggatgtgcgccccttctctggtgtttatttggtgttttgtattgttttttcctttgttgacttcacttgtagtggtaccatttttgggatgtgtactgtttctatgggaagacaaaagctgatgtacagccctgtgtacagtgtagatactatttttgtaaaaatacaaggctaaattaatgaacaagagtactcagtgtttcatgattaaattttcctgtatttcttgtgcattaatctgaccataatttccctgtatattatgttcatgtagctgagtttgtaatttttattaacgagatcaagttgccagcatttgttggcataagtgaagcaccacagttatccaagttgagtttaagccaaaacaaaggtagaaaaaagggtcttcctgttaattggaagaaaataatttttagagtgtgtgttaatttcagttttgtatgtttaactttaataaataaagtgtttttaaaatctccagtgtgttaacaaaggggcggagccttagacttgtacacagaactacaatgctaaggctggtaaatggttcacagatccttaagaattccttcattgggtataagaaatggagtcataaaggattaattaatgggcatgtatgcgattatttgtaaattaaattactttgtaaattttgtcttagtaaactgaaatttttagtagagtggtgaggtaaactcttctctttcagagttttcttcataaatatgtagggcaagagaaaggttcgggttacatagaaaaaggggtacttggctgctgataaaagtgctggcctacggtgcttaaggcagttagatccctactaccagagggtattaaagccgagaactcctaaatgaaaaagtcaaaatcatcttgtagttttaacagacttcttaaatggcccagtaacagttgcaaggaaattcttagatgaaaacaagtcacttggtgtaactgtgtggcgtggcccccacccccaaaatggattgatactgtcttggtattttagaacagtagtttttggtttttttgagaccgggtttctctgtatagctctgtgtgtcctggagctcactctgtagtccaggctggcctcgaactcagaaatccgcctgcctcggcctaagtgctaggattaaaggtgtgttccaccactgcccggccagaacagtactttccttggtgcttttcctggaagttctgttgagggtggtactctggtgtgcttccgtaagggctttgtgttagcaatgggacagaggtgatcttacatctgttctgaaaataagcacagcagcttcccatctgcatcccacttggagatgtggcccttagggatgttatcctcgagttccgttgacgatgttggtttctttggactagaggagcacagaccctagaaccagaccgctgtctcgagactcagcacttactagctgtgtgtaagttctcatttcctcaagaattgagcaagtatgttttaagagggagagtatctgacgtaagagtgactcgagggatgtctgtcatttactctggaatgatagtatctgatctcctttacttacatagtagtgtatactactactaaaatgccatcaagtaacccctgggtttaaatttttacactagaacatacttaatgggaaccggtgaaatttataataaaaactaaaaaattcctgtctcagtcttaccccagacttaaccagaccttgctaagtcttgttagaaacgctgcaggtgagaactgtgctgcagattaaagatgaaatagctttgatttctaggggggaaatgtatttagtggtgtttcttaatccacgaagattaaacatcacaccagaaggccacgaagttctacctcggatttgaaaagtgcctgtcaggggtgtcatctgtgttgagtggtgttagcgagcaggacagacgacttccgtacgacttgcatccgtaggttaggatgttatcatttacaaccagacagtccaaagatgaagaatatgtagcaaattagctaaaaatttactcaagtagtttgatttggatttttgcctagcttggatagttacaaatactaaaatgaaaaagtatgcttaagctaacaagactttatatttgtttaaaactttcacagaggctcaacatgtcagtaatttgtaaatataaacattctttctatctaagggttttgagttgcaaattaaacttagtttttactgcagtgaggaggaaaagccctgcaggggattcagtagttttaataagaagcccaatgactgagttccctttcctgtcattgtttaaaggagcacaggtactgtgagacattgtagaaatttggtctagccaaagtgttcaataaagacaaagtttctcttctgtgaggttttccagttgacttctcagcttatatatttatgaaaatggttcttttgtggctcagttctgagaatagtagggctgtagtggttgacaacttaaaattagctagtgataccaaatgttagatcttagtcgtttagtttccacagtaaacattggtagctagcgtttactgtgtatgcaccttaacacttagctgtatgaacccagtgtcagtcacgggaatatttggtttatagaatatttagtttataaagtgtttcctaatttattctaagaacatagctaaatgagctctggttaggctcgttaacaaggtgttttaaaagctgctttttcagcttagggtccaaagtcacaattatcattttgctggtccaattcccctttcttggtaaaaattgatgagttctcccacctgtccctttcaagttctgtacttaattttttagaaatgcaatgaatttctgacctaagaaaaagaatttagacttagaggaaacttttgactcttagatcctggacatctacaattgaaccccaagatctgcagctaggctaattttttattggtgggaattgttcagggttttttgttttgttttgttttttatctttttatcagaagtggtaggaaggctggcatggtagtgcacacctttagctccagttagcaccagttagggttgtgtggcctaactatagggtgtgatgacaccgttctttacaacctcagagtttttttttgttttgttttgttttcttttttttttggtttttcgagacggtttctctgtatagccctggctgtgctggaactcactctgtagaccaggctggccttgaactcagaaacccacctgcctctgcctcccgagtgctggcgttaaaggcgtgcgccgcagccgccaccaccactgcctggccagagttgtttttaatgtgtcttaggaacactatggcttgtgctacgcgttttaaaacaatgctttttgggtgcctggtgtaaacacctaaatatcccagtgtaatttttaagcactctccaaagtgaagtttgttggctggtatctttgttgaggcaagggtctcgagctcactctatcacagaaaatgacttgatcttcctgccacttccgctcaatagctgtgattacaggcctgcatcatcccttctagtttctggggtgctggggataaagcccatcggtacaaacttgctaggcaagcattttacccagtccagtgggcagtgttggtaaaagtgcagtccttttcttacgtcgccgtcgtcgttagtaagttatggctgaaaaggataaaatcatctggtagtaactgcacagctactctggggtatttggtggaagaacatttacaaagcttattagcttcaacccctagcatcaagacaggcagatagatctggtacataggccaagaagacagtttcacggtcgagcgtatcactaaatattaaccaggcacattagttatacagtggtcattatcactggagaatgcactcagccttgggttaggttttaaaaaataggggatcactaagacataattgatcttctgtagcctttccttaaaaaagtacttcagacaaagctaagccaggtcaagtgcagtctatctggagattgaggtggaccatttgaactaaatacaagttcaagttttatgtgtatgaaccaggatttcagaaatggggctttttggtaaaatagtccaaataaaatttgaaaatagtgatggaatgcattaaaaaaacgggggctgggaggatagttagggctggaaagatggttcatgtggtaaactatttcccttgcaggcatagggacccaagttcagccttaaactcttttcttggtttgtttttaaaaagccagagagccagacacggtggcacatatttttaatctgcctctgggaggcggacgcagatggatttctgagttctgacagcccatgagactgtatctcaaatcaatgattaataaagaagaattaagccagtaggtggagaagatggttcagctgttaggagcattggatgttcttccagaagactggaattgaagtcccagcatcctcacggtggttcaaaatggcctgtaactggttccacataatcgaatgcctttttctggcctctgtgggcatcaggtatacatatgcagacacacatgcaaagaaatacataagtaaaaaacaaaaacaaaaccaacatgcatgggtgagtgtgtttgtaatcccagtaccaaggagttagactggaggatcctggggcttgccagctaatgagccttgtctgtttggtaagttcaggccagtgaggggcccaggcttatagatggtgcctaaagaatgatgcccaaagtgcatgcacataagcacatgattacctctggctttctctttaagcattttgagggcatgaaagtcatttacatgtattggttcaaaccgtgacatttcaagactgagacagtaaattaacactgtaggaggaaacaggctccatggagaaataggtcatttgccccagggtctgtcacatgttggggctgagggtaaatggaaagttttattaattagattttatcttgggatttttattttttaaaggtgggatggtaaaagggaaagatagtggctttcaagaaaaagggggaaaattgaatattttaggcccagtcattcctcaggatatatgagccaagaaactttatggccctcagttaagagctctgcctcaattctcagcttttaaacatttttgtaatccaaaagacaactgtcatgaagacttagaaaaaacgaacaacctttttttttctctacagtccttacctctgctaaccagaacggaattaaaataactttgtcaggctcctttggtatataaacaggtatgggaattacctgtaccttgtatgaagatataagaacataggtagaggcagacatttttctaaatttgaggccagccagttttaaagaatatacatacaggcattagaacaccctaagtaaggttaacgaggcagtgagaactggtaggctccattgcatatggtggcagaagagattcccaagaggacatctttgtgatgcttgaaagtagttatcagctgtcaacacagggaaatactacagtcgagttgtattgaactagagtagatatctgctaaactgtacaataggaatggtagctgaaattcatactgctattctaatatctaatataaaagcaaaatacatttggaaggcagttacctaaagatatgggcactcaagaaattttcccttcacagagggcactgagcaggtatccctcaatctggtttttacttcttgcataactagtctttaagccaacctgtcttctagagagttaacatgtagtcacaaaatccacccatgtcctccttccccagcagcatatttgatgtgatgtatgtggaggtttgtaatgacggcttgcagcccatcatcctgtataaacacaaaatggccgcatacagaggttgcctgaatgatgttccaaatttcagtcctgggccaagatgatgtgggtcaacaccatgggaacacaagaagaagttgtagttggatggtggtggtgcacacctttaatcccagcatttaagaggcaaagacaagtggatctgagtttgaggccagcctggtctgctagggctagaaagaaaccctgtctcgggaccaccccacccccaaccctgctcttaaaaaaaaaaaaaaaaaaaaaaaaaggagaataatgcagccactcaatggcttccatttactttccatggtaaggacaaactttaagagaaagctcaaagacagccaatacacacacacatcttacctgtctgggagtgactgcaagggaaaccagagggtttctgcattctgtcctcagcacctcaagtgcaacaggtttcagccgagtgtctggaggcatgcagtgtttcacaaacagctacttcaaagaaccttttcattcagacacagcccaagcaacggcgaagtgcttttgcaggcacaaaaagagcactgggtagtgtgtgctgggaccttatgcatgaccaaggcggtatgtttcttgtatggagacgtgctatccacggaagatagctctgacattaacacacaactcgactgcactgctaaatatggttgtttttattttctttttccttgcccagccctatctaaacataaaataaaactacaggactgaaattaacaacccattaaaatcagcaataagttatgaaaatcataaagcttttttttttaagtaattaagggtagttaaattatttaaagaatacaaagtccaaacagcttggggtaaggtctccagcaaggcttcccagggaaaagcagtggcccagagggaaacctgagagtttgaaagacagagggaacacatgacatcagagtgcaggctagaagttccacttagaagataacatttctgaagggatttgtaagagcaacaatagcacccgcacagtgggattgtgggggaggagactgcctgtagaaaatctttacattaaatgagacaagtgctgaacgtaactatgttaactaggatagtatgtctactatggatatcagatggttaaagctggtaaaagggagtggtcctaaagaaaacaaaaacagcattgacctccgtctacccagcccagacctcgtccgtctgtctgtcctgcgcactgtgaagagtgaggcgtgaggtgtttatcattatcaaatgctgcatcaaaatagatgatttccccacgtggtttattccactataaaagacatctatgtttttacttatggacaagctttaaaaagatgtcattttggttttcaacacatacaaacagttatcaaaatctcaaataaaaatgctgcggtggctcagaccttggctgctatactgcgtgcgcacctcctcagctccgcgcagacaccgaggcacacagagcttttcctcctgtgattcaggccgtcatgcatgggctgcccctacgtggccgaagggtggcgagcgggtggtcggctgctctagagctaacaatgcaggtaaggttagctggcttagcatggaatccaacagaaagccgggctgcgtcagggcctctttcaaaaggcttcatggagtctctccttttgtagagcacgatatgagctttttaaaaattcattttgtttaaaagaactgatcatccacaggcttcatgataaacagaggctgagttttaatagctcttcagctatctgagattaatgcctgattatcctgccttttccttactctaagtgtgattttgtttctagggccaagaagctcgggaagggttcataaccctatccttaaatgtctgctcaccaccacagagtgagcaaactgcaacaggagagtgaagtctccattgtctctcaagtcaacctggtcaactcaagataatcacgcgcatggtttctgctgccgttagaaactgtactctttccaaatataggaatatttgttctaccagggaggctctaccccacttttcgttaagtatttgcttaaatacaggtcttctgaccgttttgttcaagtatagtttttagttttaaagaggagactgcatcatgaacccaatttgagagccggtgttgactcggcccagtgagcgctccgccctgcactgttaggccatgctgggtcctaggacgcgaaggagagtttgacactggcactggaataaccctcgtcactcccgacactctgcaggctgctgtggtcgtcaaggtcactgatgctggtggtactgacactgtctgcttctccatgggagaactctgtgctttccacatccacttcaatctcctctgcgggaggaagaaagagaaaacaaaggggggcattaataatctgcatgtgcactttcagaagttagagaggttatccagcaaggttatccgtgctctatcagggactctcctgcaaagagcaatctggtatacagtggtggtcttaatttaggcagcaagtttactaaaacccttttgacgccagtccgtctagacctcccactaaaagcgcttggcctgtttgggaattagtacttaatattaaaagatcccaacccaagtggtttaacaacatctgttttacattaaaccaaaaactaattcacagctctgtttattaatcagggttgctttaaagaggttggggtcatggagaaataaaattaaagatagaaaatttatgtttaggcatccgaattttttggtggtgtcaactctctatcatagatcataggtggatctatggatttctatggattcatcaacaaattctgaatagtaactaaaataagctaatcataaagtaggtttaaggggtttgcttttgattttcttgcatgaaatatagcttcaagccatgtccctctctcatggtaagaattctgcattttctttctctctttctttctctctttcttccttgcttccttccttccttcctttctctctctctcctccctccctccttccttctttcctttgagatctgtttacttatgtatatgagtatactgtgcactgtggctgtctgcagacacaccagaagagacactagatcccattacagatggttgttgagccaccatgtggtcgctgggaattgggaattgaactcaggcaggacctctggaagagcggtcagtgctctaaactgctgagccctctctccagcccccaagaacttggcatattttaaacagaactttttctaagtctaaaatttatttcaaaatagaaagaatgtatatacatatatgaaaaaaaattgtggttcacaaaggcactgccagagaatgttagggtgcacaaagcccaagctgggggctgggagtgcggctgggctcactcttcctaacctagcacatgctactcgctgggtttgctctctagcaccaaaacaacagaagctagacgacagtactacattggttagtgagagccgatgcagtgtctacagtctccccgcccccacccgtctcggagactcaggacttccttagaaagagaagctgcctacctcgctctgaatccgagcgatctgaagagatggttgatccaatgctgtccattcgtatccgctccatctcctgaggcccctgcagctgttccagtcgccgctttaaaaacctctgttctcgttccaagttctctagctggtgctggctcttcctctccgcttcttcaagtttctaaaatgaagatgttttattcacacctgtagtccagtctagtacagtaaaactaattcctgccacaaatacacatatgtgggtatgtatgtacccttgcatatataaatactgagaaacacttgcgttttaaacataaaaacagtggtctttttcctgtatggatgctatgttacttgaacaaatgaagtgaactataaaagtctgtgaggtaagttccacaaagagaaacctcctgcaatgtggtattcagtggaaaattactgagagataaagccaaataacagcatctccgccagagggcgcagctgccttccttcagggtatcggaaagaccttccccagcattctcaggtctagatggccacgctgtaaatttttttcatttattcgcatcatgctgccccactggatcgctggtgagattttacagccgtttctctggagggcagttagtgaagaagaggacggtctagtgagctgtacacgacacacacaggaatcagtgcaaatatggaaagaaagattctcaccttgatgtgtgctttggctttgttgagcaaaccgagtgttgtgtgcctggtgcagtctgggcccagcgggatcagaactttcaagcgttctaaacacaggcgcaggtgagctcgtctaagaaagatatcagccaatcagcacagcctggagagccactagacacacacagcaactttgagctattagccaacagccatatttcactcccaactttttaaagtacctgcacggtagtggcgccgacctcccgccccaccactctgccctgcagacagaagtcactttagattatcagcccccatgaactctgtcagacagcgaattgtctaggccgctccataagctccgtgctgtgctgttactaaagcaatcgagcttggtttcccaatgcctgagagcacaggctggagtaccggtttcagctacggtacctcaa

SEQ ID NO: 778 - DNA, 2108 bp, Mus musculus
tcgctggcggactttctccttttccgaccgaggctcgtcgcggcggaaaatctttcccggctgcagccgcccctgacgccgctcgcctcgcctcgcctccccgacccctgcccgccgtcccgaccccagccccacccaagatgtcagaggatctagcaaaacagttggctagctacaaagctcaactccagcaagtagaagctgccctttctggaaatggagaaaatgaagatctattgaaactgaagaaggatttgcaagaagtaatagaactgaccaaagaccttctgtcaactcagccttcggagacgctcgcaagctcagacagttttgcttctactcagcccactcattcatggaaagtaggggacaagtgcatggccgtgtggagtgaagacggacagtgttacgaagcggagattgaagagatagatgaagaaaatggcaccgctgcaatcacctttgctgtttatggcaatgccgaagtgacgccattgctgaacctcaagcctgtagaagaaggaaggaaggcgaaagaggacagcggcaacaaacccatgtcaaaaaaagaaatgatcgcccagcagcgtgaatataaaaagaaaaaagctttgaaaaaagcacagagaataaaagagttggagcaggagcgagaggaccagaaggtgaaatggcagcagttcaacaacagggcgtactccaagaacaagaaaggccaggtaaagaggagtatttttgcttctccagaaagtgtaacgggcaaagttggagtaggaacttgtggaattgctgacaagcccatgacacagtatcaagatacatccaagtacaatgtcaggcatttgatgcctcagtaacctgaaaaactgctgcatttcatctctgcagggctttactttacactctcctttttatccttgtatttttctaaaggtaactgattgcttagatgctgagtaaggaagatacattgttgtcattgtttggctttggtagaatgaaacttgaagacatttgataactgctctcatttaacttcattactacttaccacagcttcctcagtgtgttgaacaaggcaacttttctaggtaagtgctgcttaaatcagcacttagatgacttctgaacgtcaggcccattgaactgatgttgtgtagaccgtttctaagtcctaatttggaattttcagatgctttgcacttgacatattccaacagttcattggaacatggaggcaaaacgccagcctgctaaagagagcttcagttttacaacctggccattgtccagacaagcccaagtataggttaatttataaacggcaaagtttattttgagggtttttttttccttgaattacttatttcctgggcctattagactcactttgtattttttgtcattgagtttgaaatttatattaaaaaaccaaacaaaccatgtttaggatgtgcgccccttctctggtgtttatttggtgttttgtattgttttttcctttgttgacttcacttgtagtggtaccatttttgggatgtgtactgtttctatgggaagacaaaagctgatgtacagccctgtgtacagtgtagatactatttttgtaaaaatacaaggctaaattaatgaacaagagtactcagtgtttcatgattaaattttcctgtatttcttgtgcattaatctgaccataatttccctgtatattatgttcatgtagctgagtttgtaatttttattaacgagatcaagttgccagcatttgttggcataagtgaagcaccacagttatccaagttgagtttaagccaaaacaaaggtagaaaaaagggtcttcctgttaattggaagaaaataatttttagagtgtgtgttaatttcagttttgtatgtttaactttaataaataaagtgtttttaaaatctccagtgtgttaacaaaggggcggagccttagacttgtacacagaactacaatgctaaggctggtaaatggttcacagatccttaagaattccttcattgggtataagaaatggagtcataaaggattaattaatgggcatgtatgcgattatttgtaaattaaattactttgtaaattt

SEQ ID NO: 779 - protein, 236 aa, Mus musculus
MSEDLAKQLASYKAQLQQVEAALSGNGENEDLLKLKKDLQEVIELTKDLLSTQPSETLASSDSFASTQPTHSWKVGDKCMAVWSEDGQCYEAEIEEIDEENGTAAITFAVYGNAEVTPLLNLKPVEEGRKAKEDSGNKPMSKKEMIAQQREYKKKKALKKAQRIKELEQEREDQKVKWQQFNNRAYSKNKKGQVKRSIFDESVTGKVGVGTCGIADKPMTQYQDTSKYNVRHLMPQ

SEQ ID NO: 780 - DNA, 2147 bp, Mus musculus
ggtgtcccccgaggacccgtatgtttgccccgcggccgcccagaggggcttctggacccctggcgacgccgagctgcgttgggcgagaggcgggtttctaggatgacctccgtgtgaaggaagagtgagcgctccgagcggttccctccaccggagagaaaggcgaggaaacgccgaagatgtcagaggatctagcaaaacagttggctagctacaaagctcaactccagcaagtagaagctgccctttctggaaatggagaaaatgaagatctattgaaactgaagaaggatttgcaagaagtaatagaactgaccaaagaccttctgtcaactcagccttcggagacgctcgcaagctcagacagttttgcttctactcagcccactcattcatggaaagtaggggacaagtgcatggccgtgtggagtgaagacggacagtgttacgaagcggagattgaagagatagatgaagaaaatggcaccgctgcaatcacctttgctgtttatggcaatgccgaagtgacgccattgctgaacctcaagcctgtagaagaaggaaggaaggcgaaagaggacagcggcaacaaacccatgtcaaaaaaagaaatgatcgcccagcagcgtgaatataaaaagaaaaaagctttgaaaaaagcacagagaataaaagagttggagcaggagcgagaggaccagaaggtgaaatggcagcagttcaacaacagggcgtactccaagaacaagaaaggccaggtaaagaggagtatttttgcttctccagaaagtgtaacgggcaaagttggagtaggaacttgtggaattgctgacaagcccatgacacagtatcaagatacatccaagtacaatgtcaggcatttgatgcctcagtaacctgaaaaactgctgcatttcatctctgcagggctttactttacactctcctttttatccttgtatttttctaaaggtaactgattgcttagatgctgagtaaggaagatacattgttgtcattgtttggctttggtagaatgaaacttgaagacatttgataactgctctcatttaacttcattactacttaccacagcttcctcagtgtgttgaacaaggcaacttttctaggtaagtgctgcttaaatcagcacttagatgacttctgaacgtcaggcccattgaactgatgttgtgtagaccgtttctaagtcctaatttggaattttcagatgctttgcacttgacatattccaacagttcattggaacatggaggcaaaacgccagcctgctaaagagagcttcagttttacaacctggccattgtccagacaagcccaagtataggttaatttataaacggcaaagtttattttgagggtttttttttccttgaattacttatttcctgggcctattagactcactttgtattttttgtcattgagtttgaaatttatattaaaaaaccaaacaaaccatgtttaggatgtgcgccccttctctggtgtttatttggtgttttgtattgttttttcctttgttgacttcacttgtagtggtaccatttttgggatgtgtactgtttctatgggaagacaaaagctgatgtacagccctgtgtacagtgtagatactatttttgtaaaaatacaaggctaaattaatgaacaagagtactcagtgtttcatgattaaattttcctgtatttcttgtgcattaatctgaccataatttccctgtatattatgttcatgtagctgagtttgtaatttttattaacgagatcaagttgccagcatttgttggcataagtgaagcaccacagttatccaagttgagtttaagccaaaacaaaggtagaaaaaagggtcttcctgttaattggaagaaaataatttttagagtgtgtgttaatttcagttttgtatgtttaactttaataaataaagtgtttttaaaatctccagtgtgttaacaaaggggcggagccttagacttgtacacagaactacaatgctaaggctggtaaatggttcacagatccttaagaattccttcattgggtataagaaatggagtcataaaggattaattaatgggcatgtatgcgattatttgtaaattaaattactttgtaaattt

SEQ ID NO: 781 - protein, 236 aa, Mus musculus; identical to SEQ ID NO: 779

SEQ ID NO: 782 - DNA, 32230 bp, Homo sapiens
ggcacggtggttgatgcctgtaatcccagcactctggggggccgaggtgggcgaatcacctgctgtcaggggttcgagaccagcctgaccaacatggagaaaccccgtctctactaaaaatacaaatttagccgggcatggtggtgcatgcctgtaatcccagcactcaggaggctgaggcaagagaattgcttgaacccaggaggcagaggttgcggtaaactgagattacaccattgcactctagcctgggcaacaagagcgaaactctgtctcagaaaaaaaaaagaatgttgacatatcttcctttgatggtaaaatagttttgagagtgatgtgaagaaaaaactaattagtcaaaacagaacatcaacaccccaaaaaagcccatgaccattaaatgtggcacagaaactgttagaaacagctattatattcacatccatttgtttgtcttatgaggatatagggaaatatgttatcttcattttttttccagataagatgcaaagaacatgttcaatactttcataagccacaggatcaatggccacatgtatctatacatcatagctactttcttgtctcagttacatgaacattgttcttctactgaaagccaggttaattggttctacttaatgttgcctgtagagacatcatcagacttgggcagccagtagcgctgaaaatatagaccagagctatgttgattaaattgctcataaccaagctgctattacagctctcatttttcatatctatatacttaccagcacaaatgaatgtaaaaatcactttcaattggctgtaaaaaaacatgctatcactaggattaatcagaagttctttccataatgaaaatgcctaaaacattcactccttactttttactatagtaataaacttatgaagaaattgatgtcatgtgtccaagtgtcagagaagtattataacaccaattacaagaaatctttagaatatttgccaaagtcaaatatagtgttcactgataccaaaaatatactttctctgtgttctcaaggagatcaaatgtagtccaactaaacagtcacgttatcaaggaggctcatctcgccaggtgttgaagatgcaaagaacaggatgtgactaccccctaccccttggatataatgtctcaaggctcccagttctaaacccagtagtccagggttctcttaacaaatataaaaagactaagggagcagaaaagagaagcaaggagctctactcctgaaagctggtaagttgtcaccaatgcccattagaattgggtcttttggtggggcgtggtggctcacgcccgtaatcccagcactttgagaggctgaggtcaggagtttgagaccagcttggccaacatggcgaaaccccatctctactaaaaacacacaaaaaaatattagcccggcgtggtggcgggtgcctgtagccccagctactcgggaagctgaggcaggagaatcacttgaacccaggaggtggaggtttggagattgtagtgagttgagatcgggccactgcactccagcctgggtgacagagtgagactctgtaccaaaaacaaacaaaacaaaacacaaacaaaaacaaacaaaaaactgggtctttaaaggcattcttccaggcagggaagtggggaaaggcatgtgaggtaaagcagacacttggagcaaaggcaataatgcatgaaaagacagggcaggtttacataaggagtgtgtgccagtgctaaggctgtgacagcatccccaatggccttatatgctgggctaaccaaggatttcaatgagtaggtgtgggcttgctaagattggtgtttccagaagatcaatctgataaccaagagtggaggatgcgtctcaggaaggaattcattcttaggctattgcattagacaaagtgagaaatgatggcagtctggtttgcaacacaggggatagaggaaagagaatacatccaaaagactttcagagggtctttaaaactagttaaatgaccataagggaggaaagtgatttcttcagctaaaactagaaaaaaaaattaggaagagcatcagtgtcacgaaatacaataaaagccaaggtcaggcaaaaatatcaatttaaaatcttcttcctagccaatcatacatttactacctgcaaataggctattttcagaaaatatcatttattctccgttttctttctctttttataaaactcactctaatggctttttgatgagatggagtaaatcatcaccaattgtgccaaaatattttggagtattctgcaacagaggaaatgcttaatctttgtacctgagatgcttctgcataagcaaactctcctacagcataaaatatatatatatcagaaatcaatttgaaacaaacatatcatctgcaggaagtgctgaggcatttctccattagttttaatccaaggaaaacaagatgagaaggtgatgtttcatgatctctaatatgggtagcttttgcaagagagacaatgtcagagataccaaaaataggggtgatactcagaaagtacgtcgttttcatctgtgtagcagatgttatggtatgcttcccagattccctctttaggactgaggtactcatcttcctagcagttgggagtgctagtagctgacagctcttagctgaattgctcttagcccctttcacagggatagcccccatctattggctggtcaattgatgatgggtgaacataaagccctggccccttgacttaagggacaggggcatctcagttacagaagggccatcccagttccagagcttctatgggactgattaaggtccctattgcaagcgcataacagttcaccttcttcctctgtccagtcctgcccatcagccgtcacaggtgatgttcccaagggcactctccaaaactttacctttcgcacagaacttagagtcctttccccatgaaacccaatgtacaaagccaaccaggaccaccaggagcctttcatgagcaataattacagaggatgagagtgtcactacaaaagtcccttgaactcttacaggtctttaacaaaatgagccacacttcctacttatgctctaagactaataacacagagatgtaaacagcattacaagtggtctataaagggctttagatatagaagaatttataaaggaaggaatcacaggaaggccaaagaaaaacatatatattagaaccaaaatggaagttgagcacagaaaacttgctgttcttcatcatttggatactgcgagccatagttttttgggggtgtttgtttttccctaactcctctctccccaccacgctacctggcaatattccttcactaaggctggaggaggtgggggagggggcggagaaatcagacattgaaagattcctgtatcctgactgccacctaatggaatctttgagcattaaggtctccattgtgtagttttttggggtttttcaactgctgacatatcaacaaaatggcaaatgtgaccatgtcaaattatgcccactagtcttcatggggcaaaactctgggattcattttggtttttggaaaaagtcaagttaactgccttattttttcctgtctacatttgggaatgtacatcccctgccactcatggttgttcagtttaagcaaacttcattaaaagattgctctattatccactgtgcaatacaaataatgtggactatttcacaccattcctcttttttctaagataaatgatctgtaagtgacatgaatatggggtggggaatatccagataagaaaggtactttcaggggctgtgatgcaaacgaatccaatgaattccgagtttaaaagactgtcttaagactgctgctggagctgctatacgagaaagttaaacagggccaaaaaatgaaaaaaaaattcctatcacaacatcagaaggcaagacccacttgactctcctgcatgtggggaagtcaaagtaattctttcacattaatcatgctttccttcctgcccttcaaagagctcctggtgactgctacagcctcctgcccacatctttcctgctaaacattgacccatctggctttctattgtcttttgtttctgacaatgcttttgtaatctcctgtattacttctgagcttgttaagctattgctaatgcccagagttccctgcaactatcttctgctcttccccatcatccccaaacacacacgtacacacctcccaaaactattctaaaaggcgttttagccagtctatctatacttttcattttgaaaaatttgaaacaatcacttctataggacacttctatagtcagtataggacattctcctaagaagccataaaatagtttttacatctaataaaattagcaataatttaatataatctaatattgagtccatatttaaattttccagtgatccctaaattttttttacagctttgtttttcaaaaccaagatcaatcaagatttatccattgcacttgttacatctgattacctcttaatctagaacagttcccacgcttttcaatgtcactgacctttggaagaatttaggtgttttcttatacaatgtcccatattctggatgtaattcttccctcatgctcaatttactcattcctttatgcccctatttcttgtatactggaagttgggtcaataaacttgattgtattcaggttaagcatttttggcaaccctccttcacaggtaatgctattagtgcttcatgttgcatcaaaacaacaggcatataaaatcaggttgttccacaattagcggtgctaaacttgatctctgggttaagttggtgacagctgaatttcatcatagtaaggtatatttcccctttgtaattattggatagtctgtggggatactttgtatgtaggtgtgatactttgacattatgccaacatcctccttttccctacctcctttcaccagatggtttttagcttctcttgatacttgcctgaattattgggaattgcaaacggtgatttttctgattccgtcattttatttatatgaattggctggcattcttctttaaagagaaactcccttcccaaactctttgagtatcactctggacttaatagatttttaaaatgtattgaaggctttgatgatctatgaattattattatttttagtggccaaattgactcatatttggctagtggagcccacttgagctgggctctgtgggcttttaagttgaccttattcattttggggcacttccctgatttctggtaaggtatttcaggcttaactttctttttttgtactttatgcgcctgaaaccggaaattagccatttctctaagaaacattatttcctcttagtggggattggtatttagatatcaagctgtgggcattctctaggggggtgacattgcttctaagaaatatacatatgaaaaattctaattcaatttaacatcagaggttttaacatcagtttttcccactataagaggaaagaagtacaaatataaaagaaggtggatcttcttttaaaaatacaaaaaggatatttgtatttctttcctcttagagtttctactaataaatttcttgtttgttttatagtaggcctgagtttcaaaattacattaccaataccactactggcaataaatatgtggtgtttgagggcttttgcttgtttttgttctttttgctctcagaatataaaccactaagaatgtatggttggagtactattaagcaccacttctaaataagtagtaaagaactgccatttcaaggccaggcgcggtggctcacacctgtaattccagcactttgggaggccgaggccggcggatcagaggtcaagagtttgagaccagcctggccagcatggtgaaaccctgtctctactaaaaatacaaaacaaaattagccgggcatggtggcatacgcctatagtcccagctacttgggaggctgaggcaggagaattgtttgaacctggcaggcagaggttgcagtgagccaagattgcgccactgcactccagcctaggcgacagagcgagactcgtctcaaaaaaaaaaaaagaactgccatttctggccaggcccggtggctcatgcctgtaatcctagcactttgggaggctgagggggggtggattacctgaggtcaggagttcaagaccagcctggccaacatggtgaaactccgtctctactaaaagtataaaaattagccaggcgtggtggcaaatgcctgtaatctgagctactcaggaggctgagacaggagaatggcttgaacccaggaggtggaggttgtagtaagccgagattgtgccactgcactccagcctgggcgacagagagagactccatctcaaaaaacaaacaaacaaacaaacaaacaaacaaacaaacaaagcctgacatttcttatcctgtaaagccttagactataatctttttcaacctgaagaaattctcgttttccgtttttagtggcatatttttgttttttagtggtacagtcttctgttcctcaatggtacgtgtaaaatacagaataattgaaatgcacatcctaaggctagcagtgcaatacaaatttaagcaaacaattcaggattgctatgactgatgaacatctgaagacctgcgctgaccaacaccattttcaggttgttttccatcaactttaaatggatgatgccacctaagcttcatcccaggatatatgtgttccatgtactgtatccaaaaacactcaataagcacaaaaaggcaagtagcttgtcctgcagcaaattatgcaaagattcaaatcacttattaggactaaagaaaggagcataaaacaattactatgattatgtacacaactctaattcatcacctttggcattttgtcaagatagaaaaaacgcggccaaatctggggctacttttagtcaggaaatgatacaataaaagctgagataaagaatgcagtctctgccccagggaggtggctcaccctgtaattccagcactttgggaagacaaggtgggcagatcacttgagcccaggagtttgagaccaacctgggcaacatagcgaaactctgtctctagcaaaaaacaaataatacaaaaattagccgggcatggtggtgtatgcctgtagtcccagctactagggaggctgaggcaggaggtttgcttgagtctgggaggcagaggttgcagcgagctgagattaaaccactacactccagcctgggcaacagagtaagacccagtctcaaaaaaaaaaaaaaaaaaaaaaacctatttgaccaacatgtattactttattgcatattcttctgctttacagtgggctggcacatttccaaagagctatacttaatttttttttttttaatttaggccaggcgctgtggctcaagcctgtaatctcagcactttgggaggctgaggcgggcggactgcctgaggtcaggagttcgagaccagtctggcgaacatggtgaaaccccatttctactaaaaatacaaaaaaattagccaggcgtggtggcgcacatctgtaatcccagctacttgggaggctgaggcaagggaattgcttgaaccagggaggtggaggttgcagtgagctgagactgcaccactacacttcaacctgggtgacagagggagaatccatctaaaaaaaaattaattttttaaaatttgtgacaggatctcactatgttgcccgagctggaatgcagcggctattcacaggcacagtcagtgtgtgctgcagcctcaaacttctggatgcccttctcagccttccaagtagctgggtgccatcatgccatactttaattttctttagtagaaaggaaatagctgtatattctgatgacaatttggagcctttacattttatttatttactgtctttcaataaaataaatatcacgtttcaaaactaaaggtttaagatacttttttttaaataaacatgattaagtttgaatgcaaatgttttaagaaaaatcagacactgaaagtaaattttgacacttcaaaggaaatagtaattcagaaagcctatttgaagtattgctcttagttttgtctgctccagttttgtctggagcaacaccgcatacaattgtgaaaattaaatgaacctgtgtaaagtgcttagaatggtatctggcacatacaaactgttatttctttgtgaaaattaaaattcaatatagcttttctttataaatgaatgttgcatagataaaaacaatcctaaaaacaatcctgaaaaaattattaagatggtatagaaatctatgatggaacttataatgaatatttgcctattttctgatctatggggttcaggaaaagttctcatttaagagatttttacacaataaggttgactttatattcaaggaagttcctcctcgcatcggttcttaaaacacacaattacaataacagaagttctctaaaactacattttattttaaacgaatatttatttaaaagcacatgctttctgttttgtctgccttcttaattctagctacacactgctgccctctgctgcaatttcaatctttcacactcacaaacccgacctagtttccatctatacaggttatctgactcactgcaagggttatgtgtgtgtgtgtagagaacaaaagggaaggctccttgaaaagaaaactaggaactaaagatgttggcacagttcaaaagagcccatctgagaagtgggcctttttttttttttttgagacggagtttcactcttgctgcccaggctggagtgcaatggcacgatctcggctcaccgcaaccgccgcctccaggttcaagcgattctcctgcctcagccacccgagcagctgggattacaggaatgcaccaacatgctcggctttttgttgttgttgttgttgttggttttttttttttgtatttttagtagagacggggtttctccacgtggtcgagctggtctcgaactcctgacctcaggtgatccgcgagaagtgggcctttttatggatccagcaacaaactcccaacctcccaggaaaggttgcttcctgtcatctatataaaactttgtgtctcaggcctttattgcttttttaattgaaataaattatatatatatggtttaaaaaaaaaagaaaaggaaaaagggtaaacagcaaagagggtaatcaataaaacatttggcttccactccaaacctctgaacagttttgtgtatccgtccagaaagcgtatatattattacaaacatacacaaggggcatttctttttgaacacaaatgtgagtattcctaccactctttaccattctagactaacttggacgttgttccctatcaggcgagattaacccaactaaattaaaaccaagtaggttttaacaaaacagattttaaagaaatcaatcttctctccaataggttatttctgtcacgatttaattagctttctgttactactaaggcttgtatcatataaagtagtggttctcaggctgggcgcggtggctcacgcctgtaatcctagcattttgggatgccgatgcaggaggatagcttgagcccaggagctggagaccagccagggcaacgtaaagagagcccccaccaacaccccccgccacccaccaccaccgccccggaaaagcagtggttctcaaacgtcagcggacattggtatcatctggtgagcttattaaaacaagagtctctggattcaggaggtctggggtggggcttgagaatttgcatttccaataaattccaagccggaactccaggaagataacctgcattccgcgcctggcgaagcccagctacgccatttccttcctaggccccgcctacttcgtgtccctgacagccagggactggctagagggcgcgcggagtcacgtgagtcgagcgacctcgcgcgagagtttgtatttctcgcgagacttcaccgtctctgtcttttcctccttccagtgcccggcgttcctcccttccccctcgccgccgaccgagttcttccttttcagaccgggtcgccttgctgtcgtcgcggtgattttcctgctactgctactgctgctgctgccaccgccactaccactgggctcatttgccccgaccccttcccgccgccccgcccccagccccacacaaggtaacaacccccctgagggagagagtaaggcctggccgggcccgggtccctcccgaggtgaagcggaggcccaaggctgaggagcccgcctcgccggagacgcccaggcgctggccctggatcccggagccacggccgtctctcagccagagctgagcctcggcggcccggccggcgctggcctccgtgcggcggcggcaaacacggcccgcaggggaccgggtcgggtggggctgggcgccgcgcggctccctgtggagcctgcctgttggagcgcggcggggctccggcggtggtcttggagctggcgtgtggatttccacgtccgaatgatcgagttgtggcgggctttgaggtgctgcgtggcggggaggagagcagcctgggtcgctgtaactcttagggggcctttgcaggctcccagcctttggttggacgggaattttacgaaggagaagggtcctcggaaacgtggtacatttgcttataaaccatcaaaaaaggttaattggtatcttattttcaggaaaatgactgagctggatttggcgaaaggcacattcgttagaatgcctaaatgggagagtacctgtgctgttctttttgctgaagataatgcaccgataaatatttaagcgactgggcgaaagatttttgttttggagaggcacttttaaatacactcttaattgaatagttcaagtaaagatcgtagtttgtgtagttaatttaaaaacgcacttgtttggctttggaagcatactgtagtgcttaaaaataagtatttggattgtttttgaaagtttcgacttttccaacagagtagtgctttttaaaaagataacactgattattgagccgaattcagcacctaccctgtggataggagttaaaagaaaattagaaatttctttgtatctgtatgcttttttaaagtatggaatgtatctcaagtttataatcctcagaatctgttgcctttaagtttgtggtttagctgaagtctaaactgagagtaaaggtaatggtggtaaattaagctgcagtgttagaaggagttagaggcaaaaactggtaattcaggcagacaggggagttagttttttatgccttgatttttggtttagttttcatggtctaaccctttttattttccctagatgtcagaggatttagcaaagcagctggcaagctacaaagctcagctccagcaagttgaagctgcattatctggaaatggagaaaatgaagatttgctaaaattgaagaaagatttacaagtaagtatgggtagacaattgtactttttctctgtttttcaaattattgcttgaatccctaagtacccaaagcgccttttgaggggttacaccccaccctatgtatatatgtaaattctgtaggtaccattgcttgtagaagtagggttgcttccccagttctcaggtttctgtacatcagagtgaaatattgttctttgttatataaatcttgtgtgcttacataatttttaaaaactaaagttgatagaaatttccaagtctgtcagattttcaagacgagaggtacatgtaacttcacaatgaaaaacgcttttagtttttaagacctggcaaatgaaatttagttcaaaaagtaacaaagattgaaggagaaaaatagaaccttaagattctttttaataccacaagattctttgaaaatgcgtgccttttttttttccccaaagctagtggattacattttgtattgaaaacacaccacaaaaatgcctaaagagagacaagtgctttgtataattgttacatagatgttcagacttaaggctaggttttacagtaaagttgttgacacttgtggaaattgaactatgtggtgaaaaggagatctttgtcatggtagagtttagtagataatgaaacctttttttgaaaacctgcactgggatttcaagacaaacatagagccatcatagtaaataccttttgtgtttcaggacaccagactgattcagaaaaatgccatatataatttgcaaatatatatgacttttaagagcttcctttaaattctgaacctgatttttaaaaagtttcaagggtgttttgattagagattgctttaccgactgagtactaaactcaaatctgtatcctgtctaaaaattcattccctccctttattatcccactgcccgttaaaactattactattttagggatatcagaactgcaaacaaacttaacggaaatagggtccggatttgggattctggaactgcttatctgggcgtaattaagatgagttgaatactttcaagttctacatttagaataaaattgcagtagtatgttatttttaaacacacacaaactatctgggttaatttcaatatgaacaagacccctcttcgatacgtagaagccaggcctgtgggcttcagggtgccagtcaatacaaaaaagatgttttgggagcagtttctcccactcccaggcccttaagtgagaaataacccagtggtttgccacctgtccatttgatttgctcatatgttgtgagtatacattgaagatgaggcaacagaggcacaccgacctcttattttcttacactctgtaaagtgctttctgtttgccccaaagagagatgccttgactacctttaccaacttaagcagtccttttttaggaaaagaaaacactgggtgccaatgttttgtatattgcttcttgggcagtgggaggaggggtatttgttgaactggttgggttggggaagttgggagtggagttagaaatagcattatcatcaggtctttttaatatttctagaataattcctcattagagtctgagcagaactgccttaccatgtcatgatcatcatagtggaaagtactgtagggggaaaccattgtgataaacactgtagtaagcccctaaaaggcttgcttgcaggggttcagttaataatgacctggaaatcatttttctgtaaagtatcctcttttctataaccatttaaaacagcactgtccagtagaactttctgtgatgatggaaatgttctatatctgctattcagtaccatagccactagccacatttggttggatatttgaaatacagctaggtttacttaggagctgagtttttagtataacttaattagccacacgtgactaccatactggatggcaaggatttagaagtgcaagttttaatacttcagatagtaataacagaatgtttttcctgaccagtcttgatcagagtttcttcccattttattctatcattagaaatttcattttggtccctagataaggtctattttgaattgaaaactactcaaaaacggaaaccatcttttaagatgaggtaatactctgaaaagtatttggctataagcttccacccagtaattgttgtctccattgagactacacttaacagcttctattttgctgtggggttccccccctcattcccctcctttttccttctctgccttctgggatgtatctcatgctatgggtatttaattcagcttgttatatttggtgaaaagtctgttcagactgattttgtggcttcctcatattaatattttttgaccatcatatggtttctaatttcttgtgttcctctatagaattagatccttatcccagttattaatttgtttgccctttgttttatgacaaaatgctttttttgcatcttttcaatgacttcattttgccagtaaggtttccatgtttatctctttcatgtactgtctttcatagagactaaagttattcagcaggcagcaaaataatctactaaagtcctgcctttcttttttcacttaaaaaagtgggtgtgataaaatccaggctagctagctgactagctccccgggcagtctatgataatcagagatagtcaatttattaggctgttttgctgaataagctggttctaaaggaggcaggggtcaagtcacttgtctcatatattacagtggctctctgcatccccgaaacgccttccttcagtaagcagagtgcttgagtgcaccccatttgacctgctgatatgtagatcacaacacctgatgcttcctggaattgccgattactgtaactgctgcccatctgtcgatgaaggagcagtttcagaactcagacttgagggaggaaaagtaattaatggtatgtaccttcaagaaccccctcatacataaaatagtttttctaatactttggtccatacgcacatgtgaagaatagaaatttagaaggttcttcatagtttgttgggagggttatgtaaaaccatggcaaagttaaaggacattaggagtaaatgctctggattttttctaaaaaagggtcatttcagcacaggcctctgaattcactaatatgcacagcttttcaggacccttttctttgatgaaatatatttctttaacaaaatatatttggaaaacagttctgtcctaaaagaaatagagttctaaatctgaaacctacaagtgcagaattcatgtctgtgcttaagttaaatgatccctaggtggatctggaagtatttaatgatagagatttgtgtgggctcttgagtcaggctgactggattacattcctacccctaaaagtggttaaaaataagaccagataatttactcttctgttgtgtactacttgatctagttatttggaaggttctttgctttgtttgcaaaggactgtctaattaaaaagatctaattaatggctagttggcaactaataaaacttagagatattattcctactaaatttttaaatcaaacctaagtgttctatttatttatttataaaactaacctttcttcaagagatttaagactcaaatattagttttttcagaaatagccaggaagatttagaatctttaggagagaggtaatatttaactttcttggctactggaatcaaaattactattatgaaacctcagtgggaactagaagaaactcagtacatagtttaactttgttaatttttctccccaaacacacagtatgatgttttaaatgcaacaatgggtgaacagctatgcaagttcttagatcagataagatgcatagtgtggatcttcattagagtaacaatatagtagacaggtagcagaatctgtcggcttgtactgttctcaattttttagccatccctacaccaaacatctttgaatgaagccaataaatgtaagcctgaattagaaaaaaatatttgccacacagaaaggcattgcctttgtgtgttacctttttttcccccttttaaatgaagctgtgctaatgtgcttaacattaaggtatggaacatttaaaatctaacctggtaatttgcttacccagatggggtgagttttacaataattgaataggaagaccactggtttcttttacattgcctgtagtattttagtcgagatatgtataagtaggaacatttttgttactaataaagctgcttaaagtgttttgggattgcttggcagttaatactgctgagtaatgccctataaaacagtacagttgcataaaatatgttacaataagagtatctaattcagtgcctcatacttgactttctcatctttagagagatctattcagctaaaataggcacttagaaataatgcatggtataagctcaagtcttatattttcattagtatttgtggttaagttgaaaggcaactatatgggcttaagtcacagctctgccacttaactggtagacaatactgtatcagtttctacatggggataatcacagtacttgcttaatagtgttatgagctgcaaatgaaatatatgtagagtacttaacgtacagtatgaaggctgtcatcagaaactaagttgacaatgagaattataaaaataatgttgtagtttttgtttttcttttttaggaagttatagaactaaccaaagaccttctgtcaactcaaccttctgagacgcttgcaagttcagacagttttgcttctactcaacctactcattcatggaaagtaggagacaagtgtatggcagtctggagtgaagatggacagtaagtgtagaaaaaaaaactctaactataacatgaaataataaaatacaatggtaagaagtttttattcagttttaactaccctattttaatcttgacttctattaggcagtatgatttatagagccaatttgattcttgggtggttgccattaatacagtttagttttagctttagattaagttttggggagaagaatggctgggattctggaggaaagaaaaacaggacaatgaatgggtgttttctaaaataatctaaattattttctctaattgaaaattgagtgaatggttggtttttctgagaattctgtgaagagcatacactgacatcattcctataagaaatatcttttcgctgggtgtggtggctcatgcctgtaatctcagcactttgggaggctgaggcaggcagatcgcttgaggtcaggagttggagagcagcctgaccaacatggtgaaaccccatctctactaaaaatacaaaaatcagttaggtgtggtggcgtgtgcctgtaatcccagctacttgggagactgaggcatgagaattgtttgaacctgggaggcggaggttgaagtgagctgagattgcactactgcactccagcctgggcgacagtgagactctgtcgcaaaaaagagaaaaaaagaaacctctattctcaaagacattaaatcacgttgagtaggtacatgtaagagacttgcccagcaatattatgattgggatgtccttttttgatagcagataactaacttcaaccactcttttgtattctctttgctgaaacaaccatttgattatagaagtttcattatagacacatgtaataattttatcactacagtataagtcttgtaggctgagtactaaacctttactcacctgcttacagccatgatatctttacaggtgttatgaagcggagattgaggagatagatgaagaaaatggcaccgctgcaatcacctttgctggttatggcaatgctgaagtgactccactgttgaacctcaagcctgtagaagaaggaaggaaggcaaaggaggacagtggcaacaaacccatgtcaaagtaagtgactttgacttttccattttaggtgcaatcttccccatttggatacttgaagtagtctgcagagagaatctatgcataagaaagttgtaatactgttttaccgttgttttgaagattagcaacaaagggtcaacattgtctgtgtaagtgtgcctaagtaaagtgaagataattttgattcccatttaggcattcagtaaatattaagaagataactatgtacaatgaacatcttcccagcatattttataagccaggtactggggctataccacaggagaccacctcaggccttgtcccaactgagtttatatttagagaagaaaactcatcattaatgaagtgctttaatagtacagtgtaaacattacaaaggagctataacaggtactgtaagggaacaagaggtactcagcctccacttttattattagggcagatttctttgagaaaatgacatctaaactgagatttgaaaagagtaagagccaagtacaaagctacaaggcggtatgatgttgatctgggcttgaattctttgttattaatgagcattatgaccttggagaagctgtttaactctgtttcctcatctgtaagataggggcagtacattattgggttgtgaggattcaaacgataagtgttagtaaagcttgtaacagttctttacatgtagtaagagcttagtaaattttttttaaaggggggaggtgagcacgtacaagtaacaaatccctgtggtaaaaacttggggcctggaaggtgggtggtctgagaagagattagagaggtaaagtccagaacataaagagcttgtaagccaccgataacattttaagtagaggggatatgatgtgatcacatttgagctttagaatgatcactgtcagtagggagaggcaactactgctgtgatccaggtataagatgatggcctgaacccagggagttgcaatgggaatggggaactatgcagttttgaaaagtaagaggcagaattaacaatattttggtgaacttctgcatatttgccacaacttagtcttttgatttgtcaagagtttttgaaacttaagttgctacatatttatatttgaatatgcaaaaattatatattaatgtaagcattccaataaaataaaattctagaacaatgtatatatatattttttaatgtctttgtcatctgtgtaaaaagccatagcttcatggtggtaatatggtaccggggagtctagatattgcccctcttaaggatctttcttttcatccttttggtgagaagtcagtgttaactgagcagaaattattgggggttttaggctctgatcctatttagaatcttatttagaatgtttttgaaacccccaggtgttttgttttggtgagaattattagctatgatttccatttgtgctgctgcattcttccaatgtaggtaaaatattttatctgcatcgaatctcttcatacatttttttctaaatgctgcacttgttaactatgtctatttggaagtagttgaaggcttagatacccattaatactgaaactcaacttattcctaaaacaactggtaacagctatacaaaagtaaaatagaaagtcataattaaggctgggcgcagtggctcaagcctgtaatcccaacactttgggaggccaaggcaggcagatcacttgaggccaggagttaaagaccattctggccaacatggtgaaaccctatctctactaaaaatataaaagttagctgggcatggtggcatgtgcctgtagtcccagctactcgggagggtgaggcacaagaatctcttgaacccaggaggtggaggttgctgtgagccaagattgtgccactgtactccaactccagtctgggcaacagaacaagactttgtcgccaaaaaaaaaaaaaaggcatagttgaaatatttaccttatatgggtaaatagattacagttatgtttgaaagcttccaaggatgccattttttaaaaaaacatttcttagtaattctgggtgattggtactgattttaatgatttagtactttttattcatagaccattgtatatgtttattagattttttttttgcactgccggtgtcttcaaggaagtcattcttgtatgataagtcttaacagttgacatttaactttttttcatgcagaaaagaaatgattgcccagcagcgtgaatataaaaagaagaaagctttgaaaaaagctcagagaataaaagaacttgagcaggaaagagaggaccagaaagtgaaatggcaacaattcaacaacagagcctattctaaaaacaaaaaaggccaggttggtaaatctttttacactttgtaaatttgagaaatgcaactgtcattaaaataactttaaaatgaaaagagatgtagattttttgtaaagtatgattaactcagattttgtattccgaatccttgttgatgctcaatttaacttattgaaaaatgttagccattgtctctgcaataaaaatattacaaatgagagaatttatatcagaaattacaaaaggtctatgttcttttccttctataaactaatatttgaaaaaatagttgctacttagaggcagtgtgcttaactctatctgctttgttaacatgccttcatgctgggcatcactggtagattttatttaaaagtgcattcagtttcccttgatacacttaccttgtgtgtgttgggtagaaaataactgtagcattcatataggaagttgagaataaggataacctgactttcacccatgtgttactcttcactgccatcaaggtagcccttccattgatggacatggcttctggaaagaagcgcttccttttcataaagatgtttattttgtgacaaaggccaagggacttcacaatttggctatcataacaggccccacagtaaaccacaatacagccagagctttaatcatgctagaatggctagctcacagctgaagttaggatttgcgtttacaaaactaaaattttgacgtatcagaaggcaagtgttatgagtattagtaaatgtaatgatattttccacaacttagaagttacagtaaatggcttccagcatgggaccacttctgtacccattttttaacactaaacaaaggcaatatgtttttcttcttttaaacgttgaaaccagaatatattttaacattacttaaaatttgaaattttttattttttccaacactaatcaggaatgatttctgttttctttcccttaggtaaagaggagtatttttgcttcacctgagagtgtgactggtaaagttggagtaggaacctgtggaattgctgataaacctatgacacaatatcaagatacctctaaatacaatgtcaggcatttgatgcctcaataatcagaaaaactgttggatttcatctctgcagggctttacatttacctttttatccttatatttttctaaaggtaaattatttgttagatgagtaagcaagataccattgtcgtcattggttggcttcagtagaatgaaacgtgaagaaattgcatttgataactgctattcatttaacttttctcattatcagtaccacggttccctcaaagtttgttgaataaagcaacttttgtagatgctgtttcatacagcacttagatgaattattgatcttcctaatatcaggcgcctacttaacctatggtatgtactttttgtaagttgtaacttgaaattttcagatgctttgaacttgacacatactctagcaattcattggaacaccaaggcaaaaacaccaacctgctaaaagagatcttttcatttttcttattttcagctttaaaacttagctgtcgttcagttaagcttaaagataggttaatttgtaaatggcaaagtttgttttgaggtttttcctcaataacttgtttcccaggcctattaggccatctctaaaattgatctagctgttttatttttatgtactcttagttttatgtaagaaaccttaggatgagctcccttttctaaggtgtttttgttttttgtatgtttgcttttttcctgttttttgttttttccatttacggcagtggtaccatgttttggatgtgtgatgtttatatgggagaacaaaaagctgatgtatagccctgtatacagtgtagatactatttttgtaaaaacacaaggctaaattaatgaacaagaatactgaatatttcatcattaaaaatttcttgtatttcttgtgcattaatctgacgataatttccctgtatattatgttcatttagctgtttgtaatttttgttaattagatcaggttgtctgcatttgttggtgtaagtgaacatcatcacagttatcctgagttgagtttaagccaaatacatgcatagaaaagggtcttcctattaatggaagaaggtaatttttaggatgtgtattatttcagttttgtatgtttaacttttattaaataaagtgtttttaaaatctccagggtgtgttaacaaaagggtaaagtctttagctgtcagcacttaaagcaattaaacctccaagtacttgcacacggcattcatgcaagagaatactgagtgtgtgagaggtttcagtaaatgcttaagtattccttccattagaagaaattggatcttaaagggcaaaccaggcctgtgtttataggatgtcctcattttaatgggtgtttgtagatttttggtggaaggggaaaataagtttttatttcatgaattttaattttttttataaattgaaacttaggacagtggtaggtagaattcttcatctctcccttccacacccacccctctcaacccaggagggtcactttttcttcatataattcgtggccacagggtaggacacaaaggacagaaaggcacaaactgcagtagaaaaagggtttgttgaagcctgtaaacttctaaataaaatatactttgttattgtaacatcttaagagcttatcaataatcaagagtagccttgatggattgcaagagaatcctttgaattaaaaagcactgggaagaaatttggtgtcattgtgtgaccccagaaaatggttgttgagattaccttggtggtattagaatagtaattcacttgatgtttgtgtaggcaggactgttaacagtcttgtccctcttttgaccctggggggccttagttttcccagaggactttgcagtaggagagagaaaaagaataaaagtgaccttaaaaaaaaaatgttttgaaaatagacctttagaatgaaatcagcaacctttgtgtcaaagatctagatgtggccctttggaaaatcctagtgtcaggatgatgtttgtgtctctgaactaagaggcaggactcctggggagactacctgtcacagtgtgatactgaatttgagaagatgctcaatgagaagcatgatacccacagtattttacagttgaaggtggttaagctctctatattctgaaacaaaatataaaccttgaccttaaaaagctttgttagaaaatttaatgtagagttttccccattaagaaaggagacttgaagctttgaaactgtgacagactgaaatgttaaatattgagttatgggcccctaagtagaaatggttgcatgtaacttaccaaagcttgacgtttgactgttgttaccatttcaaggaaagaacagtcctaacctcccgaaaataaaatgttgagttttagtggtaatcacaggtaacaagtgctattttaattaacatgtagggaggccacagagcatactggaaaacagcaaggactctagagccagactagtgtttgtttattaccatttattacctgtgtattcccatttattacctgtgtattcctctgattcatttttctcagctgtagaatggaaaaatctgtttcagttttaaggattgaattcaaatgtgtaaatagcttaagagtatccggcataagcactatagaagcgtctgctattactctgcagagtggcagtggtgaattatctgatattttttccttaacttgaatagcaatccacattacaatggataacaatacccattgtttatgatttgaggcatccaattataactgtattattgaagtgttatcaaattaccaaggctgtagggtatatttagtattcctagttaaaggtttgaactaatttgtatactagggcatgtttcttaatgggaagggggtgaaggttataataaaagtcacccctaatgcttgtttaaaattaaagaggaatttgtgggcctgggaccaaccttagacttatccaggccaaggtatgttgtttgacgaacaccgcaggtgatcctgatgtgcatccccgtctgagaactgttaactataaaagtttgactttggaaatgaagaaaaattaccttttagcctaatcatgaagactaggcgtcaaaccaaaacaagatgcatcagttactgtagcaacacattttttttaaaaaattgcttgttgtcacaatgaagggtgtgtatctgtttccagtatgcaattctaatgccaaatgtctgccttaaaaatagcaaaggagaccatcaggttaacataaaggaaaactgtagttgtgtgactcatgtgtctgtagattgtaattttataattacaatttttataagataaaaaactaccagttgtaaattcaaccaaaaaaaatttaaagctttgatttagctttttgctttaacttgggtagtaactgaaatataaaggaagaaaatctattaaaaccaatgaggttttatatttttttaaatcttgattcaataaatatcagctgaattaagtatctgtatggtactacgaagcaatcaattagtataaatggcaatttacaagttcaacagtaaatgtaaacattctttgtatctaggatttttgagttgcaagttaaactgaatttttactgcagtagagaggaggagcatagcaggcaaaataacaggtaatactgtattttaaacaaacagaaaaacccaagtaattggcgccctttatccaatcatcttttaaaaggcctatgtatgtgtatagttatgttcttaagaaacatcttaagaggttcagaaatcaattttatagatggaacattttaataattcgttttggcctagccaaaagagtaaaataaaacaaaatagtgttagatttctgtgaggtgttttaattgccttttctgccttttaacttatgtatataaaggtggttcttttgtggccttgattggggtaaagcagaactgagaataataggggtttgtagtagttgacagctgaactagctaaaaatacgaagttttggatatttaattaatctttcagttcccaggcaacaaaaactggaaacttagttccaccacacaccttaccagttcatttaaaacaaaaccagtatagtcactggaattatttaaactgtaatttgtttctccacttagtcttttttaagaatacggctgaaagagccatggtgataatcattaggagagaaggttggcattttgtttgaagagctactttctcaacttggggctgaaagttatggttgttgtttgctggctcaggatttacctttcttggtaaaactgatgtgcttttgttttttcccctttcaagccctgtacttactttagcaagatgcagtgaatttctgaccagagaaacaaagaattcaggcttggaggaaacacttgactccatatcctgggaaactagagttgaagcctgagatctgaagctaggctagtaatcactttaatagatggtaactgtccaaatgttcattgttcagaagtagcaggaaggagtaagtatccctttaattcttttgcctggagtttttccctccaaaatcgcccctcaggtttagttgacctagctttctaagtgtgatgaagctactaatttagaaacgactgatcttaaatgtatattcttcttataattttagaggtacttttataggttttgttatatttttacagtgctattctgtgccctggtgtgagcatctgaaataagtatctcaattattaccctaccaataaagatttttaaagcattccccatggcaaagagctatgagcttgaggatatggaaaaaattccaaaactacagtaagttagttggcagtatcttaaaagaacttcatttaaagccattttctctaatttatgactgtatagaaaggtaaaacaacaggaagtgaagttttcagccagtacatttattttgaactacgctgcctatttaaaacaatctgacatattccacaagaaaaccagtttcctattagttctgatacataggaaaggagatagctgctgattgtcttttcttggcaaagtcagcactaaatactgacctagggcacattattatcagtgtataatatgttcaacttgagattagtcctttttcttttttctagaaagaccaactaatcactaaaactgatgctgcattaatcttataaagccttcatttaagaaattctataggaggctgggtgcagtggctcacacctgtaatctcagcacttcgggaggccaaggtgggcggatcacataaggccaggagttcgagaccagcctgaccaacatggtgaaatgccctctctactaacaaatacaaaaattagccgggtgtggtggcacatgccatagtcccagccactcaggaggctgaggcaggagaattgcttgaacccaaaaggtggaggttgcagtgagccgaggtcacaccactgcactacagcctgggtgacagaaagaaattctataggaaataaaaaataactactttatattaaagtattacctaccatggaattttaagtgaaccaatatttaggaacagtctttttctgtaagatctggagtcaaagtaactaaaattcaggattaaggatgcattaaaaggttgcattcatcagagaaactagagaaatacaccccttttaatttccttagtgctacatcttcctagatggcagtcagggagtggggtggtagtttatatatatcagcttaaatccttacaacccttcaagatagaggtagtacttataatagcttttcaggaagaaaagggctccatgaagaaatcaagcaacttaactagggtcagcaatgttggaactgggattaaagtgtaattaaaacacttgcttttcccacactttactgttctgggttaactgttgggaacctgattttggtcagcaactttgcctcaataatcctcactgcctcttaaaattccttcataatgctaaaagcagtcattgtcagggagattagaaaggcatttctgtaggagttctcatacctattctaaccagaaacttgagttgcagtgacttcagaatcctctagtcataacgcgctacagtaggttttacctgtacctttttgagacggagtctcgctctgctgcccaggctggagtgcagtggctcgatctcagctcactgcagcctccgcctcccaggttcaagattctcctgcctcagcctcctgagtagctgggactacaggtgcatgccaccacgcccagctaatttttcgtatttttttttttagtggataacggaatttcatcatgttggccagggtggtttcaaactcctgacctcaagtgatctgcgcacctctgccttccaaagtgctgggattacaggtgtgagccattgcacctggcctacctgtaccttttaatataaatgtcactcaggtgttctataaatagggtaccctaaataagattagtggaacttccagacttgtttgcaatttgaataatagtgtagctaaaggatgctcccaaaagttatttagagaacagatcatgagaatggctttgtgtcctacctgaggcagttaatattattattaatgtggcacattaaaccacatgcagttaggttatatggagttaccagtcaggctcctgtttaaattgcagaacaggaatggcaattataattcaaactgccatttgatttggcattgatactgatttggtatcaacagacatttaggagatagttacctcttaaggtgtggatacccattcatgtttttgccttcataaagaaggatggtacaaaaagaaaggtattcttcgttcacagtttttatttcttccaattaacttttgtgtcttcaaagttgatttgtcttttaaaaaattaatacttcttactcatacaatctacaccaccccaaggaaaacaaacccagggaagggtaatttagggggcagttaaaatgtgcactataggtttataacaaatgctttccagcccataatcctgtacatatgcaacaaaatggcacctcaagttcatctgaatgaaggcccaaataatgcaagcgaaggccatgagaataacaaaacaaacagaagcttagtcactggcttcattcactttgtatggtagcacagtcttcaaactgtctcacacttgatcaagagtaagcaaacacagagacaacatcttgactcagccattagtaattataagtgaaaccagaaataatttacctgggccacaaaaaggaattgttttgtcctgtttttcattaagtccctagcacctgaaacgtagcaagttctgatactgggcttctaaaggcatgcagtttttcactcacatctacttcaaagaatttcttccactgaaacatagcacaatcaaggaaaaacttcttctggaggcaaaggaagagcacaagtatatgttgaggcgtaatgtatgaccaagatggtacactatatatagaagcagtgaatgctgttaaagtgtcactcacaaagggatagtctaacattaacacacaactcaactgcactgctaaatatggttgtctttattttctttttccttgcccagccctatctaaacataaaataaaactacaggactgaaattaacaatccattaaaatcagcaataagttatgaaaatcataaagcttttttttttttttttaagtaattaagggtagttaaattatttaaagtatacaaagtccaaacagccaggggtaaggtctccaagaggccttcccagggtaagggagagggccacaggggaaccttggagtttgaaagacaaagggaacacatgacatcaaagtgcaggctagaaatttcacttagaagaaaataacattactgaaaatattcgtaagagtaacaatagcacctgcacagtgggactgtgaggaagagagagactgcctgtaggaaaatggaagcaaatctttacattaaaatgagacaagtgctgaacttaactatgttaactatgatagtgtgtctactatagatatcagatggttaaaagctggtaaaaggtaatgattctaaaaacaaaaatagcattgaccctttttctacctagcccagacctcattcattttgtgcactataaagagtgaggtgtgaggtgttttatcattatcaaatgctgcatcaaaatagatgatttttttccccatgtgtttttccactataaaagacatctatttttttttatggataagctttaaaaagatgtcattttggttttcaacacatataaacagttatcaaaatctgaaataaaaatgctgctgtggctcagaccttggcctgctaatctgcgtgcacaactcttctgacccacgcagacaaagaggcacatggagctttttccttttggcccccccaatccatactcataggccttgtaggatagaggctgtcatgcatggactgctcccatgtggcctaagggcagcaggatggagaggtggcagctgggtgcctagtgctaacaatgcaggataaggttagcttgcttagcatggaatccaacagaaagttgagctgcatgatgatccctttcaaaaggcttcatgggagtctctccttttgcagagcatgaaatgagcttttttcaaaaaaaaaaaataataataaaggattgatcatccacaggcttcatgataaactgtcccaggctgagttttaatagctcattattagctatccaagattaatacctgattttcttgtcttttcattcgaatagtttttattttgcttttaggaccataaagctcaggaagggttcataaccccatccttaaatgtgtctactcaatgtagtatgagcaaactagaaaagagaaagaggatggcatctccaatgtcctcttctcaatcaactcaaatcaagaaaatttcacacaagttttctgctgccattaaaaattgtgatttttccaatatgaatattctgaatatttgttctccttgggaggctctgccccactttttgctaagtatttgcttaaatacaggtcctctgacccttttgttcaagtatagttttgttttgttttgttttgttttaaagaggagactgcatcatgaacccaatttaagagattgtttgtattgaattggcccagtgaatattttgccctgcactgttatgtcatgctgggttctatgaagtgaatgaaagtttgacactggcactggagtaaccctcgtcactcccaatactcggcaggctgctgtggtcatcaatgtcactgatgctggtggtacttatattgtccacttctccatgggagaactctgtgctttcaacatccacttcaatctcctctgccaaaggaaaaaaaaaaagaagaagaacattaattatcgagtatagcgcaccttcaaaaactaacagcatgaggaaaagaggtataagaaatgttacacaacaagcttattatcagtgatgtctggagaacagaggaacaaggtgaagagacaggaatattttttgccaaggggaatgtctgatatacagtggtggtcttaatttaggcagcaaatttcctaaatcctttgacgccagtccgtctggacctccctaaagcacttggcgtatttgggaattagtgcttaatattaaaaggtcccaacccccaagtggtttaaaaacatctgttttgcattaaaccacaaactaattctcagttctgtttattaatcagggttgccttaaagggtgggcaggagcataaacttaatataggcaaactagaaaatttacccatccaagcctttggtggtgccattctacagatagttcaacagacttctaggattcatcataaagatcttcaactagtcagtcaaacaagtcattataaagtagagtttgaggtatatgtcttagatttaattttcttgcatcaaatatagcttgaaataagggcctgagacttaaaagtcttcagattatagtgagatccattttggtggtagtatacagacttaaaagccaaacattaaaaaaaaaaaacaccacaaatacatatttgactcagctatcaatagataatgttgctggacgcagtggctcacgtccgtaatcccagcactttgggaggctaaggcaggaagatcacttgagtgcaggagtttgagacaagcctgggtaacaaagtgagacctcatttctaccaaaaaaaaaacaacaacacaaaaattagctgggtatagtgggtgatccagtagtcccagctactcgggaggccaaggtgggaggatcactcttgagcccaggaggttgaggctgcagtgtgccaaggtctcaccactgcacttcagcctgtgtgacagagtgagaccctgtctcttaaaaataaaaaaaaaaatcttaattgttaaatactagatattcaatcatcaataatatacataaatcaatacacatgttaaaaacaaaaaggagttaaaaagttgttttctcccatcagagctagagtgaaacccaggatttttcagttaccttacttaaattcaaagcctgatgtttcacatttggcactgactttttaagggttcacactaatcacaactgctttaaaaaaaaaaaaaaagtggattcagccgggtgcggccaagcactttgggaggctgaggcaggtggatcacgaggtcaggagttcaagaccagcctgaccaatatggtgaaaccccgtgtctaggctaaaaatacaaaaattagctgggcatggtggcacgcgcctatagtcccagctacttgggaggctgacgcagcagaaacacttgaactcaggaggcagaggttgcagtgagccaagatcacgccactgcactccagcctaggcgacagagcgagacactctctctcaaaaaaaaaaaaaaaagtggattcttgtgaggccaaaaggacagggtgaagctatttccaggaatatacttttcaaaagggcttgttgcttcaaaagttttagagattctagagatgtttttaaaatgtaggcagctgtccaaataatctgtgaattcatatattggctctatatccgaattgcttcagaagccattgtttcccagcaccactgaacactcatccaacctacaactagaagataataacaaggcacactatccaaaagagcatgctgaactcagtcaaaataaagtaaaatgatggccaacacagtggctcacacctataatcccagcactttgggaagccaaggcaggaggattgcttgagcccaggagtttgagaccacttgggcaacaaggcccatctctattttaataaaatttaaaaatatgtttaaaaaaattttttaaaaacccaaaaaaacaaagtaaaatgagaaactgctttagccaagtgtaccacagatgttaactaaaagc

SEQ ID NO: 783 - DNA, 1084 bp, Homo sapiens
tcccgaggtgaagcggaggcccaaggctgaggagcccgcctcgccggagacgcccaggcgctggccctggatcccggagccacggccgtctctcagccagagctgagcctcggcggcccggccggcgctggcctccgtgcggcggcggcaaacacggcccgcaggggaccgggtcgggtggggctgggcgccgcgcggctccctgtggagcctgcctgttggagcgcggcggggctccggcggtggtcttggagctggcgtgtggatttccacgtccgaatgatcgagttgtggcgggctttgagatgtcagaggatttagcaaagcagctggcaagctacaaagctcagctccagcaagttgaagctgcattatctggaaatggagaaaatgaagatttgctaaaattgaagaaagatttacaagaagttatagaactaaccaaagaccttctgtcaactcaaccttctgagacgcttgcaagttcagacagttttgcttctactcaacctactcattcatggaaagtaggagacaagtgtatggcagtctggagtgaagatggacagtgttatgaagcggagattgaggagatagatgaagaaaatggcaccgctgcaatcacctttgctggttatggcaatgctgaagtgactccactgttgaacctcaagcctgtagaagaaggaaggaaggcaaaggaggacagtggcaacaaacccatgtcaaaaaaagaaatgattgcccagcagcgtgaatataaaaagaagaaagctttgaaaaaagctcagagaataaaagaacttgagcaggaaagagaggaccagaaagtgaaatggcaacaattcaacaacagagcctattctaaaaacaaaaaaggccaggtaaagaggagtatttttgcttcacctgagagtgtgactggtaaagttggagtaggaacctgtggaattgctgataaacctatgacacaatatcaagatacctctaaatacaatgtcaggcatttgatgcctcaataatcaatttttctaaaggtaaattatttgttagatgagtaagcaagataccattgtcgtcattg

SEQ ID NO: 784 - protein, 236 aa, Homo sapiens
MSEDLAKQLASYKAQLQQVEAALSGNGENEDLLKLKKDLQEVIELTKDLLSTQPSETLASSDSFASTQPTHSWKVGDKCMAVWSEDGQCYEAEIEEIDEENGTAAITFAGYGNAEVTPLLNLKPVEEGRKAKEDSGNKPMSKKEMIAQQREYKKKKALKKAQRIKELEQEREDQKVKWQQFNNRAYSKNKKGQVKRSIFDESVTGKVGVGTCGIADKPMTQYQDTSKYNVRHLMPQ

SEQ ID NO: 785 - DNA, 2349 bp, Homo sapiens
agtttgtatttctcgcgagacttcaccgtctctgtcttttcctccttccagtgcccggcgttcctcccttccccctcgccgccgaccgagttcttccttttcagaccgggtcgccttgctgtcgtcgcggtgattttcctgctactgctactgctgctgctgccaccgccactaccactgggctcatttgccccgaccccttcccgccgccccgcccccagccccacacaagatgtcagaggatttagcaaagcagctggcaagctacaaagctcagctccagcaagttgaagctgcattatctggaaatggagaaaatgaagatttgctaaaattgaagaaagatttacaagaagttatagaactaaccaaagaccttctgtcaactcaaccttctgagacgcttgcaagttcagacagttttgcttctactcaacctactcattcatggaaagtaggagacaagtgtatggcagtctggagtgaagatggacagtgttatgaagcggagattgaggagatagatgaagaaaatggcaccgctgcaatcacctttgctggttatggcaatgctgaagtgactccactgttgaacctcaagcctgtagaagaaggaaggaaggcaaaggaggacagtggcaacaaacccatgtcaaaaaaagaaatgattgcccagcagcgtgaatataaaaagaagaaagctttgaaaaaagctcagagaataaaagaacttgagcaggaaagagaggaccagaaagtgaaatggcaacaattcaacaacagagcctattctaaaaacaaaaaaggccaggtaaagaggagtatttttgcttcacctgagagtgtgactggtaaagttggagtaggaacctgtggaattgctgataaacctatgacacaatatcaagatacctctaaatacaatgtcaggcatttgatgcctcaataatcagaaaaactgttggatttcatctctgcagggctttacatttacctttttatccttatatttttctaaaggtaaattatttgttagatgagtaagcaagataccattgtcgtcattggttggcttcagtagaatgaaacgtgaagaaattgcatttgataactgctattcatttaacttttctcattatcagtaccacggttccctcaaagtttgttgaataaagcaacttttgtagatgctgtttcatacagcacttagatgaattattgatcttcctaatatcaggcgcctacttaacctatggtatgtactttttgtaagttgtaacttgaaattttcagatgctttgaacttgacacatactctagcaattcattggaacaccaaggcaaaaacaccaacctgctaaaagagatcttttcatttttcttattttcagctttaaaacttagctgtcgttcagttaagcttaaagataggttaatttgtaaatggcaaagtttgttttgaggtttttcctcaataacttgtttcccaggcctattaggccatctctaaaattgatctagctgttttatttttatgtactcttagttttatgtaagaaaccttaggatgagctcccttttctaaggtgtttttgttttttgtatgtttgcttttttcctgttttttgttttttccatttacggcagtggtaccatgttttggatgtgtgatgtttatatgggagaacaaaaagctgatgtatagccctgtatacagtgtagatactatttttgtaaaaacacaaggctaaattaatgaacaagaatactgaatatttcatcattaaaaatttcttgtatttcttgtgcattaatctgacgataatttccctgtatattatgttcatttagctgtttgtaatttttgttaattagatcaggttgtctgcatttgttggtgtaagtgaacatcatcacagttatcctgagttgagtttaagccaaatacatgcatagaaaagggtcttcctattaatggaagaaggtaatttttaggatgtgtattatttcagttttgtatgtttaacttttattaaataaagtgtttttaaaatctccagggtgtgttaacaaaagggtaaagtctttagctgtcagcacttaaagcaattaaacctccaagtacttgcacacggcattcatgcaagagaatactgagtgtgtgagaggtttcagtaaatgcttaagtattccttccattagaagaaattggatcttaaagggcaaaccaggcctgtgtttataggatgtcctcattttaatgggtgtttgtagatttttggtggaaggggaaaataagtttttatttcatgaattttaattttttttataaattgaaacttaggacag

SEQ ID NO: 786 - protein, 236 aa, Homo sapiens; identical to SEQ ID NO: 784

SEQ ID NO: 787 - DNA, 2422 bp, Homo sapiens
tcccgaggtgaagcggaggcccaaggctgaggagcccgcctcgccggagacgcccaggcgctggccctggatcccggagccacggccgtctctcagccagagctgagcctcggcggcccggccggcgctggcctccgtgcggcggcggcaaacacggcccgcaggggaccgggtcgggtggggctgggcgccgcgcggctccctgtggagcctgcctgttggagcgcggcggggctccggcggtggtcttggagctggcgtgtggatttccacgtccgaatgatcgagttgtggcgggctttgagatgtcagaggatttagcaaagcagctggcaagctacaaagctcagctccagcaagttgaagctgcattatctggaaatggagaaaatgaagatttgctaaaattgaagaaagatttacaagaagttatagaactaaccaaagaccttctgtcaactcaaccttctgagacgcttgcaagttcagacagttttgcttctactcaacctactcattcatggaaagtaggagacaagtgtatggcagtctggagtgaagatggacagtgttatgaagcggagattgaggagatagatgaagaaaatggcaccgctgcaatcacctttgctggttatggcaatgctgaagtgactccactgttgaacctcaagcctgtagaagaaggaaggaaggcaaaggaggacagtggcaacaaacccatgtcaaaaaaagaaatgattgcccagcagcgtgaatataaaaagaagaaagctttgaaaaaagctcagagaataaaagaacttgagcaggaaagagaggaccagaaagtgaaatggcaacaattcaacaacagagcctattctaaaaacaaaaaaggccaggtaaagaggagtatttttgcttcacctgagagtgtgactggtaaagttggagtaggaacctgtggaattgctgataaacctatgacacaatatcaagatacctctaaatacaatgtcaggcatttgatgcctcaataatcagaaaaactgttggatttcatctctgcagggctttacatttacctttttatccttatatttttctaaaggtaaattatttgttagatgagtaagcaagataccattgtcgtcattggttggcttcagtagaatgaaacgtgaagaaattgcatttgataactgctattcatttaacttttctcattatcagtaccacggttccctcaaagtttgttgaataaagcaacttttgtagatgctgtttcatacagcacttagatgaattattgatcttcctaatatcaggcgcctacttaacctatggtatgtactttttgtaagttgtaacttgaaattttcagatgctttgaacttgacacatactctagcaattcattggaacaccaaggcaaaaacaccaacctgctaaaagagatcttttcatttttcttattttcagctttaaaacttagctgtcgttcagttaagcttaaagataggttaatttgtaaatggcaaagtttgttttgaggtttttcctcaataacttgtttcccaggcctattaggccatctctaaaattgatctagctgttttatttttatgtactcttagttttatgtaagaaaccttaggatgagctcccttttctaaggtgtttttgttttttgtatgtttgcttttttcctgttttttgttttttccatttacggcagtggtaccatgttttggatgtgtgatgtttatatgggagaacaaaaagctgatgtatagccctgtatacagtgtagatactatttttgtaaaaacacaaggctaaattaatgaacaagaatactgaatatttcatcattaaaaatttcttgtatttcttgtgcattaatctgacgataatttccctgtatattatgttcatttagctgtttgtaatttttgttaattagatcaggttgtctgcatttgttggtgtaagtgaacatcatcacagttatcctgagttgagtttaagccaaatacatgcatagaaaagggtcttcctattaatggaagaaggtaatttttaggatgtgtattatttcagttttgtatgtttaacttttattaaataaagtgtttttaaaatctccagggtgtgttaacaaaagggtaaagtctttagctgtcagcacttaaagcaattaaacctccaagtacttgcacacggcattcatgcaagagaatactgagtgtgtgagaggtttcagtaaatgcttaagtattccttccattagaagaaattggatcttaaagggcaaaccaggcctgtgtttataggatgtcctcattttaatgggtgtttgtagatttttggtggaaggggaaaataagtttttatttcatgaattttaattttttttataaattgaaacttaggacag

SEQ ID NO: 788 - protein, 236 aa, Homo sapiens; identical to SEQ ID NO: 784
